United States Patent Application Publication US 2008/0114160 A1 - sequence listing, part 58

SEQ ID NO: 20092 - DNA, 6432 bp, Oryza sativa
cgcacgccacgtcgccggcctcgagtcgacgacgccgtagcccaccgacatgagcggcgccaccgccaagttctcttcctcctaccacctcgccgccgcgctccgccgcgagcccgacccggcggccgcgctccgcctcttcctcagccccaccccgaccgccgccgccgggccatcctcctcccccgcgccgccgttccgctactccctccgctgctacgacatcatcgtctgcaagctcgccgccgcgcgcctcttcccggccatggagtccgtcctcgcccggctcccctcctcgctccgcccgcgcgagcccctcctgtgccgcgtcatctccgcgtacggccgcgcccgcctccccgccgccgcccgccgcgccttcgcgcacccggcgttcccggcgccgcgcaccgcccgcgccctcaacacgctcctccacgccctcctcgcctgccgcgcgcccctcccggagctcctctccgagtgccgcggctccggcatccaccccgacgcgtgcacctacaacatcctaatgcgcgccgcggtggccgactctggctccgtcgacaacgcctgcctcctgttcgacgaaatgctgcagcgggggatcgccccgactgtcgtcacgtttggcaccctcgtcactgctttctgcgaggcaggacgtctagaggaggcattcaaggttaaggaggtgatgtctttgcagtacaacattaggccgaacgctcatgtgtatgcgagcctgatgaaggcgctctgcgagaaggggaaggtggatgatgcgcacagactcaaggaggagatggtgagcaattcagaacctttggtggattcaggagcttatgcgacgctggcaagggcattgttccggttagggaagaaaggagaggttgttagtttgctggaagagatgaaggaaaagggaatcaaggttggtagagaagttcataattcgatgattgcagggttttgtgaggatgaaggggatctggatgctgcatttgcagcgctcgatgacatgcagaagggtgggtgcaagccggactcggtgagctataatacactggttggtggtctatgcaagatggggcggtggcgggatgcaagtgagttggttgaggatatgccacgaaggggatgccgtcctgatgtagtcacctacaggaggctgtttgatgggatttgtgatgctggggggttcagcgaggcgaggagggttttcaatgagatggtattcaagggctttgcaccaagcaaggatggtgtgaggaaatttgttgcatggattgagagggaaggagatgcggcgtcactggagtcagtgttgtgccaattggctagcgttaacgccttggaatcaagtgagtgggagaaggcaatgagtggtgtgctccatgatcctgcagagcagaagattgtgaagttgctggataatttgagcttggcttgattatatatccctatggattgttgtcactgtactggttgtttttctgatctgccacagtagtttactgatttaaatttgatgactcttgagtaattatcatgggaaggaaagagatacaacatcatcaatacgaggagtttgtcattaaaaatacatgccaatctaacatcaatggtgcattcttgaagcaaatgaagcaaggagtcatagggatgattgcaagtgatgatacagaccaagtcttatttttcataacgctgccgtcttcagcaatgattgcaaacagagtttgagcatgcaaatatgctctgtccttggcaaagatttggatcaaccgcctaatcatcgttgagtaaggcactgcaaatccagttgagcttctatttctctacgatgtggcatggagtccatccaaattttttacaccgaagaaagatgtctgaaaacttgcagcggagatatcaaaattaagaaaaaaaaaactcggtagagtaggacatgaaattgcctggaatgcaaaattatcaggacttaatgctgttatgttgtattttcagtccaagttcagggttgtatatagcaatatgagctccgggattgtaccccctatacccgtgatatctaatactcctaaagatctctcttttcccataatgaggtaactagccgagatcagcgaaaagaagaacaacacgagtgcaacagatctggtgacatttttgtcagtcgctaacatcgggaaaagaaaaagagatcccgaggcacattgaagttggatgaaatcatcacagttgccttgttgtcgagggtacatcgattatcactgaaagaataaataactacgaggaccaatattaaatctaattggttgcaccataggaaaccaacctagccagcccataggaaacatagccagttgagctcactttgcaaattaaggttttttttatatgtgaatgaaatgagcagtaactctaaatatagttaactaaagttcaaaaaaatatatagttaagtaagtttggtccaagcaggggaaggcctatcagtgactaatcctagcccaacaaactatctgggccaggcaagtcctatcacggcccaaataacaagtcccaaaacagagagcctaaacaacaactccatccgagccgtccattccgcgatcagagcgctctctccgccacccccctcgctatataagcacccgagggtgcatttctagggtttccgccgccgaagccaccacacctaaacccttcttccctctcctcctccgccgccgccgccctcccctctcgccatggtgagtgaacccctcctcccccctcgacgccgccggtgaaatgctcggcttctccgtccatcatagtgtgacggggtttcgtggagattggttggttgctcacgccgcgtgttttttgttttttttttggggggttttgcaggcgtcggagaagaagcagtcgaacccgatgcgggagatcaaggtgcagaagctcgtgctcaacatctccgtcggcgagagcggcgacaggctcacccgcgcctccaaggtatatcctccattggttcgattgatttgggtggtagatctgctcgtccgcgatatgctctaagcaaaagtttgtctcaagaaatgcatgcgtcgcagttcgaatcgaattcttgcttccgcttccacgatcttctgtatgcaactcttgatttctttttaatcaaaaaaaattctctgtttcgttctccttcctaggtgttggagcagctgagtgggcagagcccagttttctccaagggtaagcgaattttgttccaagctttgtaatctctttcatcgcgttgttaccaatggtgccaccgtgtggtttggtttcttacggtgagagcgatgcgatgtttgcagcgaggtacaccgtgaggtcattcggtatccgtcgtaacgagaagatcgcgtgctacgtcaccgtcaggggcgagaaggccatgcagcttttggagagtggcctcaaggtcaaggagtacgagctgctgaggaggaacttcagcgagaccggatgcttcgggttcggtatccaggagcacattgatcttggcatcaagtaggaccatctatctgtcttgcactcatgttaattcatacggtttcagtgtgctttccttctgtttatatggctatgacgaattggttgtggttgtccggtctctggacgtttatttacctgatgccattgcaatctgctttggtggataataggcttggtagatgttcctatgtgaaatataaacacatgtgcattcttgaatgctcagttgctcgttctttacatttgccgttataaatcattattctatcatataccgaatgattttatttgcacatatagcctactagttttgttccttaagtcattgtatgtcatttcataaatgccacaatttgatccttagtcattgtatgtcatttcataaatgccacaatttgacattgcatggaatttctgatgtgtgcgccattgtttatttctacatgaagtggaaatttgtgatgcatgaacgaaatttttgcccctctttggtactgtcctagtttaaatagttttacatagaagttattttatatgaacccaggtgtaactataggggcttatgacctcaagttagataatgttattccaggttaaatatcttaatttaaccatgattaaccaagatcagaacactgttctcatctttatcaaatagtttacttttgattgtttttgtgaccttatattacgatgtttcttgtctacaattaacattctgcaacattccttatgtttcctagtttatattttggtgttactttgcaactcatttgcttgagccacttgtatatctgaaacaccttttctgtgctttgtattgtagataattcgtattgtagacaatcttataccaagcgtaactaggagtactcgtgctaagagaattaacttgtctaatcaatgtttcaggtacgacccgtcaactggtatttatggcatggacttctatgttgttcttgagcgtgctggataccgtgttgctcgccggcgcaggtgcaagtcccgtgttggaatccagcacagggtgaccaaggaagatgccatgaagtggttccaggtcaagtatgagggtgtcatcctcaacaaggcccaagcaaacacgtcgtaattggcaagggtttaaccagttatcctgtagaattaagtgagggttcatttgaatcatggaactgtctttcttgaaagccaaatgcactgtcaattttgcctctgttggagttgacctgcgtctatatttccattaaatgcttaatgatatccttgttttaaatcttaatattaaggcagacttggaatcaatccacccgctttgttacctgtatttctgccttatcctgtgtcaggcaaaagctaagtagcaacagtcaaattgttcattttagtgatgttttatttggggtgccaatttcttcttttggactgcgacttgtgacatcttcatggcggtatacatcttactctcttggtaatgtcaatgcattgctatgctttgggcgcatgtttttatcgatatggtgtgtatttgttcttggggacatatccggtaaaaatgagctaagtgttgaaaactcgtgaaaattatacctaaaagttttgtaaattcatgaaaaaaaatactagagataggtgtagatatgaaatacattctcaccaaatctcacgttcaaactcaacttcgtttaggagtaacaaaaaagacaaatttcaggtgaatagtaacatgacactattcacctgaaatttgtcttttttgtttctcataaacgaacttgatttggagttgagatttggtgagaatgtatttcatatctacacctatctctagtatttttttcatgaatttacgaaacttttaggtatgattttcacgagttttcaacacttagctcattttcaccggatatgtcctccttgttcttagtatgaaaaatggtaaattgggtaaaaaaaacactaaaagttttgtcatctaagggtgtgtttggttgggggcacgaggctggatgggagatggccacctgattttttttcttagtgtttggttggagggcagggtggatgggttccctcaatatgctggatgagtgcatccggccgatttggctggccggatgaagccatccagttttggtctgggtgatgtgtcctttggtttggtatgattggtttgattttctgttaagcaagccccaaatttttttctcctaaaccgtttatctaatttgtgatttgattacaccattatatttgttataattaaatctttaaaataagaatgattatattttgataatatatatatatatatacaacaaatgggtcctactaacttatgtctttttccatccatgctatattcattcaaccaaacaagaaattggatcgctatatctatataaaccaaataaaaaattggatcgtcgtatccaacaaaatatggtcccatccatgcatgactgtgaaccaaacacaccctaaaatagccatctcatctgaatagctgaaaatgatttatccaaaatggcaatttagaggatctcaaagcacatgattatggagcaaccatggcaagacgattacaatgatcaagcacgcaatcaagagattgcataatgagtggctcttgcagaagccgctgcatgccttggaggagccttcgacgtcgacgcccgccgtcgcgtgccaccgcttcatgaactccttgcctccgccgccccagccggtgatgttctccgccgtctcgccgcagatctcgcagcgcctgccatttttgtgaattccatgcaaaatattgtaaatatttgcgtaccgcttatatatgttgacaaatatatgtatttttctgtaaaaacgttatactttagaaacaaatcgtgcttagaggtatatata

SEQ ID NO: 20093 - DNA, 6170 bp, Oryza sativa
ttgagaaaataaaaaggtttagtaagatcccacaagaggccccaaaataagacccccttcctcagctgccctcaaacttgagggctttaaaccatagaccccatccatagttgtggtgataggaggacatttccaccggccgttactctctccatgtagtcatcgttccaccgttggccctactctgattgtatccatgatgatcaccacccttccccgtatctctacaatgccacctaagctcaactagtaccgtttcaccgcctcgactccacactaggagctcaggtggagccttggctcccaagctcgggcactcttattcctttcaagcttcttggcctctcgagctctagcagtgaccatgccaccgtccttcctacctctaccgccctccctagcgtcctatgatagtcacccagctacttcccccacctctgaatgtgcctcctccgtccattgccccttcctgcctccaccatcaggactctgaggtccctcgacgacggatttggttcctgtgcagtctttagtatgactacaacttaggcagtcatacaatagccgtaggatgcaaatccaaaggcccaaatttgataagacactgttcattcggaaaatccagcacaagattattatggcaagcctactgtagcatttaatctggactttccattgaaaaattgaatggacaagatcttgtgcagtccctaaagtgcagttacagttaggactgcatctgatcccaatccctcgacgaccatacctccggccgagagcaaggtattttttatgactattggtattttcaacatttaataatagtatttatcatttccatttatataaatatgaatttgaattgtggtgtttgaaattgtgaatttgtatatagctgaattctatgaattaaaatatttgtgtttgaattaccatggtattgaactacgtataaagcatatgatgaaataaaaaaataaatgtgaattgttactcgagttgaagatattttttatccttatgaaatgaggcaacacttattcggacctaagagggttgaaacgaaggcattgtattgtggatccggatcaccttagtttagagcctaaaaatataggcgtgcagtaccatgagtcaatcgctatggtagtaaacaattatttttgtagttatttacagtagcaacagtataaaacatgaattgtactatatcgcattattgtttattatatattgtagtatactgtagtgatcgatctcgttcgttcgttacaaatcggatggctgggaaaaccctagtcatggtactgttcacctctcactttaacccctaaagtcaggggggtctcaatccattgttttgattgtagaagcagaacagtgctagaggaaaaagattggattgatgctacaagcaaggcaaattcaaagttgctactagtacaaagaaatgaatcaccatcaaagataagttcttgaacagtgtgagtgatacttaggtccacatggtgctgagtgtttgcaataattcacatgtgtagttttctatcagtattttaaaagggtagttttcttttatgctactccctctatccacaaaagttacacatattacttttgacaataagaccaaggagaaattaaatcatcttggatgttacaaaatcaaggagtgaatgcaagcatacaaccaaagagtatttatagatgatttcttgggttctaataaaatatttaatttatctcttcatttaagttttgaatgcataaagattacaaatatgaacaacttatttgaaaaaactcaaatgtgaaataggtgtaacttttctggatggaaggagtagctattaataatagctaatttttggattaatagcaccctaacttgtaaattaaataaaattgcttgttggaccaatcaagatgcacccaactgatgccaggtcaatgctcccaggctcccagttggtataggtaatatgctaggattgcaagggattattccaccatgattgcacggctttattctttctttttcactacagcgaagattccgtcccattattgtcataatttatggccatataaataaataaataacttagatattacgtacttcaaactggtttcgacagaaacatgaacctcaccagcacatgctaattaaatcgctttgaaataatgagtcctttttcatgaaaaagaaaagacgaactctacaccccatttacatatttcaccaaaatgttataacatacaatatatctacggcccaaaatataacgatttttatcttttcgaataaatgtagtaattatctttagaactaatctcaattggaatttaattgaattcatggagaacgaagattgcatttaaattattgtagggaaacaaagaaagctcatcaacaattttttttcttgaaattatcattaaggaattcatcatccattaactttcttctatgtacaaagaaatggatcgaggttgatcggaattggatgggagtgagtacctgttgcccctgacggagaaccacgcctcggcgcaacgccggtgcgccgccgccagctcgccgcggcagccgcacccgagcctcaccagccgcccgctcccgctctccgccgccatctcgccgtcgccgccgccgccgaggtggcaaatcctgcagcccgtgctcgggcgccggctgcgatcatcatcatccgccgccgccgcacaactctcgtcgacgtcgaccaccacatgcgcgatgacgcccgcgtccccctcccctccggcggcggcgatcaccgccatggcaatgtcatgatggcgatcggcacgcggccatgtgggctgggcgcatcgatcgatcaaccaccagggaagggaatctaggtgttggggaatatagtaataataataatgacaagaaatcaagaaatgggagaaaatgatgggggacggggaatatcgcctcggtgctgcgaactgaaggaaaaggcgcggggagggggagggacgaagctataaacaagttgacctacgacatgggatggtaggattggagacgaatcaggccatgtcatgtcgaggaaggtgggtccaactagtggtggagctaaaaccttcacgcataggactgaatcaatgtgagttcaaatattttcacaaattatatactcccccagtccctgttttagtattataagttgttttgcctttttttctatagtcaaactaagtttatagaaaaaaaatgataacattttcaatacaaaacaaatatattattaaaatgagtaaatttcacaaaactatatgtattttgatctaaccattagaaagctatggatttaaggcgttgtatcataaaactatagatttaaagttaagtatcacaaaactgcatatttaatattgaagttatcacaatttagagtttaaatccctagcaccattattatgctagagcaataaacattattgttttgtaactaaattggttctaaacctatagttctgtaataatgtagtaactaaacatgtagttttgtaacatttcatcttaaatgtgtagttttatgatacatcgagttaaatatatagttttgtgatagtttggtcatagtatgtgtagttttgtgaaatttactctaaattttaatcttacaaacctaacaagctatggggcccaagccctaactgtcccatgccttttttttcatctctataggtggtatgtaattcatcttttaaatgctcgctctattcaaaaatagttctcgttttagagtttaaagtttgccccaattcaatccacactacagtactacttgttacattaagaaataatcatctttcatttaaaaagttttcccattctacacccaacaattaaatagcaatatagttttctttctttttaaatcttattttatgctaaacaatctagaaaaatgaaagataagtattgtgcatatgggagtaaggggttttaaaacgacactaattgcttatggttgaccatcgaaagttgtgccatttttttaaaaaaaaatccagcaatgcttgatgtagtctttcgagagagagaaaaaaaattcaaatatgtccttccgtgtagcacggtacatgtacagtgtacactgtccacggctttaaggtaaacagtcaaggatggaaggaacaaggttacaaggagagttattcatcagaggcatggtggcatttacatcatggaatgtgaacaaaacagtggcagtttacaggttacaactacgcctacattagggaactatattcttctgttacaattgggcaaaaaaaatgaaagaaaactcagtcatggatctaaacatttcggtttcctccgtcataccagctgatcccggtttcactaccaaactcgcgatgcaaaaacttctcgatttacaatgttgttcttcttcgatgattgaattgaacttccaacgaagcatttgcatatcatcatctgaggaatcatattttctattcttcttgttttgcggggattcgaagaatcatctgactcagccttcatgtgaacttcaccggttccgcgaaaacgatccaacaaaaggtctggtggtgtgcatttagcatttttagctcccagtattgaagaagttgtgggtagcttgccgtcgaacatgttctggtatgagcctgctgatgagctcttgagaagaatttgctagctgtagagaccaaaaggcagcaccaatgagcaccaaggagagtacacattttctcatggataccaagatctgaagttgtgtagcagattatgtttcatctgattcacttacttcgtgtttgaagttgaatagtggtggaaatggacgtccgtttggcaagcgtgcattcggctctcgcagctcatcaaagaaaggatgtgcacatgcatcaagctgcataaagatattcaaatgaataagcacatcggaaaaaaaatcaatattaagttgtcatctggctattgcaattacactgaataacgactaaacatgagacaactatcattcatccaccccaacattgatttggtaatggaccactaaagatcataaccataatggccatgccccactaaaaccaaagttagtgaagactagcattcttcaatctactttaggaaaaaagaaaaaagagaaagaaacaaggagtgtttctccactccaccccatttcaggagttgcacaaatcaaagagcacttggagggcaaagtgattaagaaaattccttggttacgctcaaatttgtgcaactcttaaagggtgaaaagtaacagctcatatgaccagctacagtaggcaaacttgcataacagcaataagaaaaggggcgttttacagtacccctgctgtgagcagtagtgaaaaatcacttttctactgttctgctacttaaattgcagcaagaatatactcacagcagtgcagcggagactcggtgaatattgaagaaggcgtgaagcgaggtctattgcttcaggaggcatcctctttggaaaacctacgcagaagttagaaaaatcagtacctgtatgcacctccttatttatacattgcattgtaaagctatctggtgtccagaatctattattggaaatgagcccagctacattttcatagttgtccaggaaactataaaagatgacgtgatatatgactcaacatggataagattgtatgcttaccttgtgccaagggtgagcttttatctgtggaaacctaaactctgtatagttcgggttcatgcaacgtatttcctcacgggttggtgtaccaagaacctgcaagaatatcatacaaggttagagaagatgcccatactcaatagtaggagcaaaattagaactgcatggcatgtcttgcagtaccttaattatctctacaagctgatcgactgcactctcccctggaaacaatggctagcaaaaacaaatacaagataatcaaaatcacagcaacagtgatgacatcatgcttaaataactaaaccaaaagtttgcagatctgtcaaccatagaaaaaagaaaccaacctgaccaaggagtagctctgcaagaacacacccagctgaccatatatctattgatgtagtatattcagttgcaccaaatatgagctccggtgctcggtagtagggggtgcag

SEQ ID NO: 20094 - DNA, 8609 bp, Oryza sativa
ttcagtacttggttttgatgaggccttcgctgtctagtcccactttttgttttgcggcgggcaatcttcgctccttgcttgtgtttgctaggtgaagtcggagctgcttcgtagggtgacgaagctgggcaacgatgacacgttgcattctctttctaggggttttgtttgttggccgtgaataggatgtggcgtttagacggctttggctgaagttcttcgtgggaagttgaagccacttgaccattgacagcgagttaggtatggatgatgcaaccgatttgaagtcggagctgctgtgtcgctaggcggcaagctcggcaacaatgacacggttgcaaggtcggaacccctttgccgtcttggtcaagcttggtaacgacgttctatgttgggctccgtcagtggtttctgttgttagtgagttgtggcgtgtgcggtgcagctattcagccagccggtagttgttttttcttttcttgtaacccgtctagggtttttactcctgcttattgaaaatataattggcagttctcctgccggtttagtttcaaaaaaaaaagttgaatcagatgcacaattgccatcacacaagggaaagattgattcattcggttcgatatgagaactcaacttcattgcattgatagaatttatgttaaaaaaacaccttattgttatatttttagatagtgaaaaatcttttacacttttggtctcaatacaaaaattgtagtattgcactttacactccataaattcttgagattaattacaaccaataacataataatgtacgactaattattgcacccatgcataataaagctttataattatccgttcgaacaggttctaacgaacgggagatttcgaagcgtgaggcaccgggtgatggtgagtagcccgcggccacgggtgtcagtcatcttcttcgccgggccgccgccacgggagcgactagcgccgctgccatggctggtggcggaggatggcgggcgccgccggtacagggagttcacctggcgggagtacaaggcttcagcctacaggaccaagctggctgagaacaggctatgtcactttgaaactgaagctgactgattttatttttttttagtgtgtatagaatgtttgtatgtctcttttcttttgtggttttatgttttcctttttcattttggccagcgtgtttgtaatagttgatatacatgttgatgggcaaggttttcgtgttgatacaagcagcacactacagagtagttcatacatttctttttgttcggttttgtgaatttaaagttggctaaatttttcttgattgtcgtgcacctgactagttgaattactcgtgtgatctttttgttttcttctaattacgcacagaaacacactctatacacacacatgcgtactcacacatgcgcttgaagagatgaaaaccaggagcacatccctaatctcataaagttttagttgaaagcctacttgcaagtgtgtattaatcatggacatcagaattttaaccctgaattgtgcacctatgactttaccaccatgtcaccggtgcttccccaattactctagtgattctagatgccgtaattcatatgttttgaagtgatgagcctatggttagaattttgtaaagtgatactagaattttaggattatatttatactagtattaaattgaagtaagtgtactatatatattattattaatctgcagactgtagtaggactaatagtgctcaggcaaggtgaaaaatctgtatgaaaacaatcttctcttgtgataatcacacagagttgtgtaactgatgtttttttttaaaaaaaaaaagaaatctcgatgtcccatattgtcacacacgcggaaccaccatatttaccttggataaatggatactcattcagtcagataacctttcacaccattctagtctttaagcagaattcgtgagaaaactgttgttggtaggagcgggattcagtttgatcggcgtcttttaggttcgtctccaaaccacggttatgcaactatttgccaattatggttggagatttacaaatagacttcaataattgtgatctccttacgttaggctggtttcaataataatgatcttcggtgtgttctatttatttagatttacactatgttcatgaaaactactatgtaataattggctgtagctcttttgagtaaaggccgggatattatattccattatcttaaaaaaaaaaaggttcgtctccaaaaatttcggtttctaagaaatagcaacgaaaaacaatggggtttgggaggttggtccagatggacatggacttttatgctaattctgttttttttggggggggtgatttgcacttaatttgttatgtcattccgctgctggatcatactagctccctaccctcttaggttgagttttttttggatggagggagtacgtgtgatcaatagttacagcttagtcttggcacaatccaatcggcgagcgctatcaacctgtttatgtgtgggttaaaatcaacaatgagcgaagaacaatgttacttgtgataaataggtcatatctattcttctaaagccggcggtggatgccggcatctgattggttcagttgatggtcctctgtttgattgacacgtggcacaaagaaacaggtgaacataccgctggagagatccggaaagaaaacgaaccgtgcgtgcgtgcagtaaaaagaaaaagaaaaagatgcggctaggccgctcgctccagggctgtgcgtgattcgtatgtcagcctggtaggaaaaaaaatcatcgacagcatgcgacctaagacagttgtgcaatataaataaataaaagaatgagatagaagggggaaaatgtcaggattcatagatttccatgtttagcaaatttattcaaaaagttaaatcaaaatcaacgtagtaatttcatcctgttaacatttatactccatccatcccaaaatataagtatttttggattctggcacggcctccgagatgctactttgatcaataatatctattatagtaaaatgttttaaataaaaagtgttgcatattatgatagtttgtttaatgataaatctaataacatcaattttacatcatagatcttttttattgttttgctattaatggtcaaagttaaaaatgtttgacttgtcaatgctaaaaatgctcatattttgggacggagggagtaataaatagtaaaattaaatgtacggatagttaaaaatcttcgaataagtatgatctactataggtttaataaaaaattcaagacaaatccctatggttctatagaatgaaaacaatatgtagcaaaactagatggtatttatgcgtgaatgttccaaaatatctaccattttaagtgcaacggtgagtttccgtgtccaaatttgatcgtccgtcttatttgaaaacttttataattagtatttttgttgttgtgagatgataaaacatgaatagtactttatgcatgactcatatttttatttttttaaaaaaaattaaataagatggatgattaaaattaagcacggaaaagcatggctacacttaaaatgagacggagagagtcgataacaacaaaaatatatttaccatgtcggtgtgtcctatatttatagaaaaatgaaataatatgtagatagaaatcggtaatctaagacacattaattttaggatacatattttcagctaattatacaaattagatgactcacatgtaaacacattttattgtacgaaaaagaacaatttttagaaaacaaaattttactttttttttctctaatatcaccatctgccatgattagttcctggacatttttatataaacacaaaattgaaaacccattaaagaatcaccttgaatgtatatttcctaaaaagaacattataacaattatgctaattttgataaaattctttcgacgtatgttgctaaataatacacatgggttataatttagtgggcgcgccaactggggcgctttattattttctagttactattgaagtattgatgctggcaactgcatacatgtgcgaaagaaatttcacttcaccaatcaactggaagtagtatacttattggtggtgattgttgaaatgggtagctcaacaaagaaattaataggattaattgactggagcacatgatctgacgctttacaaaagaagggaagtggaacggcagagtggtgggattaattggcttactctgtcaattaggccttgacatgtaactgtgcagtactcgggaggagatctgaccactgcgttttcatccaacggctgctattaattcgaatgacgtggatgaaccaaagtgcacgaaattgataataagcacaataagtgaggatcagttgtatatgcttataggatttcagtttactgttgggcccacataaagatgcgtccgtacaatgcaaaacagtatgaattgaattgattttgcagtgtgatctagtttaacttgatggtaccctacacgttgcgaccggacattttgggcccatcgtttggcttttattttaactaggaaggtagcccgcgcgttcgcgcgggcatgagtcgtacgccaagtttgaggtatttataaaagcgacatattaacaggagaacatctgccacgatttctccataaattatttttgtcagcattaatttattctttaataatattttaacctattagatttatattatatcaaatataagtagtatctataagtaattatttataatattcttcatcattttaaaaaaaaggtagatttattttctttagaaaacatgtcaacgaaagtaaaagtaagtgtaaaataaaaattaaggtgtttttattttttttaattgtataatatattatcataatatgttaaaggatgaattgggtgggacattaagctacacgaaaaatgcacggttttatatagtctaatatgattgatatattttgagaggcgatctacctatgaacatttcatgtagagtgaatgagaggctccacgcaacctagcaggaatacaataacgtcgaaatatcattgcaccgtaatatttttggaatttcatgtaccataaataaacacttgttaaaaggtataggagcgcacacatgcatgttacgcagtgagccagacagagattctgatagactttgttttttttcccaaaagatagatatgatattataaaaattgggtccatcggtttaagtggaaaccgatggtcgattatatgagtgttttttaattaatagaatgccacatagcgacttagaagtgtttataggagtgctaggagcaatcatatgtatgatttagatgctatgatcattttaagatcgtttatttatcttttaaatttaaaatatcatttatttacaaaagcatcaagatcaattcgtatatgtaaatagcccccacgtgtatgttgtgagaaattaataaagtttttttatgaagaaattaattaagttggtagaaagtcattagatgtctaacaatgtacttttaatgggttagtttcattaaaaaataagctagcatattttgattttcaatgacaaattttaatattttcttttatttagtggagcactcaagatggatgtaggtctagaatgcaataaatccaatatagatgttaaaattatatatttatttgaaaaataaaaatagatatataatttatggtacaaataattgtaaagactcgtaaaattaatccggcctttattaaaaagtctgaaatagcacgtttaagtataaattagttaatatatttctttgttagtttaatgcgtacagaatgtaacggtataaactttataaactttatttaaatagtgtatgatttgaaaataatgctccacataaagggttcacgtatacctttatttaatgggtaaaaatatagtggtgtaaactttattttggaaagaaatatatcataatataatcatataagttatgattatataaaatttaactatattaactgttatctcgattatatatatatgaaaagaaaaaggagggaaggagatggaaccgtacgtacgtacgtacctacggatggtgtggaattgtacgttttaagatcaatatagttaatctgacggtatctactagtggacccactattttaagtaaaaatcaatggatagatgcttttcttttttctcagaatttttttgatttctctaatttattagagcgccaagtggcggcttaggagcgtttgtaggaagattaatggacttttagtatataatagataagccaaaacggcttattagagaataaaaataaatttacatgtaaagcttttatatatgtgttctcggtgatttaaaagccaatgctaaaaaagaaactacgttgaaaatatctcaaaatcaatatcaaaattaagtttgaaaattcaaaatttggctttttctttggctgaataggccatccgatgagagcctttgtaatgtacatttgtacatcactgcaaataataccttggggaacattatacagtaattgaattattcaaaatgaaacctcagcaagtttttactgaaaagataattcaagcactctatggtggtttttaatgtcctgaagatgaagatgaagattaaatatttcacgcaaaacgaggttataataacatgtgattagttaagttttaattattctaaacttgaaaaatagattaatatgatattttagagcaactttcatatagaaagttttcacacgaaacccaccgtttagtagtttgaaaagcgtgccacgagtatccaaaatttaatccaaccttagttggagaaaagaatgcaattgtgaaatacaacctgcaaattgccatagcttgtaaatctacttatttagtagtagcaaatagtagcgtcagttatgctaagtaaaagtgacaagtctttctactgggactactgaagctaattagttatcagttatcaccaactatacatccttaattattgaggatataaaaaattgcacattgatcgattaacttaatataggtactgtcccaaccgaggaagagtgattcacagacaattgattgaatcggcaagttttgtcaacgagaacaataattaatttgaaattgagctaaacaatactgaaacttaatccgaaggaatttctatgaaattttgaggtctaactcaaactaaaaaagttggcgggcgaggagcatacatatacctgaacaaacatacatatactgaaaagagtgagcttgtttggttacacccagtcggtgcatatatatactcgaacaaacatacagtgtaaactgaaaagaaatgagcgggtgttgttaacattgtttgctgcaaagagtaaataaaaaggaaaagacaattttattttgatcaaagaacaaagagaaacatgtataccagggttgctgtggggatctgctctgcatcctgtgctatgcagagcgagaggaaaagcgaagccgtcctatgagcgaggagcacgcttgtcgttgatgtgcttgggaggctccagcaatatagtatggtggtgagaggaagattaatcgaaaggaagtaaaattaagaggtaatagcaatgctcgttggatcagattgatgccttgtttaataggctaagttcctatcaatgcagtgacatgagtagcacctaaggtcttgagttcaaatctccatagtagcgaatttcaaatttggttatttgagagctaagttccttatttaataggctaagtttctaatttaaaaagccgtatatatccgattgtatatagaggccaggtaaaaaaaatacccttctcttaaaacaaaagatcgatgcctcttgtagttatcaaagtcgagtggtcgtctggtagtttcgataggggaggcaggaggacaggttgacggccgggcttcgctgccaattacaattctcatccagtgcagaagctctatcaccacaaccatgcctaatggaattgtggagactggtattcgcgctcgcttgcgtattgcggctgtggtggctcgcactcgactgctcatgaattggttgtttattgccggactgtatcatgggagagaattctatccaactgctgacatcaaagatatagattcatctaacgatgaagataaaagtgatgatgtggctgcacgagaggacatgaaattagcaataataactacagtaggtgggatcaactatataaatatataggatagtttttatcagtacttgagatggtcttaccatgcacctgaatcctagacgatgattatacacctagacgacgtcaatttgatcacatttatattgcaaaataatcatgcctatttgagaaaatagtactccacaagatgcacatgcaattgggccaaacaggtgctaccatggctgtattttaccaattatgttagtagcacaatgagaaatatatgccaagattgtattgaaccaattatattagtaacatcaaaatctcccacacatgtgttggagaattcttcttttccaatcaagaactgtacaactatgtgacacaa

SEQ ID NO: 20095 - DNA, 13708 bp, Oryza sativa
  unsure (1)..(13708): unsure at all n locations
aaaaattgccgaacgccttacttgttcggctccaagacagacaaacgataanatagaccctctatttaatatggtcagaaccatcagataaattaaaccctatcaacaccttcagatactagttccctgcaaatatatctgctagcaaataggacttgtgaaaaaccacttagttgaatgccaaaatgtttgattggctaaatatatattgcttgtacaaggttgctctctcatttatactggaaaaataatccacaatatccatgccaataaattcattctgcttttgttgggggatcatgcattagtgatgtagttcccacattagcttcatgcatgacttctcaaccaaagggggaaaatattgccggaaaaaaaaaaggaaaaaaatcaagtttgatgagtcttatacaacttagttgacatacggatttggccatacatgtttggtgcatcgaacagaaactacccttgagacgcaacgacaagagaacatgacatggtgcatgggagcagaaactggatgagcctatgcatcaaaagcagaaactggctgatcctatatgcataacatatgcgtgcagtgacacaaaggcaaaactcaaatgactaaaaatcttcaatgcacaccactaatttctctttgaatatatggatataggtaagcagctaggtaataaaatgttttgatgctgacttatattatgggcttgttcagattgatgtcattttaaaccatgccattatttggtaaagatgacaattatgtagctatatatatttattttgttaccaaattttggtaatgactatggaattttgacaacattatattgagcacatcctactacaatttggcaatgttgccaatttacccaaattttagaaaggttcattttggcatcaatctgaacagaccctaaatcacgcttgccttgatcgttactccatttgttttatattaagtcattttgtctttgttctaagttaaacctcattaaatttaatcatgtttataggaaaatatagcaagatctataacaccaaagttttcattaaatccattcaatatatttttatagtatatttaatttgttttggaaatgtttctatatatttctacaaacttacttaaatttgaagaggattaacttagggcaaacccaaagtcttataatataaaacggatggagcttgtatgttctaacaagatattgccatattgatgtacacctaatattgagttttttcaaaagactacctaatagtgaggttgttatccatgggccaaaagcccaagtttctcaacataaagtactgctgtgtgagctcttccatggttacacttggtcattgtctgtcacatgcacatctattaacttattaaagcaatagaaaaaagagccttcacgttcgctctcatggcctagaaattctcatattaatcaacgaaaaagaaaaaaaagagtccatatagaaatacaaattagaaatagctgaaattcagaattaaaaattagaaatattggaagatgagactagagtctatgttgtatacaatttagaattaatagaaattcagaattaaaaaaataagaaaattaaaattaggttagagtccataaaaaataaaatttagaaataactaaattcgaaattaaaaaagaatatcgaaagaagcgtatagagtccatatagaaatacaatttataaataactgaaattcggaattaaaaaaataaaaaaatattagaagaagagcatagagttcatatagaaatacaattaagaaataatagaaattcggaattaaaaaataaggaatactaaaagaagagtataaagttcatataggagtttagaattaactaaaattcggaataaaaataataaagttaaaagtagagtttagaatccatatacaaatacaatttacaaacaacaaaaattttaaattaaaaaaatgggaagaagaatctagagtccaaataggaatacaatttagaagtaactgtaattcgaaattaaaaataaagaatatcgaaagatctgtttaaagtccacgtataaatacaattagaaattttcaaaattcggaattaaatataaataatattggaagaagagtatagagtttatatagaaatacaatttacaaataacgaaaattcagaattaaaataatggaagacaagtctagtgtccatataggaatacaatttagaaataactaaaatttgatattaaaaataattataactatcatgtatgtacaatagtatgaatattacatattggtagtttggtaaagttagtacaaaatttaaaattatgttttcattttaatatattttaataataaattgagaaatatatatgctattataatgatgctagccgcgcaatctgcgtgggctgccatgctagttactaatagtgtagaagtatcgaattggagttctagctataatataatatagtttaaaagagcacttattttttaagaaacacagtacaaaagagcacttagactgagcgtcagatctaaacaactctcaggatataaaagcatagcattcaagcgccttagcccacccagtgaaaggtgttatttttcatgtttttagagtgtcacaaaactaataagacattaaacatgtatttggtttaagaatgaggtggctatttttttgatgggatggtcaaattatctgtttggtatgagatggagtggtcttattattttgagggataggaaaggcccgtatctcagtgaaagaaagtgggtgggattggtccagtaaaactgactctggtcttagggaatattctccttcagagttcaatccatctcatatatcctcaaaccgaacaccctaaataatgggtttgaaccaacccgaccaattccatacattgaaccaaacagatgtttaattgatgattgaaatagcacatgaaatttattgttttatttttaatattgcatacgcaatacatgcaagagaccaagctatattgaaaacatcgggcatatggtttcatcaagattaaacccatttcatctcttacttcattattaatttcttaccacatcatgaaaaatgttgacatgatacaatatttaatacggaataagaatgaaactcccattattgggagtggctttagcgttattgacttcagtcatgctgtctcacaagcttttggttcatacaaaatcgtgaagcacatctgctccctctatcctaaataaaacaaagtctcgctttgcataggaactttagtgataaaaaggactataggtacataagggcattgaataggtacaatgaagcttctcgattcgtggtaagatgatagtaaggatatatgaattgatttgttttccaacggatggagcattctatagctatagatcagatccagaacaaaagcctacatatccatagtgatgtgagctagctctggagtcggactgcaaaaagattgcaaattaatcatagtctggtgtcttaaaaattattggatcgtgcaaaatagtgccagtttatacagtataggttaaatccaaaagagaaacctataagttcccttatcttatgactcctttggaacaaaggaaaagtgaagcatttttcagaggatttgaattctatggatagaattcctatggagcgatttggaacaaaagattgaacccttaaaattccttgagaaatcctatggaatagaccatttcataggaattttagataaaaattaacataaggtctcacctcatggacttctctttttgtgccttcaattcctatgtatttcttgagtgccatccaaacgactattatttaagaatcttgtgtttttgtttcatgtaggaatttacaaggcatgacattctaatcttgtatatttcctactccatgttttcaaaatcgtgcgttctaaagcagcccatgccatctctagtgtacgtaataaatcgagtcgttgtatatttgatagtaataaagtccgaattaccccctaaactattgacgcagtaagatttaccccctaaccacaataccaaacatttaccaaaactcttcaaactggttgaattaaatacccccagtactgtttaaagagattttggcctaggattgcacacatggcgacaacctagcactccaatcagcaacaaaaaaaattccaagtaggcccatatgtcatctctcaccccaccctacccctcctctctcgaaaaggacaagaacccaagagattggcgggcagtggcgcttcaatcccccacaatctttcccgagaaaggccaaggcaccggcactgggtgtgttgtttcctgctgaggtcttcctcacgcctcgtagtgagtgctagcgcccgtgcctgccgaggtctccactgtgcaacagaggaagaagggcgttgatgccacacacagtcacgaccttgtgggaaagaggggaatgcgataagggcaaaaatctaacagatcggcccaatgacttttttttataaaaaaatactaactggattgtcacgtaggactaaaactgtttcagattgagttagtgtgttatttgccggtttgaacagttgcatctggtattaaaatttcatggggtaattcaaatgatggtaatattttaggaggtaattcttcaaaaaccaaaatgtgtagacttctgaaccgtcacaataaaaaaaaggataattgcttatttgaccatattttgaaagctaactactgaccctatttttttaagtttgcttatttgaccccgctttttaaattcagagtaaccgtctgcccctattttcattacaccattaagtttcccttcttcttgtacaaaataaccaaaatgccacgagtacacatcaaaatgaccaaacaactttcacttcatccaagccgaccccgacctcgaccatggatgactgacatgtgggcccaaaaagttgactgcatcgtatttttgtcactgatacgtgggcctgaaaagacgattgtactgtacctttgccactgacgtagtcgaccgcagaggatcctgactggtctcatcccggtggcgaggcggctagctcatcgaggccgaggcaaaggctcgcggaggcatgcgtgaagatagctgaggcgcatggagagagcggcggcgcgacctgcaatggacggaggccaggatggtggctcgcggtggccggtgcggggtgtggaggagcgggaagaaggggaatggatctgcggccggcgcatggctcggaaagagaagcgggggttcgcagcaaggaggcatgtgaactcaccggcatggtgctcggcgaacgcccggcacgaagctcggctaatgaccgggacggagggagacagtggtcggttgctcgcatagcagtggaaccccaaatcttgtggtcaccggcttcagcagctgtaggtgcaggctctaagaatattttttcctccggtctctatctttgttgttcatgatttttttatttttgtgtgaacagagcagtccaagtggatttcttcgtagggatattctgagattttctggttgaacttagcaatcgaagcaatttgaagacaatagtttagttctgattcttgctctattggaaagctctgaacttttgttccactgtacctgtcggttgtccatctgaatgaaggcatgagcgtcattttttctataagttaacactgttatactgttttcacggaacagggtcagacctaatttttatttttttaaaaaaaagtcaaatgatcaaacttcgaaaaatatggtcaaattggtatttagtctttaaaatatggtcaaagtgcaattacccatataaaaatatgataaaaagcatgggaaccgagacgacatggttatcaaatgaacagcgaggatacataaatatagattatttcagtttattattggacccacataaagatgcacatacaatgcaaaacatatgaattgaattgattttgcagtgggtcctgacttaatagtttttacaacaagagatggcccttaccatgcaactaatagctgatgattgcatgtttgcatcatatttatactccaaaattatcataccaatttaaaagaatttaaatgaatagtatacaatgtgcccatccaattaggccaaacaggcactggcattatcatacgaattatatgttcaattatgttaatacgacaataagaaacacatcaaaatctccctgaggagtcatcctttctttctcaagacaaaaactctcattcgaacagttagttctcatttacttatacaacatgtcaaattgagtaaatggcatcatcttgttccgatatctccaacataaaaacattcatacttgcaaccagatcacacatagacataacttttatttggtttactccaatatcccctttctccaatggtaaataaatccttgatctctttctttctttgtctttcccttctttctaattataacattaagaaaagggccaaagcgaaatggtttgacagactcagcttgtaacttataaaggtagctgctctcctaggtctgttctctctctatctcagagcataaatgactttggagtaaaaccctagcaaagtcattactcggctccagggcaaaccgatcaatgaaaaagacctttttttagtttaatatggtcagacccatcagagaaatcctagcgctatcaacaccttcaggtccgtgtagttgaatgccgaaatgtttgattagctaaatatttattttacataggtcactctcccatttatactgaagaagtaatccacatgatccatgccaatcagctcattcattttttgttgtgtcatcatccattagtgatgtagttcccacattaggttcatgacttctgaagcaaaggggcgaaatattctcgtcaaaacatgaattttttttaaagtacccttgggtgaatgtgagccattcattagattagatccaaagaaggaggtttatttctactacattagtatagttagtgtaataggtgtagtagaagggtacatctgaaaaaaaaattgtggcattggtataaatctctgtaatcagtaatatgacagggttacaaatgtacaataagcctgaccctttggttcaccacagctaggtttgtgttgcgagtttctgccaaggcgccgtgcagtcacatagacctggagccagaggtcgaatgttgctgccgtgctcttcgacgagaaaagcattgttttccatgccatcgcccccacgctcacttgctctaatactacaaggatgttgcaacaaggatgttcctaccaattatgtcaatatatttctttcttgataatattagtaatttcattcacgaattgaactatgataaccaatggtgatcccaggacaaaaattatcggggatccaatacatattaattatctaattattagctaacatattaattaatatggtacaaattagctagaattgaataatttacccaggtgtggtgagcccgggaaacactacataggaacacctccgatgataaccctagtagcagattgggcaacaatatcttactcaagacaatctcttactggggagcgaaagatattggcataaaaattcccttgcatatgtacattgagacattgcttcatgaatcggatcaaaacaaacggaagaatgattacagtggctccagactgaatgcagtggtggcagcggctcttgtgacgtaccgcatacaaatgaggggtgccgcctccacagagaggattattcgcgcaaggagtggcagtggtccctcactcctgaaggcgagcaagaaaggtggaggggcggcgagctcggagcttcaagcacgcgggtgggaggcggagccagaggacgccaattcgttcaacaagggtcgccacctagccgcatgttgtgcgtatagcggagtggaggggcacggacgggatgaccattgggcaccttgggcggaggggcggcaccatgcatcaccgttgtggcagagtcaggcttgcgctgtcgcgagagaagagccgagggcggtagcaatcacagactgggagcaaggcaacataccaaaatacctttctaccttaattaaggaaaaaaaatctaaaatacccatgaaaatcaactactatttgccgggggcggggggagggggcgccgtaaaatgacccaaaaaataaggaaaaacagttcaagtttgattagtcttactaaccgtcaacttgtatgtttcatggcctattgtgaatataaaatattaaaatttcactggataatgataaattatgttgttaaattcataagtaaattttgttttaaaggaagttgatacaaaacatttctatataattatagatgccaaaaacagaattagtaatttcttatataatccattctaatatttcttctattactttatttttttgaaatttcataatttaaaaattcaatactagaagtatagatttgtactgatcttttggtgtctcttgtaagcatttgctataaaataatttagcaagtttgaattaataggtacataaataatcttggtttggagttaagctttttgatgatttaataattcttatattcataattattaaatatcaagttgtattacatgtagagtagactcaattataacatatacataatttaattttaaaattcctaagtaaaaaataacatactgggtttgaagtcttaactaatgttttatcatgattcaaaattgttccaaattttggaatcaacaatgtggcataaatgacatgtcataatttcaatgacgtctcacttccatcattacagacatcattatccaccatattcttatttaagcttagttcactaatgatgcaacggaatttaaaacatcattgatgcttgattaactccacaaatagatttcttaagtctacaccctatatgtgacttgtctttccacaacaaaaaaccaactcaggctatgctatgtatattaatttttgcaagtcactgttaagagatgaaaaaatgttttgcaaaacttttacaactcatgcaaaattttagcatccacataatggagatatgaatcataaatgaggtagaataatctctcttgttggagattttgatgagctcccactgattttattatttatgcaatggaatcataatatatgattttccatcaacttgaatcacatgatttaaatttaattttacttagtaaattatcatctaagtaatgatcgatgtaaaaaatttctaggaatgaagtgtctctatcttaatgagacatctattatccactagaaatgtggctgaataacaaggccataatttcgagaacgtctcataatgattcaacctaaaaataatgccattaattttcttttgtaatactttgtcaaaccaggacattaagcatgtccctatttcttgcaaaaaaaacatacataagaaaaaaaatcaagatatgtatacgtaagatatagaggcaattttatttccccttataaggaatatatgagctttattatcattaaatttggagttgctactctctctctctctctctctctctccttagtaaagtttatctttgccatcaaatacatgatcttacttagcttgcttcttagtattttgtatttcttattgatatacaaagtgataaaacaagtcaattatgctccactttgtctcactgaatattacaattctgaaaaatgatcgtagtttagtaggagaaaggtcatatgaactgggcaagtggcgtatttaaaatgtgcgatgtctttctctaacctttttaatgacttatcattggtattgatgaactcctaaagtttgcaaaaacatttgctagatacagtttcgcattgtcaagcacaaaattatcctctaatattggcaaagatgataatcttaatatatattaatatatattagtgatatgcgaaacataactctatattggccttctcccaggataatttcatcaaaatgcctctggaatttaggaaaagcattgacattagccacgaaagcaacaagggatcctttgttaatgttaagtcatactaagaaggccttaggctcagctaaatcaatgagagaaataactcaatagacttaaattgataaataatattagctaaatttgtatcgtcttatatcctatttttaggcagttcacaaatggtgaaatttaacatggaaatgacctcaccttgtgttacggagaagaccacaattaattaccactgctaagctccatcctccatgctctcatcctcctcccatggcggatttgcaaaaacaccaaaccattgccattgcttccttcaaaaatggctcctccacacctccatttcctcctcgtctctcacccattaacgacatgggctctccacgttcagccatggccgccgtgaacatacactaatccggccgtcgcctccaccagctgccggtggcggcgccgccgggcgccggtgtcaagatgccggagaagggcaccgtggtgatgagccggtacgagctcggccgctcgctggggcacggcacgttctccaaggtgtaccaggccaggagcctcgtgtccggcgagaccgtcgccgtgaaggtgatcgacaaggagaaggcgctgcgcgccggcgccggcatggtcgaccagatcgagcgcgaggtcgccgtcatgcggctcgtcggccgccaccccaacgtggtccgcctccacgaggtgatggccagcaggagcaagatctacttcgtcatggagctcgtccgcggcggcgagctcctcgccaggctggtcgccggcggcggccgcctcggggaggacgcggcgaggaggtacttccaccagctcgtcgccgccgtcgacttctgccacagccgcggcgtctaccaccgcgacctcaagccggagaacctcctcgtcgacgacgacggcagcggcggcggcggcaacctcaaggtcaccgacttcgggctcagcgcgctcagcgcgtcgcggcggcacgacggcctcctccacacgacgtgcggcacgccgtcgtacgtcgcgccggagatcatcggcgacaagggctacgacggggccaccgccgacgtctggtcctgcggcgtcatcctcttcctcctcctcgccggctacctcccgttcttcgattccaacctcatggagatgtacaagaagatcaccaatggcgagttcaaggtccccgactggttcacccccgacgcacgcagcctcatctccagactcctcgacccaaaccctacaactcgcatcaccatcgacgagctcgtcaagcatccatggttcaagaagggacacaccaagcggccggcaagctcgaacaccatgaaactcaacgaggaggagaaaccagcgaacgccgccatgaacatgaagccggcgagcttgaacgcgttcgacatcatctcgctctcgcagggattcgacctgtcagggatgttctgctgccatggccacagcagcaggacgcaggatcagctgttcgtcaccgggaagccggcgacggcgatcgtgtcgaggctggaggagatcgcggagacggagcacttcacggtgaagaagaagcagaagaagaggcaagaagaggacgggatggcggtgaagctgcaggggtggaaggaagggaggaaagggcagctcgccattgacgccgagatcttcgaggtttcgccgtcgtgctacgtcgtcgaggtgaagaaaacggccggcgacacgctggagtaccaggcgttctgcaacagagacctcaggccgtcgctgaacgacatctgctggacctcgccggcgacagcagcgtcggagaagaaccagctgccggcagtgtcggaggtgtcgccactgagtagtcctcggaattgatgtgacagattatctaggtgcagtggcagatattgatcatcagatatgtgctgtttcccttgttgtttcctttgctttgaattgttgttttgattttttttttattcttgtttgtgtttcataatgatcttgggggtagtggtctggtatttccaagttcaagatgaatttcaattattgtttttttctgttcttttgttgtgtggtggactggtggtttagtgttgattgttggacataggtgatagaatgtgttctccttttgcttaaattgcatggtccatttgtaaggtaaattaatggcatcacaccaccataatatccaatttatgaatgttttagaaatctcttttttttaagtcttcttgagtttttttattgtatttttgggaaattctcgatctcaaatgttgaaaacagtatatgggttgttgacttgttggtcccctacaaggaaaattggtaaacagacacaataggcccaacaaattgacggcccaactgtttacgcagctccctgcttttctggatgccgtgtactcttctctgaatatgctgcccctctgaatgctacgatcttgacttcaagtttctgaatgctaagtactagcttataattatatggtacctaggatagtaaatttgagtttccgaataaatcgtgtttcatttatagtttatataaatgaagagagaaaacaatagattgctttgagctgaaaattacacaaccgatttggctatcggacgcatgactgctgtatttgttttcgcgtacaagtactaggttagcaaaacacagatccattccactggtcggacatatttgtcacatgcgatcttttgtggccattgccatgtagacaaatgtccgattccaataagaacacgttggcttccaatagaaacaattgctgaagatcatttgagagattttggaaatctgtataaaatatggtcccatttaattcaatggcgcaagcaggaagtatcccccctcatggctgagtcccagccaacaaaaataaagtatgtccaccccaaaaaaatcgccccagttacaacaaatgattcgattattgtaaaagacacaatagtaccaccacggcaacatttaagctaggataacttggtttaaacttttgtctaccaaaaccaactaccgatagtgtaagcagctggaacgttattatctccactcgagcaaatgataactccgcatattaacctccaactgaagaccttatattccaatctgcttctcgaacttctggatttgattcaagaatatccatgtcatctgcacaaaataccactcagtgaggatgcatgtggagaactagagacaaaaggtggtacaagtacagtgcaaagatgtgcttaaacattaccatcacatggggagcaatcctgacacagtacacagggaagccagtgtagaacttgaatgggccaccgctcttgaaggtcttcatggcacagtccaaagaaccggtgtacgggtacttcccactggcatcaggttgcatcttctggatttgtgtcttcacatagtcaaaaggcagactgcaggccgatgcaaagaacccagaaacagcactggctcctgtaaaagaagttgtaatatttcatatgaaaactttgtcctgagcatagaagaagggcagcaggcatgtgcttacataaatttgatagtaatgtgcaatattgaaagatcatattttactcaactacagcaaattcttaatgcatgtaaagcaaaggggtgcagg

SEQ ID NO: 20096 - DNA, 2729 bp, Oryza sativa
ctgtaatcttaccaagtacagtcgaaacttctccagcaccaagtttgtctctgaatagctcaacactctgatcataggaaccaagcatacccatgttcagggccatagctctaaccacagtaggtcctgctcccttccaaagggcaaggacaccttcatcagcaataatacggtagagcgcatggaaagcattcttgtagttacggcgttgtgcaattggcaaggtcgaatcagcttgcatcctaatgagtgccaaatcagcagggctaccaacacatgctccaatagctccagcagtaaggccaataaaagctttctgaactaaaggcaatggctttccatcattcttttcaattgctttgtttgtcagaaccctgaattagataatcaaatatcaagttccaacctaaatattgacaaccatctaaatcagaataaatacttagaatcatgaagcaataaactcaactaatccagctttatgatgatcaaatttctctacacagtaaaatggaacaaccgcaggagaacaataaagaaaaagatgaaatattccttaaaactccaaaatagcaaatgatacatcaggccaagtgtactacaaaataattctgctaatagcatgattaaggctgtgtttggaactccaagttcccaacccctctccctcgttttccgcgcgcatgtttttcaaactgctaaacggtgcattttttgtaaaaagtttatatatgaaagttatttaaaaaaatcaaattaatccatttttaaaaaaaaattaactaataattaattaatcacgcgctaatggaccgctccgttttccgtgcggggagattgggttcccatccctactatccgaacacagcctaatcactcttaaaaaaatcccagaaaataaagaataatgatatccccggtaacctaattttcctcaaagttatcgagcaaaacagcattggcacatttctttcagttactcatcagcaagacagcaacagatagcaatcagcatagtttatgcacatgtttggctctcttgcccagtgaagcaggcccattcatcattgttaggtaatgatatagtttcgtagacctaaaaaggctttgttttgcttccagtaacaggacgtgtcacatcagatatcatgcacacacataactaaattttgagttcctggtacagtacaaaaggtgagaagaactggcactcttaaacttgaaacaaatatggtcatcgaattaatatgacttcccctaaggaatgtagcagaaagatcctagctggtaactacaagattcgagtcatgttttcaaatcgtcaacctaatcgcgattagtcatcctagtcagtaataaggcaactcaattataaccacaattagtcgtaaagtcatccaattagtattaatcgtcctagtaggtaccgaggagactagacgcaagtttccaatttgaaatcattgattctgaccattatgagaataatacaacaaaagcagtaaccatttaaaatatttctgcccatggaaaacaagtgatctatacaaacctgaaggatccaagacgagcagtagtatatgtcgcctgccttagtaaaccagctgacaaaccctgcaaatgaggtgctgaagaacttcaacaacatatcaatccaaaactaacaaccgaacatggtgtaacaagtgcaaaatagtgaatccttgttggttcaagctaaaatgctaacatagtatattgagacatttcaaggttaaacaaggatcaaatcattattgatacgaacaatatatactggataacaatgtccaagttggacccagtaaaatctcatagtaacctaacataaccagcattgagaacacacattaaaatgtttgaaaatgaatctaaagcaccttcagtagaacgaaccttgtaaaaggaaccaataccctcattagcaagcatgttctttgtgacctgagctgcagatccctctcccagctggatcttcacctgaaatcaaaataaaaggaagaattatgtacaggaagctcacgtgctaaataaagtaggtaccaaccataaaccaagccatcagcacattgatagtgatggctactagccaattcccatgttccaacagatcttgctgacatttttttccccattttgtgctactaatcgataacagatcacgaaaaggaatagcaaggaatgcatcttctccgcccaccagactaaaaaattagcacgtttgcatgccgctgcacaaatgtagagccatacactaaatctgctactgctacaattttcacagattaaatgttaatggatcatctcaggatcgaccaattaggcaatttactacacaatccactgacaaatttacctaagatggcgatatgaaatacctcaagaaagcacagagaacagcgagcaacaccaaactggcccggctctactacaatccgcatcacgtaaaacccaaactccacggatctaatagatcgtggcgaccgaactccatccgagacaataattagctaacggaaatgagttcccaagcatccgcgcggacgccatcgacaaattgcaacagatctaaagcgatccacacccagccacccctataagcgagctccactgcaccactcgaacccacgcatcatcagatccaacccactcctacgcagctacccaccagatccccctccattacaacggatccaagccctccaccccga

SEQ ID NO: 20097 - DNA, 1337 bp, Oryza sativa
cagattaggtatgccacaaactctgagatgctatgcaatatgtattttggtatatattatttcattagttctgggttggggtatggatatcaagtcttaaatatgagcatatattatgacagataatattattttgcattttgagggaacatttacatctaattcactttatgctgaccgttgcagttgaataattgtggtgtacctatatccattacattcttattgtgaagtttgctctgtattgttaaagtaattccgattttcagttgtgttatttttatcattgctataacaaaaagcttatgtaacttcatgtattttcaggggtgattttgcatcagagaattggaacattgaacccagtttgtttttccctaagcaatacttttctgagtgagtattttacacacgtttatcctcggtctgttttctgttgtttacagttgaacaatcttaatatcaatgctacaggttcatcttcagtgctcatatgaaagcgtttttgttgataaattcccagcacacttcattcttttttctatcatgagttcctgatgataaaaatgcacacttctcatatcaaacatttttttgtagtacctgaaattgattttactatctgtggttctatttcctgtagaacagaggtgtctgcattttttctcatttgaggaaaagcgcattttctgcctctggtattattagtcctaaagtctgtaaactctgaggctcactatttgttttcactgcatcaccactgaaaaattggaagatgttatctatcccaaaggagatcatgatgctgtttccattagcaaaagagatgttgagctgctgctacctgaaacatttgtcaacgatacaataattgacttttatgtcaagtaggttgattttttttatgctatctgatatattagttcgatttgaaattctatcaataggaatgcaaccacagttcttgatctttgatttttagatttgctgcagaattgttctcttgtcataaattacatttaatatttaaatcctcactcgcaggcacttgagcacaagaattgaacccgctgagaagcacaggtatcacttctttaatagcttcttttttcgcaagctggctgatcttgacaaagatcaagggagagctccagaaggtagagcagctttcctacgtgtacgcaagtggactcgtaaaataaacatattcacgaaggagtttctgtttattccagtaaacttcaagtaagacacaagacgatgaaaattctgttgatgcagtgataaccttagtgcactactaataatgtttctgcattgcagcttgcattggagct

SEQ ID NO: 20098 - DNA, 17438 bp, Oryza sativa
atttactcttataaatttgttactgcagtttaaaatctttattgcaaagccgccattagaatattgcaaagttaccactgaaatgtcgtttgaatgacattcttactagatataaaaaactagtggtaaatttataaatgccccttaaaattgttctgaaaaaactttcttacactatttacttacactaattacttgctactctccctacttcatattataataagtcattttgacttttttctagctaaatttttttaagtttgatcgaatttatagaaacataatagtattttcaatacaaaataaatgtattattattaaaatagattaaatgttatatttaataaaactaatttagtgtcatagatgttgctaatttttctataaatttgatcaaacttaacaaagttgcctagaaaaaagtcaaaatctcttactttaaaatattgaacttctatactcctttaaaaaggtgtagtagtaatggtgatgagtggcaaatctatcaccaccacaccaccaacaccctacaattttaaaatgagaaaggacatatacggccagagggcccacatgtcaaactgtttatgacaaaaaaaaataaacgtgtttctctatgtttagagatcgatatatgcgggcatgccagtgtaactaagtacacaaaatgaacaaaataggaaacatatgctttataatctcaagatcataaatacaaattcccaacttaatatatatatatatatatatatatgtgcgctccattgcctgtcgttgaacatatctgaacttgaagaagtggtcctctggttcctaaggtctcgaaagatgcctagttaattacctccgcaagtctaggcctgcagagcgccttcgattaaactgcttgtggttgtctcttcgtcttcgcttcacattctccattcatgatgagtgttggtgaaaatggtagatgtatatgtgggtgttggcaacgtatccatggcctcatcggtccgtgcgctggtgttggtgatgtagccttcatataggctccacccaccctcgtcgctctgcgttattagtcttgaacgatgtggtggtgtagatgagttgcttttcatcatgcatggatctcgtgtagcttagacaacttagatgtcaccgcaatggcgtcggaaggtgttgaagggaagatgagttggtgaagtcacttggtgtacacaacaaccgaataagcatggttgggcacctcttggctagctgagattaaaagaacgaaaagttgttgaagatagctggtgtagatggcagccggattaaacatggttgggcgcctcctggcttgtcaagtcctgggtacagtagggatttgtaaagcgatgttaatgaagaagtagatgcaaaaaacaactagacgaatgcggcttggcacctctttcgaatggtgggtctactattgatccgatcgatatgacgatgaacccaaaaaaggggctctacgagggcgccggtaacgacaaccttggaagaagtagatgcctcgacgtagcgcttcggcattcgtgtgaggatgcctgtgctcggtggccggcgacctcagttgcagtacctcggcatcccatgagaaggcacacgttgaggaggagatgatcgaccgggagaaacaatatgacgccactttggttcactgctatgggtaactagtctgtctcagtgcatgtacgttggaaggccagtacgcgggcgcgtcgccatcgccggaatcatcaagctggctcatctgttggcatcgctctctcttcatcccgccatagtttgcactactccatctagctagaatctccggtcgcggtgacgcatcctggcgctgctatgtcatcaagatgctaggcgtccttactttactggttgcagcctatgcctcacaatgccaccgacgtctattcaccctcgtcaacaatgccgtcttcctcacgctcatcgtcaagctgttcgaggagaacatcggggtgtcattgctaggtgcccgcatgctgtcgtcaagaccgtccataagattttctctttatcacaccagagtcatcggttgtccatccatgatgctttctcctctcgtgttggagtcgtcatgctgtccgtccgtggtaccccccttgtcacgccaagatgagatgccatctgtttgtgatgtctctcatccatgacgtctcctctccgtcacgcgcggagtcttcatgctatcacaacccaaatatttttttttcatgacagtccgccgtatccttataagcatatacgctaactatttatatatatatgttcataaagatacaaggcaagatgtaatgtctaaccataacagctggagcttggacacctacagcagtggttccatttatttttcaccaactacattgcatattacatcggttggttcactgaccaacttattgtcaccaggacgataccctatacctagcatatggtatgtcctcttgtatgcttctaaggactaagtagaccgcacccccactaggtttgcatgtcattattttcctcagacatctcatcttgactagtttctgcgcacatcaaatggtaataatatatgagtatattatacatactcagcaagattagtacatatagctatagagatgtttttaaagacagaaaatactactacccatagatattaacagccgataaataataaaggatgtaacatagtaaatgagttaaaaaaatacactgcagaggtattaaagtaatcgtcataatttcattccttcaatccattttcgtccccaattagggataccctcatatgagaatcacaccgtcgaattcctacttgtgtgaggcgttcctcatctcacactgatatcagcacctgatatcgttattttaggtatcggccgtctcatgctaggtatcctaatcacgttattattctcgctgataaaatcatcaatccattattcgggtgttaatattgtttattgttagattgttagtatcatcatctcaatataatacaggtaaacaaattcagttagagatgattaagtaaaatagttgatggtgcagccttacctagtttcctgccgtcctatccgtgcgtctcaccaagtcaaatatgcaaatctttgatattaatcaatatataaatttgaatgcaagatagctactaacagcctactagaatatagctagctgatgtgactatgctaaaggagggaaccaactagtgctagtaggtgcttgcatgtactccctccgtcaaaaaaaggcaaactgtgggttcccgtgccaacgtttgactgtccgtcttatatgaaatttttttataattagtatttttattgttgttagatgataaaacatgattaatattttatgtgtgacttatctttttaattttttttataattttttgaaataagacggacggtcaaacattggtcacggaaaccagggtttgtctttttttggacggagggagtacgcatgtagctgctgctagccattaaaattcgatgcatgcatgtagctgctgctagccagccagagtattagtcttttcactaatatgtatattttctacactaatccatctacttgtagctagacatcaggtgtttattctagccatgtactcataaaaaccaatggacaagggctgtgtttagttcaccctcaactaccccaaacttctaactttctatcacatcatattacatcaaaaactttcctacacacataaactttcaatttttttttccaaactcccaactttccccaaacttccaacttttttcaggaactaaacacacccaaggttcagtgtattacctggaaggcttctactagctctaaactctcaagtctctcacagacctctcgccacagccagagcagggaaaagtactactgatggggcatgagctgtggggtcgcgtacgagttaaatagtgcagcttccttcagtctgaagcggacatctgtccaaagccatgatgatggggataggattcaccctccctcttccttacactagaagggttcaatcctatccatcaaccctcagtgatatttatctgtcctcctcccaaaacaattcaagaatgtataaatggttccctgctgctattattcactactactacacatgctgatctccgtgacgtctccttttcgccataccaatatgatgggatgccactcgtctatgtattggagcgtcactcatctacatcaacatgaagcaagaacgatgtcatctgtgatgccaaggagtcgttcatgcttgtgctacaccaatgatgctattgaccgttctgtcgacgaggcatatacttcttccaaggttgttgttgttatcgacgctctcatagagcccctttttgggctcatcgtcatatcaataatcaattgaattagtagtagatccaccatctgaagtaggtaccaagccacattcgtctagttgttgtctgcatcaacatctcgttacaagtccttgttgtacataggacttgacaagccaaaaggcagctggccacgtctaatctggtttccatctacagcagttgtattcatcaactcttcattcttttaatctcatctagctaggagatacactaactgactccaccaactcctcttcccatcaacaccattcccacgccactgttgtgacgtctaagctacatgagattcatgcatgctgaaaacctatccatccacaccaccacatcgttcaaagaccgatgagcacgaagcgacgagggcatgcagaggctatatgaaggctaggtcaccaaccgataagaccatggatacgttgccggggcccaaatacatttaccattttcacaaacactcatcatgcatggagaacgtgaagcgaagacgaagagacgaccacaagcaccttaatcgaaggtgctatgcaggcctaaacttgtggaggtaattaattaggagcctagacttgtactacctccgttcgaaaatacttgtcgctttgagtttttgtttgtaatttttgatcattcgccttattcaaaaaattatgaaattattatttattttgtttgtgatttgctttgttattaatagtactttaagtataacttatcattttgtatatttatactaatttttcaaataaaacgaatgggtcaaacattaaaaaaaagtccaagcaacaactaaactagtacggaggtagtaaaacggaggaggtattttacgataggggagtactacgagtactgtgctattgacaaaacgaaactgttgacttgtgagaaagcgtcgccactgtcgcattcactgacactgcgggcccacccccactcctccctgtctccaacctcggtttccgcgcataaagaagagcttccgcttccgcccccacctccgcccccaaacccctcaaaaccctcgtcgtcttctcgcgatcgctattccctcctccattcctcctcctccacctccgagacctagggttccaatgtcgagcggcggcggcggcggcgacgactacaagcgggaggagtcggtggcactcatggtcatcgtctccctcgcggcgctctccctcctctccctcgtcgccgccttcgcctactactgctacatcacccgcaaggtctcccgccgcctccactcgctcgacctccccaagcaccaccgccgctcctcctcctcctcgcctcctcccatgcccccgccgctgcctccccctcctccttccgcgaatgccccgacgctcgggaaggagagcccgtctagcaactccgccagcgacggcgcggcggcggcggtcgtggtcggcggggagaggggggccgtccaggtgttcagctaccgccagctgcacgccgccacgggcgggttcgggcgggcgcacgtggtggggcaggggagcttcggggccgtctaccgcggggtgctccccgatgggaggaaggtcgcggtcaagctcatggatcgccccggcaagcagggggaagaggagttcgagatggaggtaaaaaaaataatctgcgtttcgagtaattaccagcaattgaaatgcgggtttccgtctgagattggggcctgggacagaataacatgcaacgggcggtaaattcgaatttaccacccattgcgagttatatatgttgatgaaattttgcggtccaatggagacaatgagacactgcggagtttccgagcgaaatggggtcactgtcgtctattggggttagttttggtttggcatcttgtcaaagatgtttccaaaaatggagtgttcggttgcttggtttggcctgtagttggctctaaacacacacatggagctctaattaccgtaaatctgggttatgatgttgctactgctggaattctaagctgttctaatcaagtttgagcggttaatatggggcattggtgatcttttggcaggtggagctgctgagtcggcttcgatcaccttatcttttgggcttgattggccattgttcagagggtggacaccggctgctggtctatgaattcatggccaatgggggtctccaggagcatctctacccaaatggaggtatgcacaccttttagcatccaattacaactatagttgaatttgatattttacaatgatttttaggcaggtttgatgttgttagttaagtgttgcaacatttgaacaccaaactatgagagcaaattgactgggaagctatccctgaacttagttgactattgtctttggatggcaaaactgcaaaacactagtgatgccacagctagaactagggacctagctgaattaattgcttttagcgcacatgaagtatttggttgataaccttattatgtcctgatactttgaggggaagaaatggagcagttgtaacagttgtcttgctgaggaaacaaacttatatctgactaaaaggagggaaagtgagattcaaataatacaggaataaaaattctaaatttgatgcttagtattacatatcagaagacaaacgaattgggagttgaatatttcatgtactgtaccttggtttttattactagacaccattggtcgtatgctaattcattatgaatttttccctagattctgttcatggattaacgaaaatgtgcaagagctctatttgcctctgccattctatgagtccattgggactgcttggtctggatacatgatatagcaatgaaaataattacattctctgtaatgctgatataggatacgttgtttgatgtttacatatgctcttgaagattgactatcccttcggaatgacagttagagaagagaacttacctaattggtgaacctatcaaatcacctatctcaaagtcacaatgtcaaaagaatcaaacagaatttccagttcatcaagaaatggtttatgtattcatgtaaagctttagcaatttagtggcctagatctatagtatttaaatatactgtctacactatttgcttggtttaattgctaaggaaagcatgctaacctcttatcagtgtgaatttactgattttagtctgtttaatactgtacaagaaagtggaaactgaccgttttaggccttctctcttccagataagaactcttagctagtcctatggtgaacaaggtgtcttcaatcttaaaaatctggtgttttttccacaaaaaaaaatcaagccttgtaatattgtaaaatcggtcatctggcctttgttgagagagcaccaccattatttttcatccttacaattgagttattaatctgttgagtcttgtatatatggcctgccgagatagttctaaaagttatggtttggaaaacaagtgaagtgaattcactacaaaattgcagtcattacatatgcattgtgttctttctttattggtatacattgatactgctttaagtccttaaagtgggcaggtagttggcatactgtgaaattacagattaccacatttcaattcttttggttgatatgaaaatatgaagtttctgaaaatgtttccttgtcatttaccgtagcatatcttttttagtgatggtattcattcagccaaattttcttcggaaatcctccccgtcgggcgcccgatggggagaaaaaaaatcaggcgccccgcgccgcccacgcctcgcgcgccctcaccatgcgcccccaccacgcgcgcccattgcaacagccgcccggatataatggaaacaccctattaagggggatccgtttcattttttgttccaccaacaatgtttcagctagtatactcgtgatgttttcctatgtatggatcacatgttgcagtgaatttttgatactgtttaatattttcaacttgatggacacgtggtttgttgatgtacacgagttttaagtgttgcaatggctttaaatcgtttgttgcatacgttgaaccaaattgtttcatctagcgatctgatcgtgtttcacttttttttaagaattgaaacattctttcatatttgctgaaacattgtttttatatagggtgaaacaacgcctgattttctggaaactgtttgtttcatacgttgtagcaaaatgtttcatgaggtgatttggttgtgtttcagcttttgaaaagattgaaacattttcgatctacttggtgaaacaacgcccgatttttgacaaaaatatcgggcacccgatttgtaggcgcgcccatttttctcgtcaactgatatcccacaaagctgacattgtaggttcctgtggtggtatctcaaaattggactggcctactagaatgagaatagctcttgaagcagcaaaaggtctggaatatcttcacgagcgtgttaatccacctgttatacacagagacttcaagagcagcaacattctactggacaaggacttccgtgcaagagtgtcagattttggtttggctaagcttggatctgatagagctggtggtcatgtatcaactcgagttctaggcacacaaggttatgttgcaccagagtaagaccaaattctgaacccattgtgaacgaacttgagtttgatactgatacattcaattctttttccattttactgtttgatttgataatataaatgaattgttgaactgattatactgtctctaatgtggtgcatgctacacaaactctgaagatatgctttgaccgggcatttgacgaccaaatccgatgtctatagttacggtgttgtacttctggagttgcttactggcagggtgccagttgatatgaagaggcctccaggcgaaggtgttctagttaactgggtaagaacattagctgaccatcacatagttgtaccgatgtatctttactttgaactgtttttcttcaaccatcaggaattataaaattagtactactgtttagttcatagtataaatgaggtaatggaacacttagtacttcagttgcaaaagtttgagatgctttccaagtgaggaaccaatatgtactaaggtacatcagtacatgtacttcaacactaaaatttaccatgcacttcaatcgactctgcttcattattcctgtcattttcttatgctagtgaatcacgttacagcttaattaggatccatctgcctctcttgttatactaggtaggaaaggttccatgtaattatttatcttcaaaaataatatttaaacattgcatatatctgacctgtggctagttgcattgatgcaggcattgcctatgctcacagaccgagagaaggttgtgcagatcttggatcctgcactggagggtcaatattcattgaaagatgctgtccaagtggctgccattgctgccatgtgtgttcaacaagaggctgactacaggccactaatggctgatgtggttcaatcgttggttccgcttgtcaagaatcgttctactccaaagacgtgcaaccctagtgtccaagcgtagaagccacttgaaggggaagttgaatgctcagtttccaggttggtgcttgacttttctggaaattttcatctacatctaacaactactgctgagtttatgagatcagtatgctccataacttaattctcttcctctgccagtgaattcctgattttgcgaggtgaatcgtaagcagttagatttagaaatcaagcattaatttagttcgatggaccagaaagctagtttcagtttgaagggaagtcctctagtcatgtgcaattagtgatcatgttaggtggtttggcttagtacttatggttgtgccctgtgggaatgatcagagagtgttgtttccagctggcagaattgcaatgtactgctgaattttcttttggcttgtcaattatgttaggtgtctttggagatccatgttcgttgtcttaactcttgtgctaatacgttggtctcatcagcttggcctataaacatcgccgatgtatctttttgtatatgtatatagtaggattctggaacttataaaaacaaacatttgccagttgagcattttcatgcatttcctttctcgttttctttaagcttccagcacatacttcagagaagcggcaaatttattatttctgtagaatgtgactaaaagttcccaaaaaaaaataacaatgtggtaataatgttcaggtgcatgtcaagtttccaacagcaaactattgtgacgggttgcaatttgagacattgtttatgttctctcttttatatattgagaggggagggccacatgattaatgtcgttgatgacccaaggaagatttgttgatagtgcatcatatttttggccttttgtaatttatcgtacaagcatcagaaactgcaatggacggttgatcggttagttgttaactattactccgtatgaattatgattgcccaaacctgaactgaagttgccgatgaagctgcatatgcattgctgtccagaaatgatggacttcaccagattggatggaattatttgcagtcttccaaatcaaaagtactatgctattgtttggaatttgtgaagttcataggaatcgaattattagtggaaacaattcagtttctctaaggctcaattcgtactgatctgcctccccaagtactttacgtaataagatttatgaacttcaaaaactggaatactgcagcaaatcttcagactaaagttatttgcatgattttacctaaattttttgtttgcactggagtaacatatcggctgtcctggtaatcaaacacatagaaaggcacaagtgccacgattatctgaatattctccagaggcaaacacactttgagctcgctttcagaaagcaaagcatgttgcatcctcctgttgcctgttgcttctcacaagaaatttatttattttatttaattttgttcagagaaagctatccagattccagatctcgtcgctgaccagcaagcacatggcatggccacatggcccaggtgtgagattctcagacgtttcaggaagaatcctaccctagtaaattacccatgtttttcaccagctcctctaaaatcactacgagcattaatcgaaacgacggttaataccatcaatccatatttttaaatttgatccgtgtatgccaaagggctaaaggattttttttttatactttcaagcttggatccgtttgaatgtgctgtcaacaacaaaagtttgatagagttcaatcaatttgagggctgtttggcttcaatccaaaatggcccttgatcttgcacatcgctgccatgcaatgtatatattatgatttcaatttccacgaaaacataaggaaacttgcaggaactaccctctatttgagctctacagcctataggatcctgactattgtttagtcttggaatttggaaatgtcaaaattctgaaattttagtaattagggccctttgatttggaaaaaaaacatagaaattttgcaagattttaatcctataggaaaatttcctatgaaggcctttaaaacaagggattgaatcatatgttatcctttgaaatttctatggaatagacaatttcatagatattttagagaaaatttagcaagggcttcaacctcttgggaattttcctttgagtctatctctctcaaccgattcctacgtttttcctgtggtccaaacaaatggttattcctgtgcttttcatgtattttgtaatcttctgttttgcacttatgttcctattagaattatgtgtttttcctattccttcatttttacatttctgcaatttaaaagggcccttaatatgtgagaatggccatattagcatgaccgtaacatcaatctgaacatcgcccatttcatctctaccctaccatcacaaccaatagagttgtactgaactggaattttttacactgtggcccttttgtaaaattattttacaaatatacctcttcgaaaagtaatttggaatatggaccttagctcttgacgccaaagtttttatatacgaacgtcagagacgcgatgggtccccacatgttagtgatccacgtaaaagaagttaacggcccctttgaattaaaggatttatgtaggaatttcataggattcaaatcctacagcaaatttttctatttggccctttgattcaaaggaaagctttccaaatcctatgaaattcctatggaatgacacattgcatgtggattttagaggatatatagcaagagctccaacttcttggaaaatttcctttgagtttatctctcatccgattcctgcgtttttatttttcttgtgttttgcaattatctgttttacacttccattcttatcagaatcctgtgtttttttcctattcctctattttttttcaaccctcgattcaaagggcctaaataagatgaactacttttctagggcgccaacacacaacatgtgtggcaaccaagttaggagtacagtatgtgtacatgatgccgagcaccacactcttgagaatgctgtagtgtgggatcgcccacactatcgaccaaccctacaatgcttgtgcatgcggatgtcgctgccatagcggcataagaccatggcacgctcgacgtgcttgacgccaactaatgttggtctggtgttcaccgccatcatacagttgaagtcagtgcggtccaatgagttaaatggcattggcgcaaagtcactggctcagcaatgaaggaaataaggtcagcgcccgagccatcggcactgacccctagccacactagtagccagggctcgaacgctatgttgggtaagaggaggctcgacgccatggacttcagcaccatggttttggacctcggcgccaaacaaggatcaagggaggattcaaacctgaaaagtaagtatttttcggcttacttacaaaatcaagtttttagaaaaggggctaaaatgtaaaaaataaatccagtcgtaggggaatcaaaaccaaacccgcagtttccgaaaaccaattggatggccagatcatggcccaacccccaacattcactccaaaacccaaaaccttgcacattgaccgaattccatcccatctgacgactgaccaacattgtcatctctagctggacaatgcaggaccaccaccaatcagctcctctggttctgtacacagtgaggggcgttttggtcaaagcatccgacatgtggggcccacataacggtcagtgctttgctacagcctacaggcagaggcaggcaggatgcatgtgagagacagcagccattttccccccttctttttctcttttttccgtactgatttcggcagcatcaaggactagaggaggaggaggagcaataaacaagtgccgccatgtcgcttgcccggctttcaggggcgcttttggaattctcgtttgaccgcctacaaacccacagcctgtccctgcaaccaatttggccctgcgccacgccacccccaaagctattagtactaaccacaccccctctctctctctctacacttagcagtagtactaagaccctcttttataaaatttttaagtcactatcacattcgttagcagtagtactaagaccctctttgtaaaacttttaagtccctatcacatcgaatgtttggacactaattataaatattaaacgtagactattaataaaacccatccataatcttagactaattcgcgagacgaatctattgagcctaattaagtcatgattagcctatgtgatgatacagtaaacattctctaattatggattaattagacttaaaaaatttgtctcgcaaattagctttcatttatataattagttttgtaaatagtctatatttaatactctaaattagtgtttaaaacagagactaaagttaagtccatgatccaaacaccacctaacatggacaattaggctgtactacaaccttttgccaagctacgtgtacaggtaaatcgcacacatgttgtcatctttggaggctgaaacatggggaaatatcatgtgaaaaccgttaaataagtgaaaactcatgaaaattatatttaaaagttctctaaatttatataaaaattaatagagataaatatagacatgaaatacatttacatcaaatctcaagtcgaaactcaacttttatttgagagaatataaaagacaaattttaggtgaatagtgttctattatttttcatccgaaatttggcatttttgttactcccaaataaagttgagtttaacttgatatttggtgaatatatttcatgcctacacttctctccagtaatttttcatgaatttattaaacttttagttccgattttcacgtgttttcacttatttgatggtttccatcggatatgtccctgaaatatggtattgaagtacaacatagttcatacttgggtcgtgtttgaagtcatgtaagggcgttataagctcataggttttgcttacatacaattggtgggataaaaaggcaccggtaatttcttcaagattgataaaataaatgtctagcgctataaggccatggcacacatcaaatgttgtttagaacaggttatttctagctccataaattgttggatttgaatttgtgattacattgataataattgattgaatcagtttgttcttattttagagaaaataaaaaaaataaaccactataatttaacttacaaactccaaaactagtctggatctgtaatttaggttgtgctaaacaaggcctaaagaaaagaagtaatgtttggagaacatgtttttaaatcaatatggaccatcttctaaaatgggcacactgtgcaaccgaaatggttattagcaacttaatatccaatccttaaaaaaactacattgaaaatatcctaaatcccaaaattaaattttaaaatctaattttggtagcgattgattatttgtaggggcaaatgatgaggccctaaatcaaccatgtttagctacttcctcgctttctttaagtatgtttcatacgctacaaactgatattttttgcaaatactttttattaaaaaaattattttaagtctgcaaaagctaatgtttaattagtcctacactaataatcctccttgtttggcttgccgctgataagcttagtcaaaaccctgatccgaactgcacgtaagaacggtcaagaaaccatttcggttacatcacacaacacagcctcatctctcatgctgtcatgcttgtggtgcacctagcaattcctccctccccatctgtcttcctcctctaatctaatccacctccccactaatccaccagctgtgtacactgcagcagcagcagcagctaaccactctcactaaaaactatagcagctgcagtaacagcagcagcatcacccaccttcttcttggtcaaagccatccatcccaccactcacccatccctcccagtataagccaaaccaatccatagaggaggaagaggaggaccaggtggtggcacacctaagctttgtgcagtgccattcacgcacctgcagcttccagctttgccacatggaccagccggcgccggcgccggagccgatgctgctcgacgcgcagccgcccgccgccgtcgcctgcgacaaggtatgtgactaaccggatcttggcgtgctgatccgtggttttgcggttctttgctgtgtgctgatttagtgtgctgttcttggtggagcagaagcagcaggagggggaggcgccgtacgcggaggggaatgacgcggtgaccgggcacatcatctccaccaccatcgggggcaagaacggcgagcccaagagggtgagacacgagccttcccccccccccctttgttgttttggtcttggttccatttcttgagttgcagtgaaatgctgccggttcttggtttaggaaggtgttcttgtgtgttctgcagctagtttcttagctccgtgtagtgatttttggtgatgggaaagccattggctctaagagaggcatgtggattagtggtcagattttgcaaaagaagtaaactgttggtagatatcagccaatttatttagtgttagttgttcatgttcttgtattactgcaagatctgttgtaaataactaaatatggcttgtttggtgctcatttttggtggtttgtaggggaaaaagttgggtgtgttggattacattgttgtgaacactagtgctcataattaaattttggtcttaagatggtaattttgtacttgattttcagacaattagctacatggcggagcgcgttgtgggcactggttctttcggtatcgtctttcaggtgattcatctttcagaaagttgttatttgtttctttcttttcgtgctgtcgacttgttggtctgatgtttagcttgctggtttcatgtgtaggctaaatgcttggagacaggagagactgttgccattaagaaggtattgcaggaccgacggtacaagaaccgtgagcttcagcttatgcgcgccatggaccaccccaatgtcatctccctgaagcattgcttcttctcaaccacaagtagggatgagctgttcctcaatcttgtcatggaatatgttccagaaacactctaccgtgtgcttaagcactacagcaatgccaaccaccggatgccacttatctacgtcaagctttacatgtatcaggtgtgtggattgctaatcaatcataaattttgaaatgcctgccttcctgtgtgtctcttctaagtctattctacattggctgcagttatttagggggcttgcgtacattcatactgttccaggggtctgtcatagggatgtgaagccacaaaatgttttggtaggtattcatgatcagattattattttgctatgcgatggcctttgattattggctctgaactcctttcttgcaatacaggtggatcctctaactcatcaagtcaagctctgtgactttgggagcgcaaaaacactggtattggccttttcgggctgcagga

SEQ ID NO: 20099 - DNA, 1411 bp, Oryza sativa
aaagagtgatgtaaacagtagctacgaaaattaccataccatctatctcttcagttttgttgaatgatgtaaaatccaacaataagtattttattcacccattttacactagtacagatcattccatctgtgacggcccataacaagactggaatttgcgggctgtcacaaggaagtaatctcaatcaggccgaagtttcgcccgattgagatatggtcgcacagccatggtatacaggcataaaactaaagcccatcacggatgacacttatctgtgacgggccatagttgaggcccgattgagatgagggttccatatctcaatcgggccctaaaagaagcccgtcacagatgagggtcatctgtgacgggctccaactagaggcccgattgagataagtttaatgcccgtcacagatgacactcttttttgacgggcttttattaaggcccgatagagattacttgtatgcccgtcacggttcattgttttagggccgttacagatatttgttgcacagtataaatacccccccaccacctagtgtaactgtatcccactgttcactattttagtgggaggctgtagggggcgattttttgtcttttttccaaggaaaacagaaaattcccaaaagtgatcaaaatagatctatcaagtgagtaatattaatcattaattgagcaatttcatcacgtcttacttttgtaatactgatcttataagatgtgcatgtaatttgtttttttattttgtaacaattgatcgaagttggatgtatgcgaaaaatttgaaacgtcattctacggagtacagaaagggcgtaataaattttatgaacgccgcggaggaggatcggaaaagaagaaacagtgattatatgtgttgtccatgtgcagattgcaagaatgagaataagtttgatagcggagaggacgtacacggtcatctgatacaacgaggattcatgaagggctatacatgttgggggaagcatggagagtaagaatcaggaaatagagcagcagcagacagaagtggtgcgcataatcaagaagatgaagatgagcatgacatgtttaaaccttctccattgggcggtgaaatggttgatgtggatcacgatctactgcaagacatgttacgtgacgttgaggacctagcccagaatgagagagatggaatgaagttcagcaggttggtcgtgattccgagacgcctctgtacgctggatgcaaagcaaaacacactaagttgtcagttaccttggacctaatgaagctgaaggcaagtagtggatggacagacaagaatttcacagatcttttaggaattttgaagtctatgcttcctgttgagaacacattgcccgagacgacatacgaagcaaagcaggttctgtgtccact

SEQ ID NO: 20100 - DNA, 7401 bp, Oryza sativa
acatacacgaggccggtggctgaagaaatcatgaaagatggtatacatgggtcatcggaggtgtctcccgctatgtcacgcatttagaagaaagaagaaaatttttaacggtaagagagaacttcagcctggtcctaaagatttgtccggagatgaggtccaaaatatggtcaaggacataagcaatgagtttgggaagaaaagaaaacgtagcaagacaaagtagaagggtatgtggaagaaaaaatccatattttggtggctaccttactggaaagatcttgatgtccgtcattgcattgatctcatgcatgtagaaaagaatgtgtgtgagagtttggttggcctgatgttgaatattcccaagaagacaaaggacgggttgaacacgcgtcttgatctacaggacatgaatattcgcagtgaactccagcccatacgagatgcaaagacaggtagagtgtgtcatggttatggatatcacatacctaatagtagttgactaaatctcggcaggacccaccacataccatgtcctatacggaaaccgacttcagatatggagggagttccggataaggaaagacaaccagagttctacatggaaacgacaaggactactcggattgtatccatattggtttccctagttctacttggataagaggacacctatgggtataaatacaagcccctaggaggatagggggacacacacggaccatgagacgatcaacacgatcgggacgaccacttcatcaacacccaacacaatcaacatacaagcctatatacgccaagacacgccgccggatatcgacttcatggataggtatggctattcccctacggtgtctctggataccgtcaggagatacgaaagcgctatctctaatcttgctgggcacggattcgaggagtaaggctaccctgttgtcgactacgagtcagaccttcagaccgacatgtcgacaatagttagataggctacccacatattgtactggtgtgattatggtgaataaaagcaactccggcttcggccaacaggatgtagggttattacctgactgctcagggacccaaacctgtataaaaatccctgtctccgtctcttttacctcagtctcgcgtatatcctagcatcaacgatccccatactgtccaaataccgtagtcgagacatcaaacatcgacagagtgtacctccctctagcctgccacacattgtcgaaggatgagaagattgcaatgttatcatgcttgaaggatattaaagttccattgggctattcagcgaggataagtaagtatgttaaattggacgatctaaaacttgttggaatgaagtctcacgattgccacgtgctaatcacacaaatcttgccagttgctatcagaggcattctaccatcgaaagtgcgtcacacgatccaacgtctatgcgccttcttcaatgcaattggacagaaggttatagatccagaagatctagatgggttgcagaccgatattgtgaataccctttgtcacctggagatgtttttcccactgtctttcttcgatataatggttcatctccctgttcatctggtgaagcaaacaaaactatgtggcccgacttttctaagggaaatgtggccgtttgaaaggtacatgggagttctgaagtcgtacgttcgtaacagagctaaacccgaggggagcatcattgaaggttacacgaccgaggaggctattgagttctgtgtcaattacatgtccgatgccgatcctatcggagttcctgcgtctcgtcacgagggaaggttgtcaggtgttggcacaatcggaaggaaaagaattaggcccgatcaagcgtcgtacgcgcaggctcattacgctgtgctccaacatatggcagaagttggcccatactttaaggagcacttagcgaaaatccgagatgagaacttggggcgatctgatgcatggattaacagagaatataattcttggttcaacgaatggttcaagaatcttgtgacaatgtccacggatgtcccaaatgagacagtatagttgttggggatgggaccgtcttgcactatagacacatggcaaggatacgatataaatggatacacattttacaccgtcaaacaagatgacaaaagcacagtgcaaaatagcggcgtccgtatagatgcattccaggatcaagttgggtcaaacacatactacggtcgcattgaagagatctgggagctaaactacgccaagttcaaggttcctttgttccactgccgttgggtgaatctacgcactggtgtcaaagccgacaaggaaggtttcactttagtagatctatcaatggtgggatacgccgatgaaccatttgtacttgcgaaacaggtcgagcagatattctacataaaagacccttcaaactagaagatgcacatcgtgagggatggaaagcgccgaattgtaggagttgacaacgtcgtcgatgaagaagaatacaaccataatcttcatgtaagacctcacattgaccttgacgatgatccccaagagcctgtggcatatgctcgttcagatcatacggaaggcataaccttgtgaccgatgcatttgtacttatctattgtaatgaatgaagtattttgttttattgttttattgcaaagacttgatatgtgtagtcattaatatggctaattttgttttattacaaatgaccaaaagaaaagttgtcgatcttgatgagaggatcaactttgttgttgaccatatttccatttgaaatcatttagtatttacaaatgttgtttatatttgtcatatattcaaatttaatttcaagctgttgggaaaaaagttatatagaaaaatgaccaaaataaaacttgtagatcttgataacctctacaattttgttgttgaccatatttcgatttgaaatcatttagtatccgaaaatgtattatgactaataaaatgaattattatacagcagctatatattttgtacgcacaaatataaagacttgtttggaaaaatggaaaaatagtcatcgttgacgggccttagttaaagcctgatagagattaatctatctctatcgagcattatcttagggctcgtcacagatgagtcatccgtgacgggcctgaatgtcatctcaatcgggcattagtatggagcccgtcaccgatgagccatctgtgacgggccctatggcaaagcccgattgagatgactcatcactctactataactagggtttctcagatcggatcgaaaatttttctaagtcccgctacagtttcccgcctccttagaaccctagcgccgccgccaactcctccttcgccaccgtcatcctcccttgccgccactgccaccgagaccgccgccgccgcctccaccgagcctgcccccgccgccgccgccaccgagcctctacaccaaccggcgtcggccttcctcgtcgtcgccgcctgcctcttcaccgacacgaacagctgcccctaccgagctcggcgacgtccttcctcatcgtcgtcgcctactcctcaccgacgcccgacgccgacctgcccgaccggcgacgccctccaccgagcccggcgccgccgccgcgaactcctcctttgccgaggccgccgccgccgccaccgaacctgccgcctccaccgagcccggtgccgcctccaccgactggcgacgccctccaccgagcccgacgccgccaccaccgagcccccctcccctccgccccgcccccccccccccccccccgcccggccgacctcaggtgagtcctccatcgcgccgctctctgctacctgcatgtggtgaatgatgaaatgtagatgttgggatgaatttagtgataaatgattttagtgattgattacatgatgatgaatagatgaaatgtggtgcattaatgaatttagtgatagatgattttagtgaaagatgattttagggattgatgatatgtggtgaacggatgatttttttgattgatgacatgttgatgaatagatggaatgtggtgcattaatgaatttagtgatagatgcatgatacgtggatgaatagatggtatgaggtgaatttatgattttaggatttgatgatatgtttaatttatttatatgtgacattcaattcattctattactgtgagatgtgcaatttagtttatttatatgcttcgtttatttataagtgacattcaattcattgtaatagattgtagcactgaattgtgtattttcgttattttgaaaaaaagaagacgatgtctcagcaaggcctgctctcaaagacgtgaggacgacctcctcacgaaagtgttgggcaacaaggaacaccgtggacggacacggggcgttgggtcttctgttccctggaagtatggatttccagactacgcgtggcagtacaagaagcagacttccaacaaggcggagaaagatgcacgccttgaagccaagatccgggcgtcgataagagctgagctgacatctgaattcaatgaaaagctcgagtcgatgagggccaagattaggcaagagatccgagaagagcaacagaacccccaggccgccgctgctgctgcgcacgaagagttaggaagtcccaccaaaaaacgcagcagttgcgcatcaactgaggtggcggaaaatccaacatcggtcgacagcgccgtcgaccacatagcggtaaaagtttcgtccacaatgcatgaaagacttaacgaatccatatgatatataatattattaaaaaattgattaatctatcgcaggaaccaacgagctgcaccctcacaattaggttgatgccgaccttcacggttccagcagccgagggacttgcgtacaagccgaccccagagacaagagtgcatggagcgcaactcaagggcggccgtgcaaaagttcaagtcgactcggtgaagtcggaatacaagctattcccactaaagtatccaccgaacgacgaggtcctctcactaggaaatgcccgtggtaccttcatccaatggcccaaggacctcattgagatcagggttacagcgaggctgtcacgcccagaaattcacgaaccagaatttctaagctgaatgtgtattaaacccctgtccaggaccagccagggtacacaaacgacaattgttgacatacagatccacgtcttacaaaaatataaaagattacaaatgcagcggaaaaagtaaaatgagctaaacttgaaagcttgacttctgcagcggggcgactccactccacaggcaatcctcgacggcagcgacgaaaccgacctcaacgagacagctccaactaggaaaatctttagctctggtgtgggggaaaagagagcaagactgagtactacccactgtactcagcaagtcataccggaagaggaggtatgatgcaggatatgtccaagggaggctaaaggttcttttgcataaagctagcatttaaaagcagtagttgaaagcagtaaaatagttgtaataattaatcaatattaaccaatcactgtccaacgctacaccacgttgcaacaggcccaaccaaccacctgaactacaccagttcaaaagctaacaaggggtgagactaatcacggtgaatctggtcgaccgcccataaccgcgggcacaactattcaaatagttttactctgatcagaggtgtacaactgtacccacaagacacagcgccaccacacgtttccatgcgccgacatgccaccacgacataccggaaagaggccgtgacatgacccttcgcataaccccctctaaccgatcgcaccacacctcagggttcgcacccgtccccagcaagcaatgggcagcccccctctcgtgccgcggtgaatccggaagccgatcaactggacaccccggccgaaccaactccatcacgcccacccttgcctgggtatgtcggctagaggaaagctacactacaagcccagccgttgcccacgctggcttgtggtaagcacgataaattcttctagggtttcccgcgaaccggtccttaatcgccatgggcacgactagcaaaaaccatgcacccacagcccaccatgtagtgtattttaattaactaacaccattacggtgccactaatccaaagctataccaataatcaaagtctatgcattaatgtaattcccccattgtgtactagttgaactaagcatggctaagcaatccctaattcaacatctaatcattttgatacccaagttatcaatggcataaggtaaccaatatatggctgagtagtaggacccatcccacatgatactataaaataatgcaacatttaatagaaatgcgggacatttgtaaattgggtacaacatgatcaattgtaatgcatgacttgccttgctctcgcactgatgagaccacaacaacgtattcgaggaaccgtggatcgacgaaacggctgaaatctacgtgacaaacaaagcacacaagcaaaatatgctataagtctactgaaacaggaaacaaaaccatttttaatggattctatacatttttatgaatttactgagacttgaatggacttaattggagctcggatgaattagatataaattttagaagattaaatgtgtttttactataaaagaaaaggccttaatggatttcattgcgcaacaaaggtccctgctgacatcatcagggggggtggtgccgacatgcgggacccacgggtcaccggcacaagaggaggaggaggtggcaccgactttgggtgggccccaccgggcagtggctcaaggggagggggaggcgcccagtcggctcggctcggcttcaaaccggccggccggccggttaggcgttgcggtggcggcaagcggccactgacggcggcaaccggcgagaagacggtggcggccggcggcgcgggcggcggcgcatcgcgacgacgcgtatgcggggagcggcggcacgcgcgagaggaaggaaaggggagagaggtgccggcctggctcggtttggcttcaaagccgaccgacggccatggcgaccgtcggcggcgcgcgcggtcgccggcgacggcaaccggcggcgcgggcggtgtgaaagacggcggcgaccggcgcgaagggcggcgacgcacggcgtggcccggcactaggagagagagaggaaggaaacagagggggagggcacctcaccgtgagttggccggcgtgggggaagacggctgcgaatggtgacggcgagcaaccggggaacgacggcgatgggcggacgagcttcaagacctcctagggaacaaaatgggagggattagagggagaggggtggtccacggcgggcggaaaccatggccgaaatcggcggcagtggtgg

SEQ ID NO: 20101 - DNA, 5733 bp, Oryza sativa
tgggacccacgggcccacctgtcggcgagagggagagaggaggccggttgggggaggagaaatagactttagggggggaaagagcagagggggctgagggaggggaggacttgggccaagcccgaaaggaaggaaggggaatttatttgcttttctttttatttaaattgatttagtgaactttgtggcattaaaattatttcttgagctccgaaaattcacggaaaaatctagagagtgtattagggcacagagaatattacaaaatattcccggccaatgatttttaaaggaaaattttaattctccaattatttcacttaattatattgatttaacttttatttaatttctagaaaatgcattatttaatgatttttaatcctgaacgaaaatcggggcgttacaaaggccaaccactacaccaggcggtcgtctaccaaagagacccgcctctgctccttcagcccctcttgctcaagatcgtcatgcacaatcttacgatgtgcagttgcagtacgacacggattttggggaggaccgaacggaggccgacagcaaggcgattcatgaacccccaccgatgaagaagagcaggaaggcacactcttcccctcagagaattactctcgataaacccgaagcaaaggggagaggaaggggaggaaaggtgcagtcctcgcttctagctccaaggaagctagatctgggcaagggccaggaagagactaagggcaaagaggtcaagaagaaatacgtcgctccacaggacttccaactaggcatgccattggttggagatgatgtgcttgccgcaatgggcaccgcttgcaaggaccttcacgcatactacatggagaaatctaacgctaggaagccgaataaagctaccgatatccttggagagcacgatggaaagccattccttggtccaacaaattatatcgtcgtcgacttcaaggatctatttgacctctgcaggctccgagcggtggacacaagcctccttaagtgctactccttgtaagtattgtcgcccaactcaatctggtaataacaatcggattaactcgcttacaagatcgtttatcctgtgtgtaggttaagttggcaatggtgttagaagaatgcaccggaagttgccttccttgatccacaagtggtcactgtcacaaatctccagaatgaccgtcaaggaatggtcaactacatctacgacaccttgtggtcccgccaagacaaggagtacattatgtacgcctataatcaatagtaagtgtgttatctaaatatacacaacagcatgacacattccttcagtacttaattaactttcactatattaatgccgcagtgcccattggatccttctggtcataacacctaagtggagtacatgtcactacttgaactccagaattgataagaacgcatatgattggaccccaatttaactagcgatagatgaagcgtgggcccaatacgtgcaaagaggaggcctcaggaagacaggacatgacaccctcatccacaaaaaggatttcccggtgaagcaacaaataggtgaccagtgcggattccatgtgtgccacaacatgcgccttctgtacagagaaaaggtgaagactttggctaagtttgaggtcggtggtctcaattgtgatagactaactacattttagtacttatatatgatcgatcaactaatctggaattatgacaatgtagggcacaataaccaagtctctacctaccagctttgaggaggttcgtgagaagatagccagcttcatcctccgcgaaataattaaccccaaaggaatgtttaggcttaaactaaaatgatgaacaatgttgaacttttatgtttaggcaatgatgaacacttattatgcaactgtgatgatgtaactgtgatgcttatatttatgtatatatttcatatgtttatgttaagacttgctaaataaatatttgatccaattaactcggttttgcaggtgaaatatgataaatatttgaatggatgtgaaatatgtgaatggatgtgaaatatgagatggctatgaatgtgtggttgtgtgaaatatattgatgtctgtgtatgtgaatgcatatgtatatgaatgggtgatgctggggagctggggatattggatatctgtatttgtttctatcatttctgcagcgggcatggctagcaaaggcctgaggctagccaaaaaacaaaattttttttttttttgtagattatagtcatctgtgacgggccataactaaatgcccgattgaggtcagtagtcatctgtgacgggctctagtttaggcccgattgaggttagcggtcatctatgacgggctctagtttaggcccgattgagatgagtatcatctgtgacgggctctagtttaggcccgataaaggttagtagtcatctgtgacgggcgctaattgtggcccgattgagataggtcatctgtgacgggctatagtttgactggtcgtctgggtcaaaactatcggtgacgggctttacttagggcccgattgagatagattcatccgtgatggccgttttcccgattgagataactcttcacatcagtgacttctagcctgtgacgggacgctgtgcccgattgagatggggcttaccacccgattgagatgagggtatccgttctagtgttatcaaactacaccatacattaggagttcaacagtggccacggcagattatgcgaaactacatacttccttaaaaaggcgaaaccaaaaagtggccatgaacagaaaacattctatagtatcagtgcaaccaagaaatacagatggaccagcatgcaattcattttgctataaccaaatcacattgaagggcacattgaacaattacgaaattttttaaaatttcctatatgtctagagaatgtggaatcaggatagaaatgtcagcgagatatatggtaacaagtcttcaataataccattattgggtggcaaattctcaagttgacctttcgacaactacaccggaacatatgatttccaagataagttaacaaagaatttataacgtaacagaatctataggcatggtcaaacaaaaataaatcatatagtagacaagcaattcaaacggcatttttcatcatcaaatagcactaactggcaggtcgaagaataaaggaagtaacaacaagatcgacaagctccagaactagatattgacaaagaaccttcatcagaaaattaactcgcacaaatttaacaatgagttactactaaatgcgattcattcatagcatgcatgcctcacatagtctcaatgaagggcggcattaacagatcaggatcagggctacatagctagtcaattaccaagtagatataactgatacgaactgatagacacaaatagatacacaagtgctgcaactgcaagatattaggggcataaagataagctggaaacaacatagtttgctgatcagatagaaatcacggtagctgatactagctaatactacatactaatcgatccatagataatagagataggtaagggccagctgaatctatcattatcctgcagccaaagtcagtcttgtactccaccatctgtgatcacagcgagcgatagcaatttgggtcgttgaagtcgtcccagtcagcgcagacgacgtcgctccagtcgatagcggcccatccttccttgagctgagcctgcatttcggcctaatcggtgtagtagctctcgtccaccatgtagcagccattctcctcaacttcgcggcggacctcgtcctggaattcctcgaagctgtcctcgaactccttgcccatggcagccatctcctcatgcagctggcgctgctccggcgagagaagcgcccagtggacgtcgtcggggcagggggatggctccctcttccacgccaggatgaagtcgacctccgcctgcggcaagggctccttcacaagtggcttctcgctgtcttcacctgctgcagtaccactggaggccgccattgccgcatcggcaaacgttgctgcaaccgccgccttcgcagccgcgcctcctccccctcggtctccatgtgcttgatgcccatgccctgctgcttcaacgccaccgccatcggaatctgattcgccttgccggagatgtggaggacgtacgaatgagcaagatgaggcggcggcggccgatttataggggacgcaaatcctagtaggaatcgaactcggtctcgggatggctgttttttagtcggagtcggaatcgagtccggctcgatcggcctctctccgtaattgggccaggcctatcctcccgcggaatttaacccgtgggaataagttcatccgaggtcccttaacttgtcaaggaatctgattttcatgcttcaaccgtgagttcctcaattatcaaaaccagtgcaatataggtcccatgatagtttggactcggtcttcatctgacgtggcataagatgtaaaatttaacacttttaaaattataaaacaaaatatatgagttggtcaaataataaaattaataagacaaattttgctacaggacatcgtgaagcctacggacaccgcacgaagtgacttttggggaagacactctcaaaatatatggatatttgctggtggaaaccgcacgcattaaattaataatttccaggtggaaaggagagagaaatcgcgtgaaatatcgaaagtgcccttggacccacatgtcagctctgctattccccactctctcaggcggcagcaacatggaacggcgacggcgatgaggaacccgcggaccggcggcggcggcggcggcatgaggctcgggtgtcgctgcggcatccccgcacgcgttcctccttgctacggcctccactcgggtgacacggcgagcatccccgcgcgcgttcctcctcgtcgccgtcacaagcgaaggtggcgctgtggcgttccacaccttgctactgggatcccacactaggcgctggatcacgccggcctcactcaacacaggcgggagaagggggcggtggcagcggtgaagacgtgggtaatctcgtcgggcatattatttattaaaaaatgtgagacccacctgtcatactctcttcccctcttcctctctctcttctctctctcgcgggtctcgcggcggcaggtgttcggtgccgcgagacacggagcgggcggctgcggtgaactccagctgaggcggcggcggctacggctgcgtttgcactaatggataatctcgttactgataggcgatgatggcggagtcgcgtgcggcacggtcctgcgcgcgcggcagcctcgcgacggctgcggctgcatctgcgctgatggacagccttgtaactgatacttcctccattccaaaatataaggcataaccaccataacccaaagaccaagaaaataattattatcatcttatagtttggatcatcctaataaatacaatgcatgcatccaatagaattagagaacatgagagtggaggatttaaaaaagtaataatttaatggagaaggggtcatagttaatcgtctacatgcatgcatgccttatattatggaacatctaaagaagtggttgtgccttatattatggaatggaggaagtattaccgtttgtttttaaaaacaaaaataaaaggcgcctgatttgtcgataatgattacaaccaggcgcccgacgcgggggga

SEQ ID NO: 20102 - DNA, 2139 bp, Oryza sativa
gctccccccgcgcggccctcccccacacgcctgcatatatgctactgggccccaccatagtgcctgccccacctgcaattgcaacaaatcaaccacatattttgaaaaccctctattaaaggaatttggtttattttttgttccaccaaaaatgtttcacctagtgtactcacaatgttttactatgtatagatctaatattgcagtgaactgaaatattccattgcaacaaaaaacccacatattttggaaaccctctattaagggaattcgttttatttttttttcaccgaaaaatgtttcacctaatgtacacacaatgtttcactatgtatagatcaaatattgcagtgaactgaaacattctttcgctatttgctgaaacattgtttttatataaggtgaaacaacacccggtttaaacgagtgaaacattttcgatctacttagtgaaacaattccgatatacctggtggaacatcgtgcaacatttaaaaaaaattcaataataagctaatttttttttcgtcggaatatatccatgtgtggtcttgttttgaagatttaattgcaataaatttaatgttgcaatcagatcatgatttggataagtaatttaagataaaaataagtttaaagtagttttgcacgtaaatcgggtgctgacgtcatgctgacgtcagcgcacgattttttaaagatttttatcgggcgaccgatccctagtcatccccctgatttgtttaaaaataaaagacataagttagttcctgtttttcagttagcgttttcttgtgactaagatctcgctgatcgatcgtgggatggcgcggtcaagtgcgcgattttggtatgtgtttccgttttgtaacaaactcctagagttcggagtataaataagagatgagaaccgggaaaagctgctaagtcgttcgctgcaccaaaaaaccctgtgttttgctctgtttcagtttcgtcagagttcttcagttctctgtagctgttcgacaacctaaagaaacaacgagtttttcagtgaagtccaattagagagcaggtgagattcgagtgctaggttagccaattccaacatgcaccatggcgtgcgcgtcctccccggcaaacgtctccgacgtgttcgggcgtggcgggcttgtccttggccggcgccgtctgcgccgaccacccccgccccgcgtccgcactgcggcggcttcttgctccctcctcccgccacctgctgctgcttcgccggttgtctaggtcagagaggacggggaaaagcggcgaaggttgaggacgaggtgcgtgatgcgccgaggcggtcgttcttcgcgtggccggcgggcacgacgaggagaagaacgcgctgcagtccacggtcgcgtacgacgccgaggccgacgcatgggtgccgctcccggacatggcgacggagcgggacgaggccagggggctctgcgtcagtggcatgttcgtcgtcgtcgttgtcggcggagacggagctcgctcgggcagccacgacggcgccgcctctgccatgcacgccttgctcctcgccgccgcctccaccatgtacggcgtcggcgggcggcggcggcagcggcgtcaacacgccctccacggcatccgcccggcggcgcaaccacgaggatgaagacgacaacgatgacgagtagtccggcgaggggcgcgtcgtcgaggcctgggcaaggggcccggatgagtccgtctccgctgccgaccgtccgggtgagctccgcctccgccgtgcaggccttgcgtggttgcgccagcgagagagaaggtatgacatgtgggtcccaccattattgtaaaagaaaatgctgactgggttgtcacgcgtacaccacataggataaaactgccctggatttggtcgagggggtattttgtccggtataaaaagttcggggttagtgatatctgattttcgtgtccagggagtaattcggttgaccgcgatagttcgggaggtaattcgtactttttttcctaactattggagtaatactttttatgtcatattggtcccaacacaccataaatcatatttttgtcatttgaagtttatagagcgcacattgtgttttcttttttttttcactatttctatgg

SEQ ID NO: 20103 - DNA, 6987 bp, Oryza sativa
acctcgacatacttttttattagaccggagcaaatctcggagaaaaaagaactcaacggacaacgggagcccatatatgcttatcttttcattgaaagaaaatcatacggttatatgccctattcccgcacaatagacacatgtgctctctttgaagtccagcacaatggcgacgtatatgaatagtacgaatggaaggtatcgggtgcttaaatcactagatttcgttgcatacttgctctcttgctgccggacaaatatcacacagctgagcaaggagcaattgccaagacggaaattgttgttgtcagacatcatagagcgatggaaatctagtagctcatgaagagcatattgtccccagcaatgtgtgcacaagtgcacaacacttgggcatgcgcaacgtcggattgtatgtaccggttagacaaaggggttgccacatgccaaccagtattaatgtagcttttttccaataatgagatcagcattttcagtctgtttggtcctttgccattgtttgccttgccaattttgggcagtggcgagatttataatttaccaaaattttgggaaaggcgcttgttttagattattaattgcttccaaatttttattcaatgtctatgccaaacttaattagccaatttggtaatgataaagttttgctagaaatcaatggtagagagagtatacggcaatcccaaatgtatttgatatgatttagtttggctaagatccaaaaaatctcattccgtgtgacatcgtatagttgtcattgtcagtcatttgaccggttatgttctaactttagggtgtgtttagttctttggatataaagtttttgaaatatacggacacacatttgtagtattaaacgcagactaataacaaaacaaattacatattccgcctataaaccgcgtgtagcgcccgttccgtcgtggcgcctagtgggaaaactatctcttaaaaatcctaaatgcgaaaattgtttctttgtttgttgtctagtacccgtgccattccagatctcaaatccccaatccatcatcgaatccaaaccctaatctcaaatctgtcccaaatcaaatcctctcgaaaaagtctgttttgtctccctcgagttcatgggccgatctcttctccccggtccatttccctctcagcccatctctcctctcccctccatccttgcccgcacgtgcgaggcacgtgcgccgctcgggtgctgagcaagagagagggctcgctctctctttctcttctccctccctctctgctctcgctgccgcttcccgccgacgccgcccaaatcgccgcgccgttgcttcccgcgcgcgcgcgcgccgtggtggccgaccggccagtcgccgccgccgtcagtgcctgccgcgcctgagcccgcgcctgccgccctgtagccgcgcccttccaaaccgccccgccgtcatcaccgtcatcatcgacccggtcccgccactccacgcgcatgcttccaaggaatggaggcagagctcctcctccatctgcctcatcgctctctctccctctttcttttcccaaagaggcaaggggcaagccccctttcttccttcttttttcccttttatcttcctccgccggcgtcatgccctctgtcgcagttttggcctcgaccgccgagcgccaactcgctccttgaccaccctaggtcggtttccaaaccgacattgccctcctattaaaccaaggtgccctcccttcctttccctctcccattcgcctcgcaccaccgcgccattgctgtcccctctgtctttctatcgccaaccgccgccgtcgcgtgtgccggaggagccggtgcgcgctacgacgcggaaggggactccgggcactcgtcttcttcctcttccccggcccgaggccggagagatcactcccgtgccgtcggcctctcgtcacagcgccccgcctcgtctcggtagggcatccctccgttctccctcctcgctccatctcttccccttagctttgagtagcagctcgagtaataccccagtagctagttggcgccaccccaagccgcgccgccgctcgcagtaggctcgccgccgtcgccgcccgcgctcggtagtagccgcccgtcgccggccttcctcggcaatgaccagtccaatccgacgctagaaacggattcccggagtcgcgtagatgctctagctcgcccgaatcgatctcccgtcgcgccgtcgccgttttcccattctctcgccgccggttgctgccgccgcaatccgccgccgtcgagcctcctccggcgaatccgagcagttggctcgtctcccctcgtcccgtgcaacctcccggtgcgctcgcccttgcctgcatcgctgtagatcgccccgccgctcgccgccgccgtccgctgtctattccggccgacgtcgtcgtcttcctctcgtcggcccacgtggctgccacgaaggtgccacgtcggcgccacctcggccgcgaccgggtcaagctgaccccggtccgccgctcccctccgcctcgctcgcgcgcgcggtccaccgcgagccatgaggctgcacgtgggcccgctgcatccgcacccaccgcgagccgcacgcgtgcatcgcgccccgctccaaaccctagcgccacatcgcgtgctcctcgctcacggtgagccgagacgccgacaagcgggtccactcgggaccacgcgagttggacccggcccaccggctccctctctcctcccctcccgcgcgtgccttgggccgccttctcgggctggctggcctattcagcttggccgagccgcccctttctctcgggccgcgccctagccgcctgagggaagtttgtttcccctccctctttcattgctaattcaaaaagggtttaaataaatccttttcttttaatccaaaaatccaatgatcttagaaattcaatatcttttcaaccatacatccgtttgactccgttcaacttccaaaattcctcaaacctcgagatctatctaatggcatgcttagaggtcaataatagagctttaatttcgccgtttgttgagtcgtctcgttcgcgtgtagcttcggagcccgaagacccggagtgcgcggttttcgaggatcaagctcaagatctcgagtaaggcaagtcacctttgatcatcttgcacctataatttaaatctaagtatttctttttcgcaaatattgcataaataggattatcacgagtaattcggccacggcttgcgagatagcctgccggcccccaatcctaattgctacaattaccctccttgaattattgaacacttaaacctcctttgtcgaccgttgtgcttcgatgcacgggcctataggcacgcgcatcggaacacctcccctcaaatttaaaatatccaacgatgggtaaaacttgggttttacaaaagacttggaaaacccgacacctgggtcggtgcttgcgaactaaatgaatttccaaaatcgcagatcagggaatataccgggagtacggtttcctgctcttgcacttaaggaccgttttccttggaatttcatctgaacataaggcaagtgcgaccacatgggtggaatgggacgcccctggctgagtaattagctaatcggaggagccatgatgccaagagacatgtggattcaacggggtggtgccgggggaacccccgggcttcgtggcacagtatggtctgggacctaacctgatgtcggtctgggacccctctcgttggcatatggtgaacctgtgtcggctttcgaaatgccttgtcatgaaagcctcaaggtctccagtcgtggccgttctgcacgggctgggtgatccgggttagtaatgtcgtgtgggtaaagtgtaccccctctgcagaggttattaaactattcgaacagccgtgcccacggtcatgggcggacgtgaggtgactcctagcgtagttttgtttgactactgctttgtgaaactgctgttgtggaaagggttcgatgttgggaaaatctgcggctgatgggatcagctagggccgggtggctgtatgaaagccgttggccgggtgccaaccttgaatcaattaaaagactgatacattgcacatactccgaccggacgagacgcactgtcttatccgtgtcgtttgagaagcactcacttagttgtttcaaaaaggagtttaaataaaatcaattgcaaaaacaacagccttttctttgaagcctgcattaaacacttaattcccatggcttgctgagtactcatgtactcacccttgctttatataaataatcccccctagttgctgaagaagatgaagtggatcccgctgacgaggagttcttccaagagcaagtcggctacgatgagttttagggtttcggtttagttcccaagtcgcgcctgtgatgattggtccaagtcttggcttccgttttcccttttgtaatgcagttgtgagctcgggatctgtccgcagcccaacataactgtactcctactctgtaataaagaaacttctgttgctgtgatattctgtcttcctgtgataccagcactgtttcctaggactggtatcgattaacaggttaatttggagcgtcacgggctagttccgttcggggctagttcggggcgtgacaccgcgagacaaatttattaagcctaattaatatgtcattagcaaatatttactgcggcatcacattgttaaatcatggcgtaattaggctcaaaagattcgtctcgcaatttacatgcaaactgtgcaattggttttttcccacatttaatgccccatgcatgtgtccaaacatttgatatgacgtttttgttcaaaattttctaggatctaaacaaagccttagattatatagaaacttgcttccacctcacatattccagctctcctttttcaaacttaaaaattttgttactaactcaatattggtagtaggctagtagcacctgagatcctgggttcgactccccatgggagcgaattttccaggatttaacggcgttgtgctttcagtggtagccgacttacccgtcgacggtgagacgcctgtggtgacttcgtcaatttctctaggatttgccggcccagtcttcgaagatgctcataggggtagggtttgcgtgcgtgtgttcataggggtgagtgcgcgtgcgttgtgagtgtgtgttgtactgtgtaattctaaaatggggctaaaaaaacatatattttcacacacaaacctcagataagcatgagatgggcctagccttacaccgttacaatatgtacgtgcatgcatgaagcatgccatccgcaatataggtccatgaggccacacgccgtggtaatgttgcgttcaatttgcagcccactctgtcgcagttgacataaaggcccagagcctctttttttttttaagccaacaaaacatacatacacattataacagttgctagctagcctatcagaattgagaaatttcatgggtgtagttatatttatggcgccatatttttcatcaaaaaatagtcggcatgtatttacattgtaagtccctaaattacatatgtaattttagtgtatttacaatgtaagtcttaaaatttcatatgtaagtactaaaattacatatgtaaattcgaaaattacatactaattacatatgtaagtggggtgtaaatgaggtgtaactactgtgtaagtggctgaaagaaaattgactgtagcatatggcgtcatatttctagcaactccgaatttcatggtttgagaaattaagtacctcaaggtacataaattttatactaaaaaatttagtacaatgtagtagctaacaaaataaacatattaggatatacattagaaactatagtagctcttgatatcttcttaagaatggtaaaattacccatcaaatttggtagtactattgaaggtttgcatttttcaaagtactgtcagaatttaataagattgcaaacggtcgcacgcgtctacgatcagaacccggtgctaagaaacaaaatgagtatacatatacgaatacaagatcatgcggtggagtagatctagagacatggagtatatagttattaggatcgggagtcattgggagttcatcaaatctgcctcagcccatacacccttgcaggtcccattcatcctgaacaacgagtcccctctgttcctgcaccggcgaatcgcgtgatctccacggtggcaggcgatcggcatctgcagtggctcttgcgaccgttcgccttggaaggcgttcaaatgatgttccagaaggtgaggcttgatgtcagctatcaaaattgctcggttggtgtttccgcggttgtttcaggccatgcaccgaaattcgatcaaacactagcttgcacacatttttgtttttcaaatttgtatcataaaccggcactggacggccagatcacacgtgcatcactctttggcttccgcccttggtgaggtgagttttggagcaagcaagctagaccagtcaaggcttaacattgctctcctaaactacagataaagtttgggtctgaaagccaaaacttggttgaaacatcaacatgtgtaatataactgttcattcaaatctaacaagcttaagcctaaacaaagagggtcgtaatttatctcccgttttattctctttcttcacttctctcttctttatgttgatgtgaattttttagagtctgctgactaaacttattttacccgctctaacaaatccttctcatttaacagttcgggaaacgtgcgcatgaaaaatgaggtagtagaagataaaaaaaagggaagttccaaacacacagtaaagcaagatgtaatattcagcattcagcaattgttaagtcttccgacattttttagatgaaccgttgtgaaaacacaaagtggaacactaagcaaaaaagtggaaatcaactaggaaattttagcttagtcacaactag

SEQ ID NO: 20104 - DNA, 12132 bp, Oryza sativa
aacaagcaacaagccaaagtcaaggaggcctctaccgactaaagtcacatacaaacaaccaatcgtagagaggtagaagcctagaggatgaatccaatgggagataataggttataaacaatggcgaccatgcatatgaataattagaaatggaaggtatcaggacctcaaagcaacggacatcattgcattgccacactcttgttctcgtaactgtgccatctatgctgatcctttgtgtacccaggcatttagctagttaattagaggaggtgtgtcggaagtggccaacaaaatattgggatccataaataggagaaccgttggaagagtgggtgattttcagccccaattgtttttgatgatcctaattcaagattattggggttaaattttagatctctcttgcagatgctcttatctaaagtagtgaaaaaactaaactttttcaccaccagaatgcgccacatcatcgggaaaattatgtccgtcctatgtaccacacattcaatccctaacgttgcatctaaaagagatgtagtcaaaaggtggcttgggcttcgacccaaaatatgaagaggacaagaaaaatcgtactatgcctcgagcttacactatggaccatggccacaggcgacacttccttttcgctctccgattgagttgaggaggaagtgctgacgcagcccttgtcgctccaaatgtgggacgcatgccacgatgctcaccgctcaccgcacatgtcctccgcttccatgtcgaggccgccggtgcctcacatcgtgatctcgtccttctcgtctgcactgcctcctcggagacttagtcgatactttagccataagttcacaccacaggacgaagatgaggaaacattaattggagccccgtgccccctccgcggtcacctaatcctcatcaccggccgccactcccttctctcccgtcagatccgacgacgagttggccgcatcatgccctagctaccacggcagtacggcataagcttgagctcccgatgaacttgctgtgtcgggctgagtccatcagcctgtcctctcaagtttaatcgcgtgaggtgaggattatcttatcagagaaagggggtgaagagacagataatgtgagagggtgagcggtcaaaaagataacaaaagaaagaagctagccagtgagtcgtcatgtagttccgtgtctggctgttaccagcaagagttactgtggttagaaaatagtactacaatgcaacaggtgcgtctcactgagataattgatggcattatcccagtaacaggcatgatgtagtttgatcagcaaggacgctagccaatttaagtgctttctaataatgcattaattaaatacaaaataacactgatttttttactgagagtaaatttttgtaaacttgtaggaaaatatattgttgcagtgcaacaacatgattagaataacagaatataggaaatataaataaagaaagaagggagataagagggggaaaagagagagggtggtgatgtggtctctctgacatgtggagctcacgtgggtcccatgctgactcagccgtcacgtcggataaaactagggttaaaattaccaagggacataaagtgaatggttttgtaagttgagggatgtcttatatcttgttttgtggtaactcaatgacaaattgagggaccttcggtgtacttttttctattctaacctgacaatatatccttttcgatttagaaatgcagcccactctggatgcggcttccctgttcctgtgttatgttcccctccctgtccctgccagatgtcctctctctattggctactgcttttctagtggacccaggccatgcgctcgttttcttttttaacgtaaacgacgttaacatccaggatggctcgtttctgattggtgccgaggttgccgaccaatgttccacgctccaaatggtgagctgtgacatggaagcaacgcagccggagtggccgacgccgccggaggccgcggtgaccaagacagggtgtccagggcggcgctcatcatcttgagcaagtgcggtgacagcacggagagtggcagagatgcacccaccgccgctatggatccatgaagtaaaaaaaaatcctagcgcctaggaaatttcgaagacactcaatcccccaccgaacgcccgaacgccacgacttctccggcgagatcacttgctcatgtgattcttttagtttactagcacatatcatcttaaattcttaagtattaccagaaattgattgcaggaatggtcgaaccatgcctggctacccttgtctccttcatcgtcctctccaacaacgatatcctcctcatcaacaaatcaacaattaatggcctcaacttctgtgtgtcacccgcccgaggtcgggatggatgctatgggaggtcacattcttcaacgttagcttcaactccctcgctggcccgctcccaccggaggtgcccgggatgcagaaggtggagtagctcgatgtcgcgcacaaccacctcttgggcaccgtgctggaggccgtgcggcctccccctgctcaggaacttcacctctcctacaacttcactggtaagcagccgtcctgcacacgcatattgcccatcgatggcaatggtaagcactggaaattgccttgcctacccaattgccccacctagggcacgccgctgcagtgtaagggaattagggaaagaaaacggagattgctgctgtttgcttcaaaaagaaacggagaggttaagccgtttagatgaaaaaaaaaggagcgtaaggccctgggcccgctggaaaagcgatcgccaatagagcgaggacacctggcaggggacagagatagaaacacacagtcagaacaggaagccgcatccgcccactctgtcgcagtttgacatggagatggaggcccagaggccagagccatgcaagagatggcatttaccctgcttcagaagatcgccggcctcctcgccgccatcgccagcctgccgtcgcccgcgcgcgctcgtcgacagctacacgaccggtgccgcggccagcgacagggcgacaggatgcccgtgcgcgccgcgcgccgcggccgacgtcaccgacctggagctggaggcgcgcgatcgacctcgccgcgtacgacgtggtcttcctggcggcggccgcggggaaggttgagggcgccgtacgtggcgcacctgggatgggaaaccacatggcggctggtcgatagtggacgtggagcccgcgcgggccgggttcgacgtgctggccgtgtgccactacccccgacggcgcgacgcgcgcgatgaccaactccatcatcctcgcgcgcaaggcggcggacgatgagccacgacggaagaaaacagtcagtcgataaattgagggggtgttgatcccacctcaaaatttaaacacatgcatgaaatatttaatatagacttaaaaaaatagctaattgcacagattacgactaatttgtgagacgaatcttttaagcctaattgttccatgatttgacaatataatgctacagtaaatatttactaatgacggattaattaggcttaataaattcgtctcgcggtttactaattgattctataattagtttttttattagtgtctgaataccccaatcgataccctatataatacccgatgtagcatgtcaaaattttatatcctaggtctaaacacccccttattagtagagcattttgtataactcgatattgggctatggatgtggactggagcttcaattcaaccagggcgtgcttgactctactgtcacgtgctattcgattgcttcaactctctcttgacttggaaggacgtgtccaagtgataaaacgattggagcatatcaattttgctatttgctcaccaagatgcgtgaattccactttttttttcactctgataaggattcacctcaatgttttttttcaaaaaattttaaatactccattggatgagaggagttttgtaagaaaaggagggtattaattaatgaatgcaaaagtcatacaaaaatcatgtggtacaaaggaacccaaattcataacgttctttgttgctcttaatctataccatatgttgttggatctagcagttacaaattctttccgtaagaggcgacacctaaaatagcaaaacgcatgtagtaaccttttagataatgtgttgatcttaggttatatcggcccaatcatatgaaaaagctcataggagtagggagtgtattcatatgggtaagtttgtgtgcgtgtaggtgagcatctgtgttagtaccgtgtttcttaataaaaagattgcttcctccgtatttaaaatatatgggattgttgaatttatttagtcaaacttttaaaactttgataaatggaaaatatacaaatcatatgggtagatttttcttcataagtatttctacattattatataattatattagatattatcgttatttactaatggaaggatagttgtcaaagttgcagactaacatcagataaaatcaagagtattactttgataaatggaaaatatacaaatcatatgggtagatttttcttcataagtatttctacattattatataattatattagatattatcgttatttactaatgaaaggatagttgtcaaagttgcagactaaaatcagataaaatcaacagtactggaagtaaggtctcattttgacaaggaggtaacaaagggtggttattccagttggtgcacgcctaacttataccaaagtcaggcgtccatgtggacaaaaattgagtccatatatccagcgtgtactcttaggataagaatattgcctgttattagttaaagatgacagcctaagttcatatgtaattgttcagttcaaggaaaaacgtaatcagagtgaagatttatacgacagtagtatactatataggagtatgtacaaagaaacacgaggaaattttatttttagaaattaaaacatcaccaaacagtggtaccgataatatccaacaaaatgcaacatcattatccaaacaaaaagaagaaaaatgctataccaccatcttaaaataaaacaaaaatagcgaaacaaaacgaagtgctctagtctagtctagttctatggactaggaaagtatagatggacacggcgattcccatctccgtgtgctcgttttctccctccttttctcctactattcccatcccagtatcccacccattctctgttccgtacttccgttgcacccatggctcccacgaagcagaggagtcagccgcgcgcggccaggcgcgtcgcggacggcgacggcggcggaggtggaggtccaagaacccaccaagacaccgtgttcgcgccggcgacgacgaaccgagatcttccgcgccatcccggtgcgcgatcgatcgacggcgagcacgacacgtgaatacgtgaccctgccacggggggcgcgcgggcgagacgcctcctccgggaagctgagcgcggcggcgtcgtagccgcgcgcgtcctcggccgccgccccacttgcccccacagccgtcacctgaccccgcgctccgccgccgccgccgcatccggcgccaccactgatccctcgcttgcttcgccgggcgtgactacctcgcactgtacacgtaaaacatcggtagacgacacagcagctagccacgtacgtacgtgagcatccgttcgctagccgggagcaacgcgggagaggaaacggaggtacccgcgccgcggagacgaccccgaccagctcctcctccggcatgacgcggcggcacgaccaacgacggcgcgggcagagcggcgcaccgccgcccaacgtcgcgccacctccacgtccgtcgtcggcaatggcgcgcgtcagcgcagccacgatggccgccgggcccgtctccgccattgaactgctgtgtcccccagtgacaagcactagcacatgaccttgctgaggaaatgataggtgggcgggcgagtccaatttatagtggactttgtcagtgaagccgatgatctatctctatctggtcgggacgggggctcgatcggtgacgcgtggccaacgcgatatggaaaagaaggtagggaaattcgtgcagacacggtggcatccatgagtatggaaaaacatgggcagcgttcccatggaatggaacttccagaagctgctcgtcatttcccagctcggaagtcggggacggatggatttgtcacctcagtgcaattggcagggagtctttcagaagatatgatttttattagtggagcatatggaagcttcctaaatattttgtaggtgtgtcatatattgtctgagctttaataatatatttttggatctttaaatttattcaagatgacatataggtgcaaacctatttcaatccactccgtacaataacgtggcatattattgtgatgtcaaatatgttagtaggacctaaatatcagtcacataaaaaaataaaattcaaaacaagagaggagaaaatgatgttattatttttttaaaataaaactaaaagagagaggagagagagaagtaaaggacagttcttaaattgtttgtacatgactgccatgtaggttccacctatcaccacctgagcaccttcatagtataaccaagtcagccgtccacgtggataaaaattagggagtaatgtactcttatctgaagaactgattttgtaatgatggtcgaaatttatgaaattatccagttcaagaagaatctaaacagaatgaagatgtagacgacacgaggatatatgtacagagaaacacaagtaacttttatttagaaatatattaaaacatcaccaaacagtactaccgataatatcgaacaaaatgcagcagcattatccaagaagaacgaaaagaagaagaaaagaaaaggctacaccaccaacttaaaacaaaataaatactactatgccgaaaaaaaacgaaatgcgagtctaattcaagttctgtggactaggagtacccgggacgacgattcccatctctccagccctttttgtctcgcgcgctattccctcccgttctctgctccgttgcctccatggctcccaccaagcagagtcgtcgccgccgccgcgacggaccgcgatggcggctgcggcggtccgaaggtccacgaacccagaaagcgagcgttcgagatcgacggcggcgagcaggacatgtgatcgacatcgtgaccctgccacgggcgggacacctcctcggggaagttgagcttggcgcggcgcccgcggaagcgtagcgcggcggcgtcgtaggcgcgcgccgcgtcctcggcggtgcggaaggtgcccagccagacgcgcgccgcttcctcgggtccctgatctacgccggccacttgccccacgggcgccgcctaaaccacgtagtacctgcgcactgacaacagcaccgtcaccaccacccacaccgcggccacgcttgcctcgccggtgtgatctcccgctgtaaattaaaacatcgcagcacacaacacaacacaacacatcatcatcatccgttccgggtcgagcagcacaggatggagcaacaaacagaggtaccggagacgacgccgaccatctcctcctcccgcgcaacgtcgacgcgccgcccgccgcccgttcccgccagcggcggcaccaccaacgatggcgcgggcggcggcacgccggcgccgctgcctccacgcccgccgtcggcaatgacgcgcgtcagcgcagccacgatggccgccgtctccgcggcctcgaagagcgccgccattgccggcgaccgcatcgatcgatcaaggcgacgtcgagatcgaacgtgcacttgatcttgctgagggcatgatcgatacgtgggggagggaggcctatttatagtggagtttgtgagtgaggcgtgtgtatgatatggccaacgcgataaggaaaagaagcgtatgggcagcgtttccagttccatgcaatggaaggagaagaacttccagaagttgctcgacttttcccagcttggaaacggacggatcatgtatggcttcctgacctcactgcaattggccgggagtgctttcagaaagtgttttcgtgctgctttttcttattatttcacgacacctacgacatatttttaaattcctctaggtttaccggattattagtactacctccgtcccaaatatagatatttttaggatagtgacttatctcaatttctgcatctatcatcttctattgaccaatcataaccattcttcatttattttttttatttttttcctcaatcaatcataatatttctacaaccatcttttagtactttattaatacacgtgtccaccaaatactggcattttgggatggagaaagtagaatcgagtgacgttggtcaacgccttggtgatgttcgctccaagcagaagaggaaaagtatacaatttttcacgctcatgcttcctaaactggtaaatggtgtgttttttaaaaaaattctatagaaaaattgctttaaaatcatataaattaactatttaaatttataataattaatactcgattattcgtacgctaatggttcacctcgttccatagccttggccactcttaaggctgagtttgattctacgttttctcaatttctactctctcggattctgcacatacatttctcgaactaaatagtatgcttttttgcaaacaatttatatacaaaagttgtttaaaaataatactgctagaattttaagtgttttttttctaatacttaattaattatgtgttaataaatcgatcccttttacatgcatagatgattggaaaccaccacatttgttgaacacagcctaagttgttttttcgagggataggacaggaaaaaaatttcgaggcaattcctaagctaaccattggactctgagctttataattaattttcatgtactaaaaattttacattaaatttgttttctaagaaatcaaaatgaagtggtgataaattcagtagcaacttaactctaatttggtggtatcagggcaatgctcaatttcctactattgattgaaaattagagtttgcactagtgataaataaataaataaataaatatatatatatatatatatatatatatatatatatatatatatatatatatatatatatataattattataccacttaactaatattagttgactaaatctcggcaagacccaccacataccatgtcttatacagaaataacctttgggtatagaagaggttccagataaggaaagataaatagagttctacatgaaaacgacaaatattattcggattgtatccatattggtttccctaattctacttggaaaagggaacacctatgggtataaatacaagacccctaggaggagaggggggacggaacaatagatcaagacacaagatcaacatacaagccaacatgcgccaaaacaagacgccggatatcgaattcagagataagcatggctagtcccctccggtgtctacggatactgtcaggagagacatagcgctttctttaatctcgccggatgcggattcgaggaggaaggctaccctgttgtcgactacgagtcaacacttcagaccgccaagtcgacaacagttagataggctaccccaaatattgtattggtatgattatggtgaataagagcaacgaccggcttcggccaacaggagtagggttattacctgacaattcaggggcccgaacctgtataaaaatcctcgtccccatctcttttattataatctcgcatatatactagtaccaacgatccacatactatgcaaataccggaatcgcgacatcaaacgtcgacatatatatatatttgttactttggtcaaacgattaaatgcatactaagaaagtgtatatctaatgtccaacgagcactacggtacatggatgtatccggagaggactatgtgtaagagggagcgtcccatgtccgatggaagggaaaaaaaaatcaaaagctgctgcagtattagcaccatactaattattagcacatactaccccggttgtttttttttcttcccaagcgactagcaatcaggcgcttacgatattttggagaaatggaaacttctctccttcccacttttcctactaggtatgtagagctctaacatattagtctctctatgtcacgcgtctacacattgcatgcatgcaccaaagcatctctcactatctcttcctaaacacttttttacaaactttaaattattttttctcttaaattattgaatgtatttattatagttaaatatttataaaagatctcgcgtgactatattttggataaaaaatatgtctaaataattaggcattgtttaaccacgtttagaaagttgtttcatcatttgataaaaatatttttatttcactttataaaatactttagagagacgcaacatttaaaaatattgactgcaatatcatgaactactatatgaaacattaatccactatatagcattgagtcccaataatgaaacattcaaaaaaaacatttgaaacatgcaatatatttgtagcactttatattattgagaaacattgttaatcatgtatgaaacattaggttctaactgttgaaacatcataaaatacttgctgaaacatataaataaaatcatttgcaacacttaaaataatacattaagaaaagctaaatttattctttatcagaatataaccatgtgtggttttgtttaattacaataaatttaatggagcaaacggatcttagattacataagtaatttaagagaaaaaatagtttgaaatttatcaaagaggtggttatatatagggacaatatatagacagaagggagagaaggaatactgcacgctatagttgtagcgcttgggggcaacatgcagagagtgcatgcgcagcagtaattataatgaatacaatggcattattatattataaatcgaataataagtagtttaggtgaaaaattattttgagaattggtacaaagttgttttatcacttgggacagaggaagcggtcgtaacatgtattgacgcttgctgtattgggcatgcagatttttttttcttaggttggaggactgaggagaagacttctctgctatacactactgcaattttcaattctttttgacaagaaactagactagaaacacgtagagtgattccctttgagagaaacaaggttatgaactttctagatggataagatatattagaagtttagaacacctcgtcattgtaccacctttctatctagaaacttcgtggcggcactgcagctcatgttcagacggctttcaaatactgcagtataatacaaccctctgaaaagcaatggttgtcgtatatcagaaggatatttataggggtgtttggttcaatacctaaaataatcataaaaatatttggtttattacatggcaacaaaaatattttggcaagactagacaaaaattaactttgccaaaatcttaatatcaaacctaacgacaaactttgctaaaattttgtcacgtcccaaaacgaccctaaaatatatcctctaaatggtgcctagaataattaaaatccgtgtgaaagcctccaacaattaaaatgtgcaaagttaaaagtcaaacaaggcttagagggtttttgtatatttcctaaaagcctaaaatgcgtaaataaattttagtggaattttcagagtacaaataataattattaagaaataaacaaagttgaaaaggttttataaaaaaaaactctaaaaagtcccctttccctccctctccctctcgggccggctcggcccatctccctccccctccctctcctctccccgcggcccatccggcctctccccgtgcgcgcgccgctgacgggcgggcccgcccgccaccctcgctgacgggtggggcccacccgtcatccccttcctccggccgctcccgctgcctcgcccgcgccctagcgccaccgccgccgcgaatcccgccgcccccgtcctccccgtgtgcaatcaataggggggaattattccccgtgattccct

SEQ ID NO: 20105 - DNA, 3240 bp, Oryza sativa
ttcgggcgcaccgagcggctgccgcgtggggcccggccgtcagccgcccgcgccctcgggtgcggctgacgcgtggggcccacggcaccggccggtgtgagcccgggtgcacccggtccaccgtggaccgtgaggctgccgcgtgggccccactcccgtggacccggtccgcgcgccccctcccctcggctgacgcaataaaccctttttaaattaaaatttaaatgaagaaattcgcaaatattcatttaaagagcatataaacttcaaataaccataacttggccatttgaactcggaattggaccgttcaagtctctaatttttccttaagaagtcaagaacccatttttgtgctttgttcctgcttgttatatggagtttattagagtaaaagccttttcttttccgttggtcgtgtagacgctgcagcttcggaagatccgctcttcgtggaagttgaagccgacggttgggaaagcgagcaaggcaagtcacatcatccttgaacatattgaatcccagtttataaaattatgttgatttaaattattgcattatcgctttatttaaattcccgcgttatcactgttttatctagccatgcctatttacctttgttatgaccttattattgttattgttattatttccttgttcaccctagaataaacaaaaccccaactagtgggcactctactcatggtactactagtatgattttagttagatgcttcgccgcttaattaggcaacattaggtggttttacaactctagactttgggatattcatatcacctggacactatagaattgtcggattattgtggaattggattcacacctccccctctcttcaaaatcctcaaaatggttttaggctgggctcggggtgcatggttttgatagtagcacctcggccatataaggaccggtcttcgggcctctgttgcaaagcactaccgtacttccacatgtctagtgggtaaggcttagtttgtggctcagtctggttataaataaaagtacacggatggagatggacgaagtcgggggtcgatggacatctctaggacaaatgaaggctacacgagctgcggcccggtagtcgagatgtcatggcacagggccggtgtcctgctgctaggggctcagtcctgcctacctgtcccgggggttccggccgtaggtggggttgggtcggtactcttgtctatggctaggatgggttggaaactatgtcacgtcttccgtccgtataccgtggtggtatgcggcacgtggttacacgtgaggaagatgtgtcttgtgggtaaagatgtacacctctgatcagagtataatctattcgaatagccgcgccctcggttatgggcaagcctagcaatgtacccaagttagtgttttaattcttaaaacctgcttaacaactaaaatgtggaatggttggcctgggttggcttgggacgagctgggacccagggtcgggttgccagttcggtctgaatcatcgtaggccttgggttaaggcaggttcgtgtgggttcacggccttgattaataatatggtatagctctggaatcgtgtttacaaaatagctttgagcaactaagtgtcttttaatgctgtttacttcaaaccctaaccctttatattataacccccttgtactcccttgcatttatcttgcacttgtgggtgtgtcttgttgagtacggtggttgtactcagtcttgctcaatttttcccaaacccagaagaggagcccctggaagatgaaggctttggtgtctagctcgtgcctgccgtcaagcgcctgtggtcgtcgccctagtcttccgctgtttctcgtttgtctttgtgtgtgctgggccttcgccgcccatgtaataaattaactatttacgcttccgcttgataaactctgaaatgtatcaacttttggtgtaccttacctcctggaacaaggaataatacacgcacgtaaggaacgcctgttgggttaattccggtcgtgacaaattttgacattataaatttttagcttgtcaataaagttaagcatggctacaatccaggtccatacttgagtagtacactacagtatcgtcacgactgaatttctagaaataaaatatacttcaacctcttgtggggcatctagaaagttcattaatgtcgccttccctccatgagaacacaccattccttgtatttatataggttccatgtattcttgatttggtttctggttagacttaaaaacgtttgtgttatcagttatcctcatcaaactaagcagtggcattgcttcattgtatccggagatatactgctaaaaatatgctagtagattggagaatacttcggattgaacgcctgatctgaatgaaaagatatcaggcgccctcccccacactcccggctgctacgggtgacctagatgctttgtatagtgctaatgcatgatgctcgatatattaacaatgtacatatgtactaattaatcatttttttatcttaaatcgtttatcctatcaacgatccgattacactagtgtattcctcacaattaaacatttacaacaagatctcacacgtttatattttgatgaaaaaaattgaacgttgtttcaccacatatagaaaataattgatcacttggtcaggtttttcaattcactgtataaaatatatcagagagatgcaacatttctcaaatactaactgcaacaccagcaaacattgtatgaaacattaagtttcaacgagtaaacacatggaaaaaacatataaaagatacaatatatcccaaaaactttatattgttaaaacatttttatatcatgttcgaaacattaagttttaaaatacttactgaaagattcctagtataccacatgtaacatttgcaaaataattagtgtagcatcatataaatattagttgaaacttttaacaaaaaccatgtgtatatttaaaaatatgcataaaaagctaaacaaaaacattgaaataaaaccatgtgtggtctgattgtaaagatttaattacaataaatttaatggtacaattggattattagttggagaagtaatttaagagaaaaagtagtttgaaatttgctaaaaaaaagacttaaaccaacttgtaactatcacggtttattcttgtacgttatgcgtgcatgtagactttgattatcagctgcatgcagcttacctagtcagctgcatgt

SEQ ID NO: 20106 - DNA, 7294 bp, Oryza sativa
ttagctgccttgttttcagtgaaccatgtcatataggagcactgccctgattgtgatttttaaaggcagcgccaccattcaagtaacatggcaacaacaacattctaaaaattcacatgagatgcacccgcgacaggttcccagtggatgcatgatgtattcgagagatgcactcacgacaggctctagtggatttatgatgtactcgttagcctgattctagttggaatagtgatgaatcaacggggctatttggtacagctccaactcctaaatattacttcaggagttgagtctggagtggagttgttgagctatctaaacccagctccacaactctagtatattttgtgagatagctccatccaactccactcccaattttggtggagctaaaactgtttggctgagctccagctccaggaggggtggagctggagctgtagctgtgccaaacaggcccaacatattaatccctagtatataatagcgcaataaatataaaagtgaagaatatactacaacctacttgtctatctgatcttcttttcctctctctccacacccttattttaattaactaactgatgccatgtgatgtcatgtaagtaaaaaagcactcctcatttaagctcgggaattaaatatatatggatggtaaccaattgtaactagtttatatttttgttttgttgcgggtaaccagtttttatagttagtggactaaaatcgaaggaccatagtcgacggatcaaatatgtacttttccaaaaaaaaaaatgtccggagaactgttaattgctgagatgcggaatattgcatcttgcttccttaatgatgtactgatacaagcaacttgatcatatgttagacatgaaaaattctagcaagtttcaaatatgataagcacaagttgagtggaaccaatacaatggagggctttttctcagaggatatgcatggataggaaggagatcctctggcgtagaggcttatatgttagagggacgtccaactttggatcgccgtttgtagcgcattcgactgcccataagtgcaacaaacagctacagcatgctcggtttctacccattcacagccgccgctcgtcatgttttcatctctcgctggtggaggacaatgtaagggtgaaaacgatcggaaacggtcggaatcgatagcatccctatggaaacgatcctcgatcggccggtaattgatcatatttatcattaaactcctcagtatcgacattaatatgatgaaaaaaattagaaaaaacaaaataaaaaatagctaaaaacggtacgatcggaaacggtaccctttaaatgaaaagggcgcccagtcgatggggaatcgccgaaggcacgggccgatcgacgggcggcatgcatgcgtttgccacccgctggcgcgtcgaacgctgttgttgatccgtgcggcgctcgctcactcgatcgggcgccggaatagacgggagggcacgtacggcagatcctagccgcccaatgcgatcggatttggtcattgccgcgtcatacgggccctataatcgagtggcgcatgacaaccaattaagatggcaagatgcaccccctttcatcactcttaacaatcaccattcaagtggcatatgttcaatcttattgagtttaacaaaaaagacacgctttgacgactatgcctggctagatgacccccataagataaaataacgacgactatccaaaataactgccacaaatccaaacagttgacatccacgtcaaaccggtgctgccctccctactactgtttgaaccataatcatctatacttaccatattttttttaagttcgcacatttagaagtttgaagaaacgtgtgcatgaaaatcgatagagtaaaagttaagaagatagtatagatcacaccctaaaagattatgtaccatgtaaactagcgaattaattttcgaactcaattttacatggagctagatttttttttgacattaacatatataatctttagattatacgcgcgcgcacacacaagtagttcttataaaacatatcttcaaagtataaatgaaattggtatatatatcttaattttctttcttcataaatagaatcatattattctttttttacccgttgcaacgcacgggtatttttctagtagagataaaaatttggaagcaatccaaacaaagcacctttgcaaaatttttggtaacatctaaatctcgctaataactgcacaaaataggcaaggcaaacaatattggcataaaaccaaacaaactgaatttgctgatctgcagccacaagcccaaacatcgcccactgcgcacgttactgcgacaacccgcatgctctccatgagatactgaacttccattacttgctcttgttcaaccgtgtggtattttgccatcatttgctttcagcgcctctccgctaactagcgggaccaacgattctatggctcgtctcctagcacgcgccatcgtgaaaagagcaagaggtgccgggttgtattatgaaacggtgctttcagtttcagctcccaataccttccatccctatactatttgtatgcatatcgccattgtgatcagggcgcctgtaatactctaacatatcggattgattgtcgatcaagatgctccatttcctcgtctatctctctctagtttctatatatgatcagctgtttgcgcgggtctctgagttctaattacacgaaggagagagatgcctatacatcgtttggctcgttgcttattaaggccattatgtgttctagtactaccgcttgcagtggtgtaaatatttatgcaacattcaagggtagctagctagctgggccgggcttccctccgccctatacaaaaagttaaactagaacatgatgtgatgatttctagcacgatgaatctgaatcgtagaaaacatcacatctgttctaggttggttttttatgggacggagagaatattttgcaacaatcgtgcatataaccgaatatctttctttatgtgaacagataagcatatatatggttcttctgttgtgtactaattcttttactatatatatatatagtgaatttctatgcaaaaatcatttttaaaaaacagagagaccaacatttaagacagggacaattttgtatttttcaagaaacatgccattccaaaggttgttgtgtaatgccagatatatatttaagagtagtgagcgtgtgggagctgatgatggaaatagcaaagcaaacccaatatatgtggcataaacttaaagtgacaaaatgtgatttacaatacgtctttcggagttgacaccaatatgacgcaaaattcataatggcaataacatcctactgttgaatgggctttacttcaagcttgggcatgatcgccaaactatttagctttgtcaaacagcttttttgcacatgttagatacacaaagtaaccagctggtcctggttcaatctagctagtcactgctacgaagaaaggtttttcgtggtgactaaaatcagtcctttctagtagttagactaaccgtctgcaactaacggtcaatgaaaatctaaggtcttcacaagcgagacttcaaccgctagtgacaattgattttcactggcggttgtgtcacgcgagccaccagtgataattcatttttcatatggctgtgttaagctggccgtcagggataatcgatttcacggcaaaaaaatattgaaaataccccatgcagctgccctctagctgcgagcaaaaatgaaaatgcctacataatgttgcccagcattcccaaatccatatccccaaatcccaaattcacatcaacgagcacaagttccacaaaaatggtttgattatgatcatagagcatggagcacaaatattccactaattcacatcacagtatacaaattccacatcatagattgatcacaaaactttcacatcacatcatagagcacgaggtcaggatggattcgtgctcccgaaggaggcgtggatggccggtgctggatctgatccccgcgccgctgccgcccccttcgccgcgtcgctcccgaggcccgcgggggtagatccactttcccgaggctcgtcagcaccggatccgctccttgtcaccccctttcccgtgcagctcacaaggcccgctggcgccggatccccacctcgctgccccgtgtcctgcggctctaccgtcaagaaccatcgatgcccctttccctgctttgttgccgctgcctccttccttgcgccgctgagccctttccgcgctgccgctctctcccttcccacccgcgagctgcagtagtagcgccctccccactcgtgagattcggcggtgtcctccccatccgcgagcatcaacggtgctggcgctggcaccatatataaccatatccaatgggctcgagctcaaggactgcatccggcaccacgctcgtcgccggagaagctccatccctcctctttctctgtattcactgtgttgttggatgttgatacatgaatgttaaaatgtgttcttggatgttaaatcaaaataaggggcaatggggtgatggaatctggtcggggtgaaggggagctactcgattcatcggctcgacttgagctgaccattctttttttctattactgatattttaaatgtgttggttcctaaacgggtatctttgagcccttctcaaaggggccgcttgctaggtgtcagttagaaaaatccggctcctatgtccgattaccaaccggcaacactcaacttttgtagtagtgcaaagaggtgtggtaaattgtggctcgctgcctatggaaaccacagaacacatttgaaaaaaacatactggtggcctggtgcaaagcttgcctctagatagacacggcaccgccacggatgcgtagagacacagcgatgagatgatactcacgtgtgacaatagatcgatcgatcaagagttcgccttgcaattacgtcaaaatccgcgctagctagaggccgtgtttagttccaaagttttttttcaaacttccagctttttcatcacatcaaaacttttctacacataaacttccaacttttccgtcacatcgttccaatttcaaccaaacattcaattttggtgtgaactaaacacagccagagctaaccagctgccccgattgccgcgatctcatcagggaacagcgccttgtcgctctcttgtatgttgtgtgatcaactcctataattggcagtgcatgtcggtgcaatcactctacctcctctattcaacgtgcaccgtgttcacgcgctcagtttacttatagcctcgctgcatcggtgctgcattctcctgattactcaatcctagctacatttatatataccggagtcgtggacacaaccgttactccaattagtacgcactcattcattttgcctctgatcaccttgttcgattatatttgtcgctgcagtttaacaagctagcccggcatgcccatgatggcacgattttgctgttgcttttaattaacaccaaaatagtctttgcttccactggcttcatcacctttaacaaagactccactgttttgtgattgaaccaacttgtctcggtccctggtgttaaatctccatccattaatcatataacttgtgtaatgggttactcgagcatcaggacctcttgctagagcaaacaactcttctgatgtatctggagatcctttggaatgtttctcaaatatctggaagaatgtttatacaggttacaaatagttgtaaaatctaaaaaaaaatacttttattatggcgtgtacatacatgattcttgaaccatacaaaaaattctttgtcatggcacttttccacacctttactgttctggatgctaagttggtctttgtgaatgctgcaagacatgtacatgtatgttaaattttgacagcatttacatattagaaaatgagagtaagtagtagttgtttactctgcgtattctgatatttcttcacaattctttagaacatatatccgagctttctccaactcattcatatccatctggcagtatttgttaccaaggagtggcctgccaatagtaccaaatatctgaaattttgtactgctgttgtcactctgcacgtcctcgtttcgacttggttgattgattcttgtttcaactccttgcaggtacatagaacaaaaatttacacattcttgcaaaatatatgcctcagctatcgatccttcagggcgagctttgttttttacaaaagacttcaaccttcgcaaaaacctttcaatgggatacatccaccgatactggacaggtccaccagtaatagcttcctgggctaaatggattggtagatgcaacattacatcaaagaatgaaggggggaaaatcatctctaacttacagagggtaacagcaattgatgatgcaagcttcttgagaatttcagtatctaatttcttggaacaaatttctctaaaaaagctacatagctcaattatagcctcacaaacatcagcaggcagaactccacgaatagaaagtggaaggtatctgtgtaaaaatacatgacaatcatgacactacatccctgatattttagcttttgttgcatccacatagtgtgaaatttttgaagagtatccatctggcacttttatttctctaaggaactcacaaaatgctttcttctcagctagtgtcattgtatagcatgcaggatgaaataagaacttcccatcaccagttggaggtgcatgaagttcaggctgtattttcatgagttccaaatcaaaccgggatttaatattgtcctttgtcttcccatctagatttaacaaggtacccacaatactatcgcaaacattcttttcaatgtgcatgacatctagattatgtcttatcgataacgtactccaatatggcagctggaaaaatatactttttttcttccaaactccatacaatgtgcttgagcgttttctcttattgttatgtttcccaaatttaacctgaatgcataaagtgatgtcaacaataatatactactcatattcttatactctataatgtaataccaaataaggcatagaatagcaaatagtataataatttactttcagatataccagataggatacaagcataaatatatcataattagtagagtacctgattgaaattttgatattgacgcataatgtcatctcctgacaacgcttttggggcgctacgtctttccttttggccatcagaagattttgcattgct

SEQ ID NO: 20107 - DNA, 1431 bp, Oryza sativa
tgtaccatggaacatacgattggtagaaacagaagcagggcctggagaaatggagatgacaagcaaactgcaaaaataaccatttcaaatgtgctatcgatggtgttttttctatatatttcctgaaacaatcatccaaccgtttttgcttcactggtggagaaaccatctttcgtcggtcggctgaattccacaatagtctcggatgcaataaaaaccagggctaaagataatctttagtcccggttaaaaagggtaacggcatatttgatctttagtcccggtagatcatctttagtcccggttcaaatgctgtcagggcctgtcaggcccccaccaaccgggactaaagatcgtaactttagtcccggttggtaataccaaccgggactaaggatctcggggatctttagccctggttggtaacaccaaccgggactaaagtctcacccctatatatatgtcttcttcctcgtccagctgcccgagcaaacttcaaaatttcttcaaaaaagaggggaggtcatgccaaaatttctagtgaatttattttggtgattacatacaaatcggaggtgcctaaaaggtttgcaacttcatcctccaatgttttttttgtcatattacatttgcagctatgttttgcacacttttttgtctccaaaatttagttgtaagttgatgagagagaaaatttgtgtggggaagaaataatatatagaaatttagttgatttgctaaagaaggttttataaaatagttgagaaagaaaatatagtgaaagttaatcttaaataatagaaaacaaactaaaatgaaaattaaaagaagtaaaacacattaaaatttgtttaaaactttagaaatagtaaataagaattatttggtgtaatattttatgatttttgtatgaataaagatatgtcattattgtataactgttgaaagagtttgtaattatcttataattattgtatgactgtcattattgtaagaataattatttgtgtacgattttttttcgactcatgtagatggatcggcaatggatgtacgctgaccggcggtccaaagagtttattgacggcgcgcactattttttgagagtggccgaagctaacaggcaaaggggttttatttgttgtccatgcaataagtgtaagaatcagaaggagtattctgcatccaggactattcatttccacttgtttgagtcggggttcaggccaagctataattgttggacatcccacggagagcaaggtgttgaaatggaagaagatgaagtggaagacgacaatattccggactttgctcagtacgttggatttggaggaaatcaaacgggcgaggaggaaaggatgcggatggtaacgacgttgcggatgatcttggtcagatgttataggacgccaaggaggactgcgaaag

SEQ ID NO: 20108 - DNA, 2901 bp, Oryza sativa
cggtgaggagtacgagaacctagaagcatgccctgtttgcaaagcactacgatacaagattagacgagacgatccaagagaagttgacggtcagctaacaaagaagagaattcctgctaaggtgatgtggtatttccctataataccacggctaaggcgtttgttcaggaacaaggggaatgctagaatgatgcgatggcacgctgaagagcgtcaacaggacgggatgctgagacaccccgccgatggttcgcagtggcgaaacatcgacagaaaatttaaagaatttggaaaggacgcacgaaacatacggtttggtttgagtacggatggcatgaatccttttggagagatgagcagcggccatagcacttggcccgttacgatgtgtatctacaacctccccctggctatgcatgaagaggaagtacataatgatgccgattattattcaaggccccaagcaacccggtaacgacatcgatgtgtacctaagaccactggtcgaagatcttaaactgttgtggaagaaggaaggtgtccccgtgtgggacgaggacaaacaggaggagtttaacttacgagcgctgctgttcgtaaccatcaacgattggcctgcacttagcaacctatccggacagtccaacaaggtgtacaaggcttgcactcactgtatggatgaaacagaaagtacgtatcttaagcactgtaggaaggttgtatacatgggtcatcatcgattccttgcagcaaaccacccggtacggaagaaaggcaagcacttcgaacataaggttgaccaccgtacgaagcctaaacatcgcagcgggaaaacagtgtttgctatggttaaagatcttaaagtagtgttcggaaaggggcctggaagccagcctatagagagcgaagatggtcacacggcgatgtggaaaaagaactctatattttgggagttaccctattgggaattcttgaacgtccgccacgcaatcgacgtgatgcacctcactaagaacctttgcgtaaacattcttggcttcctaggtgtatacggaaagtcgaaagatacactggaagcacgtaatgatctgaagcatatgaaacaacgcggcgaccttcacccggaaccaaaggagaaaggaagccattacttgcgtccagccagctacactcttagcaaggcagagaagaaaagtatgtttgaatgcttggagagcatagaggtaccgtctggatactccaccaatatcaagcgaataataagcacgaaggagaagaagttcacaaatctaaagtctcatgactgtcacgtgttgatgacacaactgctaccagttgtaataaggggtatccttccagacaatgtccgggcaacaataacaaagctatgtgcattcatgaacgcaatttcgcagaaggtcatcgatccggatagattagaagcccttcagaatgatgtggtgcaatgtctcgtcagttttgagttgatatttccaccttcatttttcaatataatgacacatctgctttgtcaccttgtcaaagagatcagtattctcgggcctgtgtacctacacaacatgtttcctttcgagaggtacatgggcgttctgaagaagtatgtttgtaaccgtgctcatccagagacaagcatcgccaagggatatggaacagaggaggtcatcgaattttccgtagaatttatcgaagaccatcgcccaatcggggtacctgaatcacgccatgaagggagactacgggaaaagggaactctcggaaggaaagcaataatgacggtagacaacaatttattccgtaaagcccatttcacggttctgcaacaatcttcattggtagctccttacattgaggagcacttggctctagttcacgccaggaacatcggtaagtccgatgcatggattacacggcatcacattgatactttccccgcatggctacgataacatctcatgggtaacgagtcgatcaaccaacaacttgccttcctggcgaggggaccgtctgggtcgatcgcgacattccagggatatgagatcaatgggtacacattctacacgagagccaaaacagtgctgttcgtgtcgatgccatgggacacgatggaacaactggcacgtattacggtgccatcgaggacatatgggaacttgactatggtcctctcaaggtccctctgttccggtgccaatgggttaggttgactggtggaggcgtaatgattgatgacagtgggatgacaacggttgaccttaacaaggttggatactcggacgaaccttttgtcgttgcgaatgatgtaacgcaagtcttttacgtgaaggacatgtctagcaaaggaaagaagggcagagggcctgacgagcctaagcgtcacgtggttctcccaggcaaaagaaaaatcgtcggagttgaggacaagacaacaataatttttcgaagtaattgtcattaatctttgtactttaaataattttaatgcattattttctattttagaagcacatatgtaatggaaaataatattcagtgcgcttatcagtagtcccagttcttaaccctaaccgggtttaaaaagaatttggaaatagcgggaaaatatctttactcccggttgatgagaataaccggaagtaaagaaaagaaaatatcttttctttagtcccggttgttctcaacaaccgggagtaaagatatctttactcccggttattctcatcaaccaggactaaagatctaggggtatatatattcccatgcgcgccctcatcttctacaccaacacttagaagtttttgcccgatcgatctctctcggctcctccttcgccgccattgcctacggcatccccgcgccgacgccgccgccgtatctcgccgt

SEQ ID NO: 20109 - DNA, 17014 bp, Oryza sativa
cgtgtacgagaattaaacgtgaaagaacgaacaaacgtgaacgaacgagcgtgaacgaacgtcaacgaacgtgaacgtgaacgaacgtgaactaatgaacgtgaacgtgaacgaacgtgaacgtgaaatgcaatataggcaggtgaatgaacgtgaacgaacgaacgtaggtgaatgaaacatgaccttaacgagaacacgaacgtgaacgaccgtgaacaaaacgtgaacgtcaaatgcaatatattttacttcgcgtttatcctaatacatctttttgtatcttgcagaaaagacgttgtcggagtcgtccctcaagccggagtggtagctagccctcgaaggaattcgcgcaggcaagtgacataattatatatatgattgttatatttgtaatgcaattaagactattagatttaatatacgacacttagacttagcatatatcactatttgagtttcagtataagattattagatttgtaattagactttgcatataagattgtgtagggttctaatatacgacagttacacttagcatacatgactatttgagttttagtataagattatttgagttttaatataagattattatatttgtaattagacttagtatataattattgactagctagggtcctataatatatgtctcctagacttagcatttatcactatttgagttttagtataagattatttgagttttaatataagattattatatttgtaattatacttagtatataattattgactagctagggtcctataatatacgtcacctaaacttagcatttatcactatttgagttttaatataagattattagatttgtaattagacttactatataatttattgactagctagggtcctataatatacgtcacctagacttagcatatgattgttagcatataagattgttaaaacataaatgtctcatgacttagcagatgtttcctgtatgaacagatggctgattgtgatgaggaacatatattgtacgatacaatcgcggagggaagcagccagtactggaacgaagaagaggggaacgaggatccaaaccagtatttgaacgaggaagggaacgtggagagggatgcggaggggaaccaggaggggcacgtgaaaagggatgtggaggggaaccaggaggaggaggctagtggaagtcaaccctccgttggacagaagagggcacgcgggcaacgaggtgccgcgaagaagcttgagggtcggcacatcataacggaagtgaatgaagacggccgacctagtgccccggcagaagccgccaagaactatgtacgtcacagcggttgggttgtgcgggataacgtgcctgtcagtacggtgtactggcgcagaacaagggcacgcggagatcatgagagctttgtcccagattcggagaaagagatgctgtggactacaatgctcgagacattcacccttcccgcgggtacagaggacaaagtgaaaaggtggactctgaagaaaatggcagaacagtttcagagcttcaagggagatctgtaccagaaatatatcctgaaggggcagacaccgaacttcgacacattcccaaagctaagggatcactgggacgagtttgttgcatataagacaggtgaacaagggcaggcgatgatggaaagaaacaaagaaaatgccgccaagaagaagtaccatcaccacttggggtcaggcggctataccgtcgcgatgcctaagtgggaggagatggaggctagcttgcttgagaggggtatcgaaccggccaccagtaattggccggaacgatcgaagttctggtactatgctcacggtggaacgctcaacccagctgatggctccctggtcttcggtgatcagatacgcgaggctgcgcatcgactaacagacgcagtggaagcctcttctcagggcacgttccgaccggacagagagaagaacgagttgtcactcgccctgcagactccagagcatccaggacgaacacgagggaaaggggtgattccttggaagattgggttcaaggagggcatccacacgtacaggagtcagatgaggagcaagagagataccgaggcgaagattgcagatctagagttcagggtatcgagctacaagctcagcatgcaagaggaggtggcaaggaaggttgatgaacgcatggccgcacatcggtcccatgatcccaagctgaccattcctcctgcaatggtgagcccgtcaggaaaccatagcagctgcgcctcaacggggcaggtaggatcatagagcatggacgccatgcaaacccaggacgaatccacctgccccgttgatgacatcactcagcgaacaccatgtgagctgcatattcctttcaagaacttatcaataaaggtaagctcgtagtttatagattttagattttgccattccgctagttgctgcttatatatgttgattactaataaataacctctcacgacatgaaggtggcgtcgggcatggccatcccaacggacccttcaggtacttaccactgcaggccgattccagcaggatactccaaggtcgaagttaagttggtcgaaggtgcgtacgaggacctcgagctggattaccctggaggagatggtgagacgcatctacgagacacaagtcacgccattattctatggcgcaagcggtacatcatcctccctgggcgacaagcggcgtctcgtgcaccatctcctccggcttcgccatctcctcctcaggctcctccaccgtctcctcctcatgctccagcaccgtctccaccttaggctcctgcaccgactcctcctcaggctcctgcaccgactcctcctcaggctcctacaccaactcctccgcaagctcctcttccggcaccttccaagtcaagggccccccaagctccaccgcctgcccccacaagggcaacgaagaaggcgaaagttgacgccaccaagaacaaggacccggggtacgattgcacgcaagaggagcttgaagcttacgtggcatcagaagtcaagagacaattcaagcctcgaagtccagaaaagaagattcctatagacccgagtgtcaggaacttcttcaggggtatgtctgcacctgccaaggaggccataaagctatcggactatgagcgaacgctcaagaaagcatcttctggaaagtccaaaccagtccctcagcttggagagcaaccaaaccaggagatcgagccgttggtgaccggtaaagattttggaatacaagaatttattaatgacaccgggctaactacggatcaattgctaggagacgcaccaatcgaaaaggcggaagtgaaatacatgtacgaactcggtaaaccgcttgtcaagcctgagctgctgcagtccctacccacacaaatatacaagttccatcagctgtacatggagatgagcgccaccggtagagagatgatcggagcgagggtcagggacacggacttcttgcaaggagatgacattctctagatcaatttcaagggaatctacgaaatataccagctggacgccctcgacgtctctattatgagttgctggattttgtaagtatatcgttcagttagatttcttactacgtctcctttaagtaattaggtccttttatataagtagactatatataatatatactcccttttatcgttatagaatggagattcaaagggctcaacggcggggggttttcgatactggattcatcgaccctcggaaagtaaacgtcgcaatgctcgaccaatatccgcaagccacagaggacaatctcgtccatctcctgaaggcgcagcattacaagacgttcatactgttgccgtacaacacagagttagtttaattttactgtcttcctataccaaatttcattctcgtacgaacttgctaagtgtttcatatgtaatgcatcccacgcactttgcagattccactgggtgcttttactcttcgacctggaggcctgcaccgtcaacgtatatgactcaatggataaaaaagagtctacgtttgacaaggttttcgaacttatagacacgtactgtcataagttcctatgttaattaagaaaatcttgttatattaattgctactacgaatcatagctttaaactccatgtagggcttggtatcggttccgtcatttggtccgcggcaactggagagaaagacttaggcggaagttcaaattttctgtgagtacacatgctctatatttatatttctccgattcaaatacatacaagtgtatattaattagatctctcatcgtttgtcatttatttatagtgcgcaaagcaaaagcagggaactaactagtgtagctactacgtgtgcgagtattgccactgccttgcagaccaaatcatcaccacaagagagctcgatgtacgtataaataaattcaaaatttcattacgtatcgatttgttgttaaattactaatcaatttcatacattcatatagtttattcgcatgagggataacctgatcacacacaaggaatttatcgcggcggttcaagaacatctcataggattcatcaacgaacaaatccttgatcccaagggtgaattctactacgacggaaacacaattcataggtccttagtttctaagctagcgactactactacgtcgaaatcgtagctagctaggacatataatggattgtaattaatacatgactatgtttctatatgcatgtgtacacattttctataatgtaaatatatattttggtcatatatatatataatgcataacatatatatgtataaatacatatatattatgcatgtacatatgtattgaaacatatataaatataatattatatatatatatatatgcatatattattgacggagctggtggctcctcaccgggagaccgcgcaggcccccctttgccagttcggccgggggcttagggtgaaatctcaagctctcgctctctctctgtatgtggaaatatcgtccgccagccagaaacacgagacaccggcgatctatacaggttcgggccgctgagaagcgtaataccctactcctgtgttttggtggatctgtgtatgaatgggctacaagtgtgagctgacttctcccccgttctaagctcacaatctggaaaagaatcaagaaaaaaccccttctctatgggcaaggtcctccttttatacttcaaggggataccacacgcacccttctctttccaaactggactgttctttttctcttgaacgggcggagatcagcacggttgctgtccgaatgacgctccgatgggacagcccacgcctacctccacttccgccgggggtgagcgcgtcgtgggagcatggctgtgcgctgacgatatgatcagtgtcagaccggtcacaaatcggtcattcttgtccaccgcgtgtaatcttggcaacgtgcatgtttgcccttcttcactcaacatctcgcctgtaatggttaggatgaagcctggcatatatcgtccggggctaacgtgtcatctctaatagataacgcgcctaactccggcttgagacgagtgcctagaggctttcgtcttgacgggacggggcaaggcgtgcgtcagaccgccagtcgccacctaacccgtgatctgaccggtctgtgactggtcacagaccggataaaggaacgcgccatactgcgctgcatgcagcgtgacacgcttgaccagactgcaataaatgctgttaggtgagcacagctgtgctcacttatcccatatatgtcgcgcagacttccttaaggggtcggggtgcctcggccctcggggccggggcaagcgcaacccgaccccccctcgggggaaatcaggaggagggcggacacctcaccctcgggcccgacgtccccgaaggtgccaggccacgtgggcggttgcgtctgcctcaagcctctggtcatgatactcccggtcccatatcaccgacagtagcccccggcgttatgccagagcaatttcccttcccaagggaagcggtcaggtgtgacgccaccctgtgacaggtgggaccggtttccgtagttgggcaaaatacccaacggtctcaattcacgcacattggtattggtaactttggttgtccataatgggcggtctattcaagactgccacaccacttgagcagcgcgcgaatctgggtgagcagatttgtctcgcccggagatacggtaacgccgcttcggttggcgagcgtaattaacgcgcgcacgatacaatccgtttcgattgccacaactgcacatccacttcaagcgccgtaagcgggcgaatgggattagtggaagcgtgggcacgggaaacgagggagcgagatagcgagatacgagggagcgaggtagtgggcgcgagaaacgaggagccaggcccagcgatggcaagggtataaaagcatcgagaaaaggatttgctcccttcctttcgccattgttcctcttgccttcgctgcctgagctctaactctttctctgccacgccctactttcgccacacgcgctcgttcccaatcatctcttcctccaccgccatggcacggggctctgctctgctcgacggcagtgtactgccgccttcccgcatcgtgaatgagaggcacgccggactgccgcgccgcttcatgccggagtccgccaccggtcgggagatagtgatgctgggcgaggggcgcccggcaccagactacccggggcggtccatcttcttcctccccttcgcaatggctgggctggtcccgccattttctcatttcttcatggatgtcctggagttctacgatctccagatggcgcacctcacccccaatgcggtgatgacattggccatcttcgcacacctgtgcgagatgttcattggggtgcgcccctctcttcagctgttccggtggttcttcaccgtgcagtcggtgtcaccgccatcggtggttggcggctgctacttccagccgcgggggtcggtgttgaaccgctacatcccctgcgtcctccgcaagaagtgggacgactggaagagcgactggttctacacccccctcgccgacgaagcgcgcctccgccttccaagccagcccccggcgcaggtctccagctggcgggcgccggcagatctgggggaggagtacgacgccgtcctcgaccgcctggcgggcctgcgatcccaggggctcaccggggccatggtgtacggcgattacctccgtcgccggattgcgccgctccaacggcgcgcccggagcgcttgggagtacactgggcctgaagattacatgcggacccatcagggaaccagatgggattgggctcctgaggacttcaagatcgtagtccaaagggtgcttaatcttagctccgcggaggcgtctcgccttcctcaggagatcctccccctctgcatcgatcccgaccgcgtctccattctatccattatgctgggggttggggcctcagaggagagagcccctaagagccacgatggcgcgggcgagagccgccgggggaaacgatctgccccaggagggggtcgtgcttctgggccccgcgtcgggggctcggggagcagccgtcctgccgacgccccggggaagaggaagctgggaggaacacctcccccatctcctccccgagggggcggggcggtgcgtaccagcggtcagcgcccggagggggccgcgccgacgtcacagcccgagggggagcgcaagaagaagcgcctccgcaagatgggggagacggaaccagcccggggaaacttaatttcccctccaaggtggtcattcaaccgaccccctcgcaggttcgtctcactctcattgcaaccatctttctccaaaaagaagtttttttcttgctcattttgttcgccttctggttttttcttctgcttcagcgatgtcccgtcgcattcctcccgccaccccaagtccggccagtccgaggccgaagatccagcggccgcagaggagcggaggcgggagtctgaccggcgtgaagccgcagcccgccttcgggaagctgaagaggccgcccgggaggccgcccgggttcgccaagcggaggaagctgctcgggaggaggccgcccgggcccgccaagccgcagaagctgcccgggaggaggccgcccgggctcgccaggctgaggcgacagcgtcacttgggcccactccctcgggcggccctcaggcgacatcctccgaggcggctcgcgacgaggccgcgggcgcatcgcctgggcctacctcaccgggcgacgcccaggaccgaacgggcccgggggacatccccgagctcagcgtatcctccggggggccaagccgcgtcgccttttctccaaggcggcttttttcctcatcttccgtcgccccggtgagcgccgagcccattatgcaggccttggccgccgcaaacaccgcggtgctggatgggttcaacacccaggtggaggccctgcgtgcagaacgagcggagctcgaggccgcatgggcgcgcgtcgaggaggggcggcgctcggtggacgccatggtggaggtgggccgtaaggcccatcgccgccacatctcggagctcgaagcccgcaaggcggcgctggcggagatcgcccgagaggtggaggaggagcgagaggccgccctcgtcgccaccaccgcgatggtcgaggcgcaagacaccctccgtcttcagcacgcaagctgggaggcggagctgaagagcaagctcgacgccgcccaaggggttctcgactccgccgccgcccgagagcggcgggcaacggaagccgaagcggcgtcccggcggcgcgaggaggcccttgaggcccgtgccatggcgctggaagaacatgccggcgccgtggagaggggcttgatggaccgcgaggccgccactgctctccgggaggcgacgctggtggcgcacgaggccgcctgcgccgaggaggagtccgcgctccgccttcgcgaggatgcactcgccgagcgggagcgggctctcgaggaggccgaggccacgacgcgacggctggcggacagcctctccctccgcgaggcggcgcaagaggagcaggcgcgccgcaaccttgaaagcgtccgtgccgagagagccgcgctggagcagcgggctgccaacctcgaggcacgggagaaagagctggccgcgggggcgcgcatcggtggggcggctgcgggcgaaagcgacttagccgctcgcctcgcggctgccgaacacaccgtcgctgacatgcagcgcgcgctggactcctccactggggaggccgaggcccttcgcttggcgggcgagattgggcccggcatgctttgggacgcggtctcccgcatgaagcgcgccggtcggcaagcaggcctctggggaggccagacgacggtgccccccaccaatctggaaggcctcgctccgcacctcaacaggatggcctgggttctcgaacgactccccgaggagcttgagaagaccattaaggcatcctcgagggacctcgcccggggggcggtcgaactcgtgctggcaagttaccaggcccgggatcccaacttctccccatggatggcgctggaggagttccctcccgggaccgaggacgaggcgcgcgcgcgggtcggggatgctgctgaccacatcgtcaacggcttcgagggctcggcccctcggctcgcgttcgcccccagctccgacgaggaaggcgacaccagcagcgaggacggcggtggcgacgaggccggcgacccgggcgcatatgaatgagcccccaggcccccgccactcttaacttttttcttgttctttcttctaaggccttcatgcctcttttttgtacaatctaacttaatctgcaatgagaaatgatgaaaaatttttgtgttagttttattttgctatatatatgagttgaggatgatctgtgccatggtccttttgcgccttagcttgaaataagggctcgcgcccaagtcccggtcctcgaatggctcgggtcggggctagtgcctggggagatccacatgtcgagactggccaggccgggaacgtggtgaccgaggggtatgggtgacccgattgtgggtttttgccgattcccccccggagttcaccacgccccggggcacggctcggttctgggccccgtttggcgattttagccgaccgaaccgagcccccgagggcaaggttgagtacgagtgacattatttcaagtcaagattcttcaaaaggaaaaaaacggcacagacacaacctttaggaaattgaaactgcttttattgaaatgctgaaaggaatatatgtgcatgtgtggtagcccccggctaaccctgcacacccgagggggggtgcggggttagcccgagccgaaacctgacacccgaccccccccttcaggggtagaagcgacgaaggtgttcgatgttccacgggtttggcagctccgtgccgtcgcccgtggccagccgtaccgagcccggccgggggacaccgatcactcgatacggaccctcccacattggtgagagtttgctcaatccagcacgcgtttggacgcggcgtaggacgaggtcgtcgacgcagagtgatcgggcccggacgtggcgctgatggtagcgccgcaggctctgctggtagcgcgcagctcggagggccgcgcgccgccttcgctcttccaagtagtcgaggtcatctctacgaagctgatcttgatcagcctcgcagtacatggtggcccgaggagacctcagggtgagctcagatgggagaaccgcttctgcgccgtagacgaggaagaaaggcgtttccccggtcgctcggcttggtgtggttcggttcgcccagagcaccgctggcaactcctcgatccatgaatcgccgtgcttcttgagaatattgaaggtcttggttttaaggcctttgaggatttctgcattggcgcgctccacttggccattgcttctggggtgggcaggtgaggcgaagcagagcttgatgcccatgtcttcacagtagtcgccgaagagttcactagtgaattgggtgccattatccgtaataatacggttaggtactccaaaacgggccgtgatacccttaatgaatttaagagcagagtgcttatcgatcttgacaaccggataagcctcgggccacttagtgaacttgtcgatcgcaacatacagatactcaaacccgcctggggcccgtttgaacggtcccaggatatcaagcccccagacagcaaatggccacgacagcggtatgatctgcagggcctgggccggctgatggatttgcttggcgtggaactgacacgctctgcatcgccggaccagatcgactgcgtcattgagagctgtcggccaataaaatccttgacgaaaggccttgccaaccagggtgcgcgaggcggaatgggctccgcactcgccctcatggatgtcaacaagaagctcaacgccttgttcctgaggaatgcacttcaggaggattccgttagccgcgcgccgatagagggtcccttctaccagcacatagcgtttggaaatgcgttgtacgcgttcactcccttcgcggtcctcaggtagagtcttatctgtgaggtatgtttggatctcagagatccaagcaatcaatctaagggagcttggaacgctctcttcgggtcccgaggcctggactccgacgggcctcgggtgccggtcaggcgcatccgtctcccctgaggggtcgggtcgcgccgacggctgggtaagcctttcttcaaaggcgcccggtggggtctgggctcgcgaggacgcgagccttgagagttcgtcggctatcatgttgtcccttctgggtacatgccgaagctctatcccgtcgaaatggcgctccatacgccgcacttggcgtacgtaggcgtccatctgtgggtcagagcaccggtactccttacagacctggttaacgactagctgggagtcgcctaataccaagaggcggcggatccccagtccagccgccactctgagtccggcaaggagtccctcgtactctgccatattgttagtcgctcggaagttgagacggaccaaatatctgaggacgtctccgttcggagaggtcaacgtgacccctgcaccggcgccctgaagagacagagaaccgtcaaactgcatcacccagtgggcggtttgaggcagctgtgaggggttcgtgctggcctcgggtattgagacggtctctggagccggggtccactctgccacaaaatcggcgagggcctggctcttgatagcgtggcgtggttcaaagtgcagatcgaactcggaaagctcgattgcccattttaccactcgtcctgtaccctctcgattatgcaagatttgaccgagggggtaagacgtaaccacagcgacccgatgcgcctggaaataatggcgcagtttcctcgaggccatcagaatagcgtaaagcatcttctgggcctgtgggtatcgggtcttggcgtcccggagggcctcactaacaaagtagacaggccgctgcacctttcggcgaggccgatcttcttcgctaggggccgcacccccggggcgttcttcgtccgagtggcccctcggggcgcacccgtcttctgtgccgatgacctcggggtcggaagacgacaggagcggccttcccacagtggcctcgggaccgtcctgggggttgggggctcctggtgtcatcggacaagcgggcaaagggccaactccggtcgtcaggggccttaggccaccgttcggctcgggggcctcttctccctgctctctcccgggtcgaatcggtacagggttagcctcggggtcagagggtgataggtgcggcctccccgcagtggcctcggggccttcctgagggtcgggggcacccgacaccgtctgacaagcgggcggagggccgactccggtcgtcgggggccttaggccaccgttcgactcgggggcctctcctccctgcctgctcccgggccaagtcggcacagagtgggggtgcgcagaatgaggattgtcctcatcgcgctccacaaccaacgctgcactaactacttggggggtcgctgctaaataaagtagcaggggctcatttggctccggggcgactagaaccggaggagagctgagatatgcctttaactgagtaagggcatgttcagcttcctccgtccaagtgaacggccccgagcgcttgaggagcttaaacaagggtagcgccttctctcccagccttgatatgaaacgacttagggcggccatgcaaccggtgacgcattgcacgtccctaagtttgctgggggggcgcatccgctcgatagctcgaatcttctcggggttggcctcaatgcctcgggcagagaccaagaacccgagaagcttgcccgcaggtacaccaaacacacacttatcggggttcagttttatgcgggcggagcggagattctcaaaagtttccgctagatctgaaagtaaagtttcttggttgcacgtttttacaaccaagtcatcgacatacgcctcaacattacgtcctatttggctacccaaagaaattcgagtagtacgctgaaaagtaggacctgcattctttaacccgaagggcattgatgtataacaataggttcctacgggggtaatgaacgcagttttttcctcatcctccctagccatgcgaatctgatggtaaccagagtatgcatctagaaaacacaaaaggtcgcaccccgcagtggagtcgacgatctgatctatgcgaggcagggggtaaggatccttaggacatgccttgttaaggtcggtgtagtcgatgcacatccgaagcttgccgttcgccttgggaacgaccaccgggttcgccagccactccggatggatgacctcacggatgaacccggcctccaaaagtctagccacctcctcgcggatgaaggcttgacgttccggggcttgccgccgcactttctgccggaccggccttgcgcccggccgcacggcgagacggtgctcaatcacctccctggggaccccgggcatgtccgctggtctccatgcgaagacgtcagcgtttgcccgcaggaaggagacgagcgcgtcttcctatttgccatccagaagaccaccgatccgtgtggtcttggatgggccgtcgcccaaggcaacctccttgaccggaacctcatcgcatgtggccatccgctgcctcggggcggtgggggcagaggggccaagcctctcgtcaccaccctcgggcttggacgcagcagcgaggcggtccgcgcgctgctccatgcaagcaagcgcgactttaaggtcgccacggacagagatggggccaccggggcccggcatcttcatccggaggtaggcgtagtggaccgccgccatgaacttcaccaacgcgggtctccccaggaccgcgttgtagggcagactgaggtccgccacatcaaagctcacccgctccgtgcggaagttggcgggtccaccgaaggtgaccggtaggtcgatgtgacctaatggccacgtgtgccccggcgtcacaccgatgatcggttgagacggctggagcaccatccccggggccttgatagcatcaaaggccgcgggggaaaggatgttgagagccgctcctccatctatgaggacacgtcccaacttcacgttgcagatggtgggggagaccaccatcgcaacctgccctccccgggcaatgcacggtgggtggtcggtctggtcaaaagtgagagcaacctccgaccaccgcgcccgacgcatcacctcatgggtaggggccatggccagaagctctcgcttcatagccttgaagctccggcgagagacgtgagcacacgcccctccatcgacggtggcaatggtggccccaggttcttggaaacctaggtcatcatcaccatcatcaatgtcaacagcgggggccttctgcttggcctcacttcgccgtttgccggatgggaccgccggggacttgccctcgcggcgttcctgcctcctgtcctcctcccacttcctcgttcgctcagccaaatttttgactgcgcgacagtccgcgagatcgtggagggaggtgttgtggacggagcaccacctgccggcggggcgctccctgctgggtgtaccagccccgttctttttgtcgctcgcaggcctcccctttcgagtggcccgcggagcgccctcgacggcgaggacatgaccctcgtcgccggaacggtccggcctcttcttcctcctcctgtcacgccgccctgtctgagcggcggatccgggggcggccgaagctgccactccggaaccggaggagttccaggtccacgcttcctccttacgagccactcggtccgcgagctgaaaaagctccgcggtagtctggggctctttggaagcgatcttttcgagcatgcggttgtgccgcacgccccccctgaacgcgtagatcaccgcgtgtgcagggatgcatggtatagtgttgcggacttggcaaaaccgctgaatgtacgagcgaagcgactcatcatcgcctcgctgtactgcatgcaagtccgcttcttcgcctgggcgcggatatgtgccttggaagttcatggtgaactgttggcacaaatcttcccaggagtggaccgacgcgggtggcagattcattagccaaccccgcgcctgtccttttagggccatgggaaagaagttcgccatgactctgtcgtcacccccagcggcctcaatcccggtcgtatagacctggagaaactcggtggggttgacactcccatcatacttctcggtgatggtgggccggaaccttgggggccaacggacattccgaagactcgccacaaaggctctacagccaacaccaccggccgggggcacggagggctgatcttcacgtccatgtcgaggtgacactctggacgaggaggctccctccgttgcacggggagtacgccggctattacgccggcgcccgatgttgaggcgggcatccggctccccatgctgatcctcccgagtcgacggtgtagacgagggagtggcagccgaatgacgtgcagccgccgccgctcgccgcgccctccgccttgatgacacggagccggtggtagcggcgccggaggtcttggtggtggtggcggaccgtccaccagcacccaggcgctgctgtgccgtcatgaccaagttggccacgtcttccagccatcgttgggctggagactccgggtcatggacgacaggcgggtgtcgtaggagcgcgccagcagcctgaagcgcaccctgaggtgtgctgccgtcgccgtagacgaggaggcgacgctccccatctcgccgttctcctgcatcacctgcggctggtgacgccgcggatttgtcgaccctctcaagcgcctccccctgcttagggctttggcgcggaggaggtggaggagtacgagctcgacggcgcggattcggctccccgtcgtcgccgctcacactcggcgagaggtcgtgtgtttttccttgctcggccattaggctgaacaagaaaaacttggggcacacggaagagtctgagagctcagaaagcacacgctgagccccctacctggcgcgccagatgacggagctggtggctcctcaccgggagaccgcgcaggcccccctttgccagttcggccgggggcttagggtgaaatctcaagctctcgctctctctctgtatgtggaaatatcgtccgccagccagaaacacgagacaccggcgatctatacaggttcgggccgctgagaagcgtaataccctactcctgtgttttggtggatctgtgtatgaatgggctacaagtgtgagctgacttctcccccgttctaagctcacaatctggaaaagaatcaagaaaaaaccccttctctatgggcaaggtcctcctt

SEQ ID NO: 20110 - DNA, 2829 bp, Oryza sativa
ggtcgccggcccccgccacgaccccttagttagcagccggatccggcgccgtccgtctccaccgccgtcgtagaaagcccgtaggccacctgtgtcctcttgccgcccgatgtgacgaggagctcggcggcgccacacggaggtcaaccgatccgcatcatccacgccacttaaagtgattatgatttgtgaatcaacggatttgagatttggtaagtgacctctccctctctcaggttttcctcagctcttgatgattttttttggatcttttatgtactttcttcatccgctaacacatgatgagtcgagtagctagcatctccatggcaatagaactaagaagttcaaaaaaattgtatgatcaataatagccttaacaaagtgacctctaagcaacaaatctactgtcccaggggaaaaattgtgatattttgaaggaaatgctatagtggttaaatacttaaatgttcgcatgttgaactgttaaaaacactcataacttgatgatctcttgacagaacctagacaaggaagggctcttggagcaactgctacagtcagctgctctactggttagttggtcacttggccgtcacttgtcaggtagtatgcacaaccttgtggtatatcatctgctttatgtaaattagtttggctcatttttactaatgttataactgtgtgtttagcctgacggtgcagcatttaaaagctaacttatacagtgtgctttatctctgttatagctgacctcggttgtaagttctgaattttgagtggtgttggtcagaacaatttatctgttgcaatattagcttttaaatgttattactgatcatacaatttttttaaaatgtattacgattcatgtaagtggctcctaacatatgacctgacatatgttagaataaatccatctctgtgtatacattttctggtgtgtccctgaaaatcttgcgaggcgttcggggaggtgctagttacatgtatgttacaaaattaagttttgtgatagctaattgatattgattttgtgggcggatgcagctgtggcctcggtgccggtgaagtgacctgcgcggtggacaagtgcaaggaggagctgagcaggtgccacgactagcaccggtggcacaaggtgtgtgaggcgctctccaagctgcccgtcgttgtcgccgattgtgagatgctcttttgccaacagtgcatcaggtaaccaatagtttgtcagatagaaaactaaatcttggtaattgatcttcaggctaagtatgatggggatgaggaggagcagaggtggcctaaatctgatggacaagattttggcagtttgggaagcatttgggatatggcaggtaatttacacaagcatgaaccataaaaagcaggatttctcctacatgattgcattagctcaagtatcagaagtaatggtgtaactggaatctaagtcttactgaggcatatatgtgtgttgcacttatcaattaacgtgtgactgggagagatcaactttactgcttgttgttgcatttacatatctttctgtctatctatttattatttgactttgtgattcttcacatgtattggatgaaattcatcggcaacctgcatcactttcactttccatggtctctgcccaggctccagaatccgtggttaattcattaccatgtaagagctacaaaaagcagacagcccaatgcagtgataacatggaacagtgagattcttaccattcaaattttatcatttacttgttgtcacctagggccaaaaatagttctgagtgtcattgaagaatgtcaagttcgccgctacaaatgcatcacattatcttacgcgtttgaaataactatgctgttcatgtccattatccatcaaaaaataaattgagaccctgtacaaaatccttattattttatttgccttacatcagccttctaatatggttgttgtagtcattttagagatcttatcaaataagcattttgtcatgggcattgggccaaaggccaaggtgtttagcgttttggatcatgacacatttgggggctaattctgccttaacaatattgtatctgtcataacgagctagaaccatgaaatatttgggggctaattccgccttcatgatattatatctatcacagtgggctatcctaaagttgaaaatcacagtgagattctattatataacaagttattcttactgaaacttgacacgattttttggactgcatatcatgatggcacctggatatgtggataacaagttaacaacatgatgataaactattagaagttgaggatgccctgtggtgctcagcaggagctttgaggctctgtgagttacttagtaggtcgctaacccttaatgatatgaatgtgaattatatgcaaatgtctagaatttaaatttccaattttctggacttatgaattttagacttgtgaatttatgatctaagtatatatgtgcaaattaatgttcataatttagacaggaatttttggacttaaaaattttagaccacaatcttttgacttaggaattttaaactaggcatattttgagttaggatatatatgcaaatgtttaggatttaaagataggaatttttggatttacgaattttgacttagacttgtaggtttttatatgttgtgatgaatggcttgtaggtttttattcgttgtggtgaatgtgaatgtgaatgaatgtgctgtatggatgtggggctgtagggatgaatttgggtttatatggaattggggttgaatggatgaatttactgcaattattttttttttggcccaaca

SEQ ID NO: 20111 - DNA, 850 bp, Oryza sativa
ccgggcggctgcaaggacagcggcggcggggctctctctctctctctccaccgctcgcagtggagctggacggggcgccggcaagacggagcggcaaggcgccgacgacgacgaccagatccagcgccaggatgcacggatccggtacccctatggccggatctgctgcttccgggcggcggcgacccgggtcggcaagtcgcggcgtcggcggcgtggaggtggcggtgtcagcggccggagggcggcgtcgacaactggagggcggcctcggcggcgtggagttggcagcgaggcggaggacacggcggcatgaccgtggctgcggtgacaaacggcgagcgtgaccagttctggccggacggctagcggcggtgcttgcggccgtggtgcagctgcggcggaggtggatggcgacggtggcggcggaggctggtgagggcgacgacggctgaggcagccgctgcggtggctggcgatggtggcgacggctgaggcagccgtggtggcggcaacggctgaggcagctgcgacagcgaggtggcggcggcggttgaggcagccgcagctgtggtggtggctacacgcagtgtcgaccgtggatgagggggaggaggcacggcggcctcggacggctagctgagggcgtggtagacggctgcatctggccggcgcagtagcgtttggaggaggggtcggaggccggcttggtacagagaggcgcagcggatggcagtggaggtcggctcagcgcgagaggcgcgggcggcggagatggaggccggcttggcgcgagaggcgcggccgatggagggaggccagattggcgcgagagacgcgtccggtggag

SEQ ID NO: 20112 - DNA, 701 bp, Oryza sativa
attcctgcagcccagaccaagctaacaacaaaggcattttcatagtccatagagatcacttaccgtcagagatccaatcacagagcatattcctatatacactgctatgttggtctgcccatagcggggagcacaatgcgccatcaagatcagtgagaccaccagtgcaaaggccacatagcaaagaaaggctgcagaaaatacaaagtacaattgtgatgactgacgataataaagtacaaagggaaactacaaggatataccaggttgtgtcgccaggtgccaaatctgctccactgagctcggtgtctcctcttcaggagcatgaaggatgatcactgttgatccgactatacagagcacgcagcccagcactcccatccgttgcagcttctcattcaggatgaaatgggctagaacagcactgctccacaaagattacgcattcaccacgcatgtgcatggacagattaaaactaattcaaaccatgggttctaaccaggaaattttacaagcaaagggaacacatcccagttgtacctaacaattatgctgagagcgccgaggggagtaaccagaacagccggtgcgaacatgtaagccacgaaatttgcaatctcaccaatgagcactacgaaattcggaaaaaaaattatcaagaatttcgaataattttgcactagcccctcaagaaataagc

SEQ ID NO: 20113 - DNA, 626 bp, Oryza sativa
gggtaaaaagaagctccatctcgtaaacaagtagccagagcctcccaaagcaagtacttaaaagataaaaatcaatgttatggacaaaagttaagataaaagaaggtttgcaaacttactgccgtttagcttctatatctttgttgaaatcaatgtcaggttcacaatccaagaccagagcagggacctacatagcaaaaagggcaccattatgtaactatgatgcttgatactggagctttcagagcaagctaaggtcagcaaaaataccttctggatgcttgagtgcatgtgatctccttccaagtaaaagacacgatctcgaattgctggaggcaaggaaccttccaaatgtgtgggcagctgactgacagataacacaccagtacctcctccttttgaaggaagcaaccagctctcgtgtttctcatgcaaaccttgcaagtagtcaagagtaacaccaccttcctctgctcttttccggagcatcattcttttgtggcaagtatctgggctagctcttagatagataaatccatcagggataagacctggaagcgatgacacaacaggatcaaaccatgagtcgtaaatgctgatctccatctcattcatccagttagctt

SEQ ID NO: 20114 - DNA, 1823 bp, Oryza sativa
ccgaaggggcaccagcctcatagtcgtcgtcttcctgcacgcccttctcggagttcttgggcaccgcgaggacggcgaggatatgccaccgtccgtcgtccgtagtgtacatcgcgctaggcagcgaggtgccactgcgcgtggataaggtccacgagctcgcgctcgggctggacgtcgccgggacgcgcttcctgtgggctctgaggaagcccactggtgtctcagacacagacctcctccccgctggcttcgaggagcgctcgtgcggccgcggcgtcgtggagacgagatgggttcctcagatgagcatactggcgcacgccgagaaggcgtcgcggcagcgattcgtgcagtcgcggtggaggtcctggaggaagaaagcagcaaagcgtttcaagccaataccaagaagctgcaggagatcgtcgcggacatggcctgccatgagaggtacatcgacggattcattcagcaattgagatcttacatggattgaactgaagcatctcaggatgtacacctacaactacaaaatccttggaataaaatgatttttgtttgcaaaggccgaacggtggggaaaattctaatcctgattttttttcattttttttcttcgttatttatcaatttgataccgtggaacgtctaattctttaattagtggagaacttaactttgcactcagcttgacaaattgtacaggcaagatatcaagatcatgggctttttcatctccaagcggcgagggcggggacacggcggctcgttcaggttccacacgacggtggaggcggcgcagcaggccatcgccaccgggcacgtggaggccgagagcgcggcgaacggcgtaggcctcaccaagctcatgggccggagcgccggccaccggggagaagagcggcagacagctaggcgagcggcgcaagagagagatggccgccgctgccccacgcgcctcgcgcgccatcgcccgccgccagccatgcgctgtccgtcgtcgcgccgcccgccgccgccgcgcggtccgccgtcgcccgccgtgctggacgccacccggcgagaggagggagcagagagatggggagagccggagaggaagaagaagatgattggatttggttatctgagaatgacatgtgtggcccacgtgggccacaccactgtagctgacatgtgggacccaccatttttaaattattttttctatggctgacatgtgggcccatgatttttattattttttaagatataattgccatgtcagcgccacatcaatgccacgtgggatggagaactagtcaaacaagtcacgtaggcgccacgtcatccaaaaccgccgagggactttgtttgcccggttttcgaaagttgggggacgggtcgtacccggttttgcggtcgagggatgaaaatcggattgtgcgacaaatagagggacccaaattgaacttattccttttcagaatatacttcccaaatccagcttgcccaggtcgaggtggagttgtgcagttgaaataggcgtcgaattagaagagcctcgttctgaaatttcagattcctaatacctaggcctccttgctctttgggcttacaaaccgaatcccaggctaccaattccaagagtaaatttgtcgcgaaactatcttggaactgcaacttcgagtccaatcagtttttactctgtttgcagtttcttacagttttggcagtgaaattgtagtttagtgaaattgctccaatgaactcaaaaacagagtattgcacaaaactgttttaactgctatctggacttctgagttctggcaaaacctgct

SEQ ID NO: 20115 - DNA, 703 bp, Oryza sativa
attcctgcagcccaggcgaggggctccatcttcaacacctcgtcggacacggaggtcatcctccacctcatcgcgacgtcgctgtcgcggccactgctgtcccgcatctgcgacgcgtgcgagcgcctcgcgggggcctactcgctgctgttcctgacggccgataagatgttcgccgtgcgcgacccgcacgggttccgcccgctggtgctcggccgccgccgcaacggcaccgtcgcgttcgcgtcggagacttgcgcgctggacctcatcgaggcgacctacgagcgcgaggtggagcccggggaggtggtcgtcgtcgaccgccgcgacatgtccgtctcctcagcgtgcctcgtcccgcaccgcccccgccgctcctgcgtcttcgagcacatctacttcgccctcccaaactccgtcgtcttctcgcacgccgtccacgagcgccgcaccgccttcggccgcgcgctcgcggaggagtcccccgccgcgggcgccgacgtggtcatcccggttcccgactcggggttctacgccgcgctcgggttcgcgcgcgcgtcggggctggagttccagcagggcctcatccggtggcactacagcggccgcagcttcatccagccgacgcaggcgatccgcgacctcgccgtgaagctcaagctggcaccggtccacggcgtgatccgcgggaagagcgtgg

SEQ ID NO: 20116 - DNA, 642 bp, Oryza sativa
ccgagcaggaacaccaggagcccgagcagcatcaccatgcccggcacgccgaagccgaggccccagccgacgttgtcctgcacgtagctcatcaccgccgccgtgacggtcgcgctggcgcagagcccgaggtaccaccagttgaagaaggtgctccgcgacgacgactcgccggggtccgtcgcgtcgaactggtcggcgccgaacgcctggacgcacggcttgtggccgctctgggcgatggccaccaaatagagagagacgtagaagaaggccctctgcacggaggaagaccggcaaacttgccggccatcgccggaggagctgcattgttggctctgaggcgacgagaacgtggacgacaacgctagcaagcccagtccctgccgttgtttggccatggtgaataggtgagcgcagtttgcgagatcaaatatatttaggtcctgttccgaggaattttctcatgcaaaaccgtaattgtaacgtcggtattttaccggattcaaacaagaattgaactgggatgcaaagttttagtgtatcacatcaggtattatatagggtgtcacatagggtgtttgggcactaataaaaaaaactaattatagtatgtcggttatagatggccatatggcccga

SEQ ID NO: 20117 - DNA, 806 bp, Oryza sativa
aacgagcacgggggagccgcggtgccccgacctcaacctcgagctctcggtcgggccgacgccgagctcgccgccggcggagacgcccaccagcgcgcggccggtctgcctctgctaccacctcggcttccgcggcggggaggcgtgcagctgtcaggctgacagcaagggcccacacgagtttagatatttcaggccgttggaacaaggccagtacatatgagatatgaccatgagatgtgagatggcttaattagcttcaattcccaacatgtgtaacacagggagtttttctagtggacgacaatactgtttaatttcagaaaaaaaaagggaaagaaaaaggttctaatctgttcatatttcttactattatccaatcttcatgatctcaatctctctctctctttattatttttctttgtagtaattaacttcatgttggttcctctaaaaaagattggtcgatgttattcagtgataaatattcctagatgatgataatcagatagtggactaaggttggtgctaaaagggaggaatcgttgggcatctgattctagtgctggctctttgcattttggatcatgtgaatattatgcaaagacatcatgtgttttgtttttggtaggtaatatatgtactagtagtattctttgcttctacttcacaaattctcaggatttcaaatggtatgaagttaggcactagggaacgttgggtaggtaattattcgttgagatgctattttgggagtatttggaactggtagtttggttgcaggaatgccataggagcctttgggt

SEQ ID NO: 20118 - DNA, 748 bp, Oryza sativa
gtgagctgggcgaggagtgggcggcggccgagtgcggcaggagggggtcgaggcggtggtccaggaagaaggcgagggggcaccaccgccgcggcgggggcggaggcggcggcggcgggctctgcaggagcagggaggaggcccccgcggggaggaagcgggtgatggtggtggtggaccagagctccggtgccaagcacgccatgatgtgggcgctcacccacgtcgccagcaagggggacttcctcaccctgctccacgtcctcccccacggcggcggcgacgcctccgcgctcgccaactccctcggctcactctgcaaggcctgcaagcccgaggtgcgtgcttaaagctacccagctttctaatcatgcaagcccaaatattaattttttttaggaatgagcacttcaatttctagtgtttttggttcattgatcgtgtagaactgcactgtttttttttcaacttatgaattgcacaatgtgatatgtttcttgttctcctatacttgtcattctgacttctgaggtggcacactgtgcttatcattttgaacttgagtgacacactgaggttgccattctgagcttgtcactcacttaatataattacggcgaggtgctttacatttttgcattccgagcttataagtggcagactacagtaaagggcgttctagtttgctcaggaacatataagtcatacagtgtatgaactatgaatggcaaaagtttggtttaattga

SEQ ID NO: 20119 - DNA, 1597 bp, Oryza sativa
ggtgagttcaagtgcctcgagctccacggctccgagacggtagatagatggtaggggtgaaaacggtacagaaacgaatggaaaccacatttatcattttcgttttcatatttttttgggaatcggaatcggaaaccccgaatactaaaatggaatcgaatattatcgaaaccgaaaacatcgcgaaaacaaaccggcgtgaatatagtaacgaaaaattatcgaaatacaaaaccccttaaactaataaatccaattcttaagtctgaacggtcaacaattcatcataaaacacaatcatataagtccaattgttaagtcttaacagtatatcacaaaacacaatctatggaataaattgtctatatttaagaaagtaatgttgttgataaatcccaatgtaggaaaaaaaatattcttacgtaacttcatatttgcataacaaatatttttaaaaaaatagcagcaaacaccatggtaatcactattcagtgcttcaaaaaagaatccagggtatttcactcacaaaattttcggaaattctgagaacattttcggaaagtttccgaccgatttcgagttccgacggaaactgcccttatcattttcgattatgtttccgagaaaatatttctgaattcgtttccatttccgaaaaaatccgaccgacaaattccgttttcgaaaataggtccggaattcggaaagtttccgtaccgttttcccccctaatagacggtggtccagtctaggtgtcacttcgccgatggtctagaccagcgacgagatggttgggaaatggtgatgggacttgggacatggcgatagcgggatggttcatcagctagatggtggggcacgacaatggtaagtgtggggctctgtcttagccttcgatgcttcgcttactcttgtcaacatcgacgggacaacgatgaagtgggtgtagcttggttgcgcttgtggattagtcgcggtaggtgaggggatgtgagaaggaggttgatgtagtggaggaagaggagttgacaccatattatggaggtggacaagaagagcgtgagagagaagggtgtgcccatgagatatgggctctatgtatttgttttatttactaaaaactctctaccacatagtcagccaaaaccgctctcaaaacagtctaagaaaggtcaattaatccgattttaatagttaaggaaatgactgatgtgacgcctacgtgactggtttgacttggtcctcgtcctactttgtcacgccccgaactagtcccgaccggaactagcccgtgacgctccaaattaacctgttaatcgataccagtcccaggaaacagtgctggtatcatagggagacagagtatcacagcaacagaggtctctttattatagagtagaagtacagtcatgttgggctgcggacagatcccgagctcacaactgcattacaaaaggaaagcggaagccaggacttggaccaatcatcacaggcgcgacttgggaactaggccgaaaccataaaactcatcgtagccgacttgctcctggaagaactcctcgtcagcaggatccacttcatcttctttagcaactgg

SEQ ID NO: 20120 - DNA, 765 bp, Oryza sativa
cacggtgatacgggcaaaagcgtgcacaccgggcggttgcacgtgacaaggggagacgagccaacggctcggattcgccggaggttgctcgacggcggcggattgcggcggcggcaaccggcggcgggagaagagggaaacggcgacgaggtcacgagagaccgattcccggcggtgagagcatccacgcgaccacgggaatccgatgctagcgtcagattggacggaactacgccgagcgaggccggcgacgagcgggtgctacggagctcgggcggcgacggcggcgagcacacggcgagcgacggcaacggtcggggcggcaccggctagctacggggaggctactcgtgctaccaccgaaaactaagggggggagatggagcgaggaggaagaacggagagaggcactaccgtgcgggtcggggcgctgtgacgagaggccgacggcgcgggagtaatctctccggcctcgggccggggaagaggaaggagagggcgcggccggagtcctcttccgcgtccttgctcgtgccggctcctccgacacgcgcaacgacgatcggcgacggcgaaacagaggacggcaatggcgcggatgcgaaaatgagggagtttggaggggaaggagctggggtttaaagggggcggcaatgtcggtttgggaaccgacttagggcggtcaaggcgcgagctggcgctcggcggtcgcggccaaagcggcgacagggaggatgacgccggcgggggaaaagggctgcagga

SEQ ID NO: 20121 - DNA, 1614 bp, Oryza sativa
ggcaaacaacgatcccaagtgccttcgaaatccaaggcacacgcacgtagcatgtcttctaggatttggtttaccctttcggtctgaccatcggtctgcggatggtaggctgtactaaaattcagatcagttccgagggcttcatgcaactgcttccagaaccttgaggtgaactgagtgcctcggtctgacacaattttcttgggacagccaaatctacatacgacatgggtcatgtagagttctgctagtttctttccatcataggaggttttcactggcacgaaatgagctgatttcgtgagtcggtccacgattacccaaatggagtcgtacccgttgggggttcttggcaaaccggtgatgaaatccattccgatctcttcccatttccactcgggaatcggtaggggttgcagcagaccagctggcctctgatgttccgccttgactctttggcaaatgtcacacagggctacgtattctgcgacatctcgcttcattccagcccaccagaagtatgccttgatatcttggtacatcttcgtacttcctgggtgaatggagtaggcggactcatgagcttcctttaggatgagatctcttaactccttcttggccggtacacagatgcgtggtccgcaccaaactgtgccttgatcgtctatggagaaatttgtgtctttcttctcctgtattctttttattaattcttttatcccttcgtcgtctttctgagcctcccggatttgcgactccagggtaggctgtattgtcaagctggcagggacacctgactgtaccacggtcagtcttaacttctccaattctctgcacaggtgatcttggtcaggccgtatttgagctacattgcaataggccttgcgacttagcgcatcagcgaccacgttggctttaccaggatgatagtggattccaagatcgtaatccttgattagttccaaccatcttctctgtctcatatttaactcggtctgagtgaagatatacttaagacttttgtgatcggtgtatacttcacatctgttcccgattaaatagtgcctccagatcttaagagcatgaaccacagctgccaactcgagatcatgggtgggataattggcttcatgaggcctgagctgcctggatgcataggccacaaccttttgttcttgcattaggacacatcctaagccttgtcttgatgcgtcacagaagatctcgaaatcttttcggatatctggcaaggtgagaactggggcagtggtcaaccttttcttcaattcttggaagctgtcttcacaggctgcagaccattgaaatttcttttccttctttaacagctcggtcataggtctggctagcttagagaatccttcaatgaatcttcgataatatccagctaagccaaggaagctgcggatctctgacacgttcttgggcgggttccaagcaagtacagcttcaaccttgttgggatctacttcgacaccgttggaggaaatcacgtgtccaagaaatgctactcggtccaaccagaattcgcatttcgagaatttagcgaatagttgatgatctctgagcttttccattatcagcctcaggtgttca

SEQ ID NO: 20122 - DNA, 898 bp, Oryza sativa
cattccaactgcgattcctttcaagaatttcctgatcttcttcttatctgtgtctacttcctcaggggcgtaccgagccaacttgttgaactgacttaggtactcattgacactgctgttgccttgcttaagtctgttgaattcttctttcttcatgtcaatagtgctttcaggcacatgagctgcacggaaagccgtagcgaactcatcccaagcaatgttagtgggttcagggtgtgcattgcagtaattctcccaccaatctgcggcaggtcctcttagttggtgagaggcgtagagcgtcttctcaacaggagtacactgcactaagttgagttttctatcaacatctttcaaccaatcgtcagcctcgacgggctcgacggtctgagagaactctggcggacgagacctcagaaagtctgtcagcttggatctgttgttgcccatgtgagggtggccatttccatgcgcattatgctgaaaactggctatggctgtggttagtccttgcaagatttgtgtctgaactgccattaagtgttgcatgttggtttccacatgaggtggggaagggaggcgttcttctccagaattgtgactggcagtgcggtgagagcggtgagactgttccatctctgcatcacgggaaactgtgcgatgcgagcggctgctgtggcggggttgctcaacctctgcgttgcgggaaacagtacgatgcgaacggttgctgtggtgagactgctcattagctgattcatgattttcttctggctcaactctaccatcctcaaaaccaaagcgggctggtgcacgagctgcacggcggggacggctagccatctaaactcccagaagagcgcggggtaagagtcagataagcacttaggagggcaag

SEQ ID NO: 20123 - DNA, 643 bp, Oryza sativa
agtttgaagggggggggggggggtagaaaaaatagccttccaagcagatattacaaatctatcttctggcttcaaaatatctgcccaaagggcagcctcgcttacacagcattgcaggcatgattggagcgacggctccatccctctgaatacaacatcatgtcggtgattccagattgcccagaaacatagcaggtaaaacactttgaaatgtagctccggcatcgcttgggttgtctttattcgatgcaattgcgccacatcctgaactgaaggaagcactgcaattttgtgccagaaacttgtcgcaaatgtgcaagagaagaagagatgtgaacccgtttctggcccgctattacagatgctgcaagtgtctgattgaacaatcttcttcttcaggagattgtgctttgtggataggcgatctctggcaagaagccaagcaaacagtttaactttcataggcgctttgcaatcccaaatccaaatccagttcggagaagctgttccaggaggcagcctggcttgatagatctccttagatgtcaagtttgtccccaggcttttcgaatttcttcgaatgtccagttcatcagtacgagtaaaatgctgaagtagttcctctagttcaatcaattgaagt

SEQ ID NO: 20124 - DNA, 686 bp, Oryza sativa
acaactactgttaacagaacgaagtctatctccttgaggcaaaatactattgacttttgattaaagtaacttcactgctaaaagaaaccaaacaattttcagtaggaattatcaaattggtagtgattttaatactaaagtaaagcaccaactctcaacaaccacaacttacaccagctttgttaccacaaggctagtaaaaggagattggaaactcaaactgcagtgactaaataacttcaactttgggaaaaccacttatttatgtttgcatgaataatattatcagcatgatgtaccacagaacaaatattcatcttctcatataagaatagccaagcattgattgactaaaactcagaaataattacctggagaaatagtttgatcatattctcttgtagaatgcaatacaacggtaccagaaagcacagtaagaaatccacagatctcagaagcaatactgcttatactctgtccagaccaatcctggaaaccataaaacatattctcaaatttttgttctagtaaatggacttaaactaactggcatttgtggaacttactaaaacctgcataccttgaacattatggcacttgctaaaatagtgagggatgtaaacatcgcataatagatgggggacacaactgcggtattgaaagtgtccagtgcctgaaagtttatc

SEQ ID NO: 20125 - DNA, 1057 bp, Oryza sativa
aaacgaaactattgaacttacaatactcaactactcatttctcaagtgcaatgcaatgcccatgtgcattacacatttacacaagcagtaacatagtcaatctataaatagaaccctgtccaatgtctacgagcgaacagtttgaaacggaacaaggatgatcaggcgagaaggtggtcgtgcagccacccccgcatcagcgcgaacgcgtcctcggcgtcgccgtcgtcctccagcgactgcggccggtgcgcgaacccgtgccccctgccggcgtacacggcggccctggcgcccctcgcgcgtgcctccagcgcccgcaccgtctccaccccgcacagcgggtcgccgtcgccgcacacgaacagcacgggcgcggcgagccgcggcgccagcgacgcgtccatcctggacccgtagaagcagacccccgcgctgtaggcgccgccgccgccgccgccgtcgcgcgccagcgtctccaccagccggccgcccccgtagcagaacccgattatcccgagcttcctcgacacccccgccgccgtgaactcgtccaccagccagttcgtgcacgcgtcgatgtcgcccgacacccgctccggcgcgtgcccggcgagccacgcgtcgaagccgtccttctccgccttcttccacgggctcccccggaacaagtccggcacaagaacactgcgtgcaacgatcgagcaacgagagttgaaagaagcgagagagagagagaggcggcgcggcgtgatttacttgtagccgtggcacgcgacgcggtaggcgaagtcccgggtggcggagtcctcgaagccgaagacgttggagaggaggagcacgccggtgccgttgttgttcttgacggccttgaggaggtaggcgcggacgccgtcgcccttcgtcgacgtcgccaccgatgacgaggtccgcgcagttcaccatctcgcacgcctcgtcgttgtcaacgctcgacacctcggtccggccgctgcggcgcctggatacgtcctcccagattccgcggcaaggtccctgcacgggagctgggaaaccg

SEQ ID NO: 20126 - DNA, 1126 bp, Oryza sativa
tgcggaaccgggggtggcgcaacaggtatagcattgcaataaccagcagaacctggaatggtgtcacatacagcacaatggcaacaaccagggacaagaatatgaagatggcggtggcccgagggtctctccagctaagcaaagcatgggctctctcaccttgtgtcgccaggtcaccaacgactgtctgcacacgacctccaacactccttagtctatcgtagcgcattcttacaatgtccgctggcctgctgctagggaatgaatcaaactcctcatcaagctcatctgggtttgtaaactcagcatggcatagcttagtgtccatgtaaggtggatgccttggcttgtaacggtagttccataatccaatcatgaacatgtagaggaagatggtaggcaggatgagctctgggtagcagatcagtattagaaacaacatatgcaccaacacggttgtaattgggtttcgccagcttctgatgccatcataccacttggccgtcgctgcaaaaccacagaacagcgaggtgatacggtagaagttggccttgctgcggcggagactgaacatgtgcgatcccacatcgagcatgtactccacaacctccctgcgaagtggaggctcggcacggctaagcctcgccgcgacaatctgcattgcctggtgcctcaggtaatccaactgcatcactgagattggctgtgtgtagtgcatctttggcagcaatggacggccatacagcgcaatcatgttcacccatgccgtacatgtaaatcgcacagccaaatgcaactctccagtcttcttaaggccactgggcttgagagccaacaaagggtagaaatgggtgtacaccctgtcagtctccagggtagagagccggattctcaccttgccgatactctcatcccgggcatcgccattcttgccaatctggttattgtcaaacaccaccactgtaatcaccgtgcaaggatcaaacacctcccaagtatactgctcattccactgaggattcagagtgttgagaatggttctcgtgcgcacccacttcggtccatacttggcaacacagtaagcatcggtggtgcgcccatctttcccctccattggtatcaagtt

SEQ ID NO: 20127 - DNA, 1549 bp, Oryza sativa
aatgtatctgtatcaaataagatgaatcaagcaacacagtgtaagaagatggcatttggaagtatgatgacatgaaaattcaattgcctgtcatgccaacctgaaaagggtctctgcagacttggctgcggtgcaaaagatgatcttgctcttggtgcgttgtgtgaggaacggactcaccattttgttagccgcaatgtaccaccatggcacgttgatgaaaatctgcatgtcatccacaattcagttcattcaattctacaaacatttgaaaggtcactccaatatcaccacaaatgtacccttgcgtgtcatttctaaacctaggagcaaaaggaggaaggggttgaagggaaaagatccctatcttgattgcacatttgcacaaccatatctagtctagttatcgcaagacaggcactagtcaacttccacccattaatcgtccaatcatactgatcagaaagaaacatcaacagcatatacagctaaagatcctactagtatctttaaccaaagtacgtacattgagaaaactgatcaggtacaaacataaaaaccttcaagtattgagcaaagtgattctaattttgcgctgataatgatgaaacaattcaggaatgtaaagattgagaagttatagagaattaaccttcttggcgatgaactcggggtagttgtcctggagcagggcgagcgcctggcgggtgacggtgcggtgcttgccgagcatgggcggcgagttcttgaggtcggtgacctgcaccatggagcagatgccgctgggggagaagtcgagctggtcgaggatgccgcgctcgaggagctggatgcgccacttcaggactcgctcccgcttctcctcgtcgccgaaggccttctcgtagaggtccttgtcctggaactcgccgtagacgttgtagcagacggggtggccctcgcggtcggcgccgcggtagaacaccacgttctcgagctccggcaggccgaggtcggcggccaggacggcgtcgatgccgaagcgcttgcgccacagcaccgccgccttgagcatcgccatggcctccttcaccttgaactccctggcgcggaggaacttgagcagcacggtgtccgtgcgctcgtcgtcgccggtcagcggcacgccccatatcagctcctccttcggcgccgcagcctcggcttccgcggccgcggccggggcggcgacgacgacggtctcctcgatggcctccaccgtcttgctggtgccttcatcctcggtgaccacgacggtcttctcctccgtttccggctcggccggcttggcctcctccgccgccgcctccgccttgggctcctcggccgcagccgccgccgccgccttgggctcctcctccttggcgggctcctcggtcttgggctcctcggtcttgggctcctccgtggcggcggcctcagcctcagcctcggcctcggccttgggctcctcggcggcgggggcctcggcggccttgggttcctcctccttggccggctcctccgccttggccggtgggggctgcaggaa

SEQ ID NO: 20128 - DNA, 687 bp, Oryza sativa
tctgaaaagtgaaaagtttctcagggaaagttaccttttcaccaagtgcaaatgaactcaaaactggccacgcagccacgctgtgtgcacctgctatagtcctcgttgagattaaagaaaattttctgttgtttgttccctgtgtgcttgaaatgcagcttcatgaggagcagcggcgaggagttcgtggaggagtgcatcaacagggcggactgcctgacgctggcggtgaggcggcagagcaagggcgtcggcggctacctcatcagcacccggtggcagaagaacttctggctgctggcttgacaaatttttactgccaaaggcgagcttctctcctacttctacaagaagagatcaataagttcagtgactagtaactacaccaataacttgatccccaaagcccatgtgtgctgtctgtgtgtatgtatgtgtgcatatgcatgtgtgtttgacagtgtgatggtgtgttgtgtgtgttctttgattctatccctctttggttagctgtagcctctcactttgctgttgtaaagaagccaaaaaagctgaccccgctctccctgtaatcctgtgctgttctctgcgtgtctgcttgtttgtttgagcagggacggtatggtgcataaagtagtaagcactctacaatttgtattatgcggtgtgtttgtttgtatgtctggt

SEQ ID NO: 20129 - DNA, 984 bp, Oryza sativa
tatataatgaagagcaataaataaatccaataacataagcaacatgcctgtacaaaattgctcgagagaggagattgagatcaacttccaacgaaaaaatggctttcctaacttgatgctatgataactcggcattttacacataaactcacttgttcaaacatgtgtcaagttgcaaatgatatctgaaccatcctagggctgcaaatatatatagggctctcatatattatacatcaaatcccggcatggcaaattgtaaggcaaatgtctccacctgattccggagttcaataatgtcattattgttctccagacctttcagaaaatccttctgaagccttccatgctccttcaaaacaatacttgctatatgtgctgccctcaaaaggaattctgccattatctcaaagtcactctccaagcaacctctagttgtcatggcaggagttcctgcagcatggtgatgagcacaaaagaaatctactgttatgtacatgtcataaaacagcattgaatgatcaaccagtgtaaggagaactaaccaatccgcacacctccaggagaaatcgaaccattatctccatatattggtgttttattaagagagatatgacatgcctcacagaccttctcaaagttcttccctgtgcatattttaaggagcatggctaggttagaattatggagacaagcaaatacgcactccccctaccccaggcagcaggttcttttcagcttatttaccggattattgccacagattactttctccatgtttctaaaaatatgttttctcaacaaaaaaaaaagttcctgcaataatccatggattactgcattgtttagactatttgttctaagctactccctctgtcccaaaataagttcagttttcatctttcccatacataccaatacaaaaccaaaaagactagaatacctccactttatcaaatctcaatacaattgggctgcaggaat

SEQ ID NO: 20130 - DNA, 682 bp, Oryza sativa
tacttgttggtgaggtggctgccgagcgcgtcgagcaccgcgcggcaggcgtagttctcggaggcgatgagctcgaccccgcccgcctgccggcgccgctcccgctccatcagctcgtgcacgtccgggtccgcctccgtgagcggctggcatccccacgcgcgcacggccgcgcggcgcgcctcgagtcctcccgccgccgcccgccgcttcgccgcgggcgagaggcaggaggaggagcagcacggggatgagtcgtcgtcgacgtcgacgtcgacgtcgtcccccaccccgcgcgcgcggggcgggcgcgggggccgcggccgcggccgcttgaggaagagcggctggcccatgagggagaaccgcccctcgccgccttcggcctcctcctcccccacctcctcggcggcggcggcggacgagccctcgggcggcggcggcgggtggagggcgagggacaggtcgggccgatggtccatcccttcgcccgcggcgcggcgccgcccccccgtcgcgcgatcgagcatcagcagcaacagcggcggggtcgcggcattcgattcggacgacgacgtcgcgtgatttcgtgggctcggttcgcgtcgcgactcgcgatgcgatgcgcgattttggagttgggtggcctgggccaaattgcggcgtattggtgggtggctac

SEQ ID NO: 20131 - DNA, 692 bp, Oryza sativa
attcctgcagcccgttcatgatcagcgtcttcctcgcgtcgactttcagtttctcctctgaaaagaaaaaggagcagaaatcatcggttagtttgaactgcacgatcttgcaattgcagcaagattcagatagctacttctacatggtttctgaattttacctatgatgattctgaattcttccatggtgccgggcaggttgatcagcttgccggcttctgagctacggtttctgacgaatggatggcccctgtatatgctcacccgtggccagtgcgcgccgtctgatctcgcgctctggcgccgcccattccggctgtcccccgacgagccgacctcccggatgacggctgcggcggccggcgacggcgagtcgacgacgatggtgaccgggtgcgcgagctcgcgcgtcttcatgagctcccgcagctcgtcgaccgacaccgccgccgccgcctgctgctcgttgtggctggccgccctgtcgacgctggcgccgttgaggacgaggagcctggcgacgtcggcgtggccctcggcgagcgcgacgcggagcgccgtggcgccgtcccggtcctccgagtcgacggcgaggccgtgcttgaggagctcccggagcgtgtcgaggtcgccccggcgcgcggcgaggcataggaggtcgccggcggcgtggtgcgggctcgagacgcgcg

SEQ ID NO: 20132 - DNA, 1824 bp, Oryza sativa
aaattagtaaattcgattcaaatttcggattcaagtcgaaatttgagagtttgaatgtattcttttggtcgagagggcccagtactagccttaccagtgcagtcttcccttggagtcaccgacgtcaggatccattccaactttcaggagatcctcaaggaagctgctgttcccggtggctgccaccgtcagcagattgcacggtatgttgccgtggtcgtactcgccggcggcgtcctccccgagcaagtcctccaccttcatgtcgtgcatctcgatctgatgctgcacaccacaaaccacacatctcagttcagtagtttgctcggaatccaatccatggatgagtctgatcaccgtgggacgacggtgtacatttgtgtaactaaaactttttttcttctaatatattaatgtgtattcgtacaattcttttgcgtgttcgtgaaaaaaaaaagacgacggtgtacatgttcaccgaccttgaggaagttcttgatgatgacgacgctgtcctcgggcttgctctgcatggcctccttgagcgcggcctggcgcaggcgcagcagctggcacagcgtccgcgtccgcagcgtgaagctctgcgggcggtcgctgagcgcgctcacctcgccgaacacgcccctcgtccccagcgtcgccaccacccgctcctcggcttcgccgtcggagtagatcacctccacctcgccggacaccacgatgtagacgtcgtccggcgcctcgttctgcacgatcacgtcctccttcggcggtatgtactccggcttcatcttcgtaacctacacacgaattaaatccatcctcattgttgtttgtctaatcttcttctcttcgggggtgtttagatcagggtgtaaaattttgatgtgtcacatcggttgttatatagggtgttgcatggggtgtttgggcactaacaaaaaaaataattacagtatccgtcattaaactgcgagataaatttattaagcctaattaatccgtcattagcgcatgtttactgtagcaccacattgtcaaatcatggagtaattaggattaaaagattcgtctcgcaaagtaattgcaatctgtgcgattaattttttttaacctatatttgatacttcatgcaggtgtttaaacgttcaatgtgatatggtgtaaaattttgaggtgggatctaaacagatccattgtttgtctgaataaaattgagtatggttaatgtgtgtggttaccatgagaaggagcacttctcttgagacacccttgaagaggtagacgtccttgacgacggggaggaagaggtactcgcagatgcccttgcagatggatttggggagctgatccatcagctgctgctggttcaggctctctgccctgaacttgaggcacatgtaggccagtatctgctgcttcagcctaggcggcaggtggttccggcccacgaaattggaggcagcacgaatgctgttcctctacaagttaaaaaaaaagagtaattaaactggtcggtacatgcaactcaacaaacacatgcaggttagtaataagaattcttacgaattccatggtacggcgggtgccctcaacgacgaggttggtcatgttgccgatgaggtaggcggtgaggccgaggttgaagagcatgtagaagatgttgaagatcatctcgacggtgttctgggcgtgcatgtcgccgtagccgacggtggtcatggtggtgatggaccagtagacggaggaggtgtagcggatccacaggctcgcctcctggaagtccgggatcaccgcgccgatccacgtcttctccctgtg

SEQ ID NO: 20133 - DNA, 1719 bp, Oryza sativa
catgcaccgcgtcccttccccgcccgcgcgcgtgcgtcgcgtgctccctccgcacggtgagccgagccgctgacaagcgggtcccacccgggaccgcgcgtggtgagcccggtccaccggctctctctgtcctccctcccgcgcgcgcgcgagtttgggccgccttgggccggccggcccatttagctcggccagactgctccatttctcttgggccgcgccctagccgtccgagaaaagtctatattccctccctcccttcttttctttttcttttccaaaaaggatttaaataaatactttttcctttagaccaaaaatccaataatcttagaaattcaatatcttcccaaccgtaaatccgattgactccgttcaacttccaaaattcctcaaatctcgagatctatctaatggcacgcttagaggtcattaatagggctttatttttgccgtttgttgagttgtcccgtttcgcgtgtagtttcggagcccgaagacccgcagtgcgaggatttcgaggatcaagctccggatctcgagcaaggcaagccacctttgaacatcttgagcctatatttgaaatttaattatattgcttgcgaaatattatgcattgataggatcacacttaatctgttgtcccgtctgcaaggcagattggcagacctacctaatttgttacatttgatccttcctttgttaattgttataccatgtccccttgtaaccacccagttgcgcctcgatattcgtgcactctgtgcgagtatcgacggtcgccttcaaacttaaaatctgagtaacaacttgggtaaaactggagttttacaaaagacttggaaaacccgacacctgggtcggtgcttgcgaactaaatgaatttccaaaaccgcggaccggggaacgtaccaggtgtacggtttcccgctctcgcacttaaggaccgattcccttggaatttcatccaaacataagacaagtacgaccacatgggtggaatgggacacccctggctgagtaactagcttccacgccttccctctggccactcagacgccaggtacccttgtccgtacaacgagtctcagccagcgctgactcgcatggtcgagctttcggaggctcaggccactcagcacgacctactccttgaggcttaccgctcccttgcccgccgctacgccgctttggaggcctgtctagccgaggagggtgtcacctcagttgacactatctcttgggactcaggccgcctctgccacgccagccacctgtcctcccacagctcccgcggctctgccctcactcccagtggcccgcgctcccccagctcgcgtgcgccgtactcaccagtgtactccccctacccacacccagttagcccttcctacacccccggacacaccccagttgcttcctcccgccgtggcccacgctttatccgcaccgcgcggaagcgtgttgttggttcttccaacgtgttccgtttccactacccagctcccccaccgccagcggcccgtgctgctgctggccctcgacaggttccgccggtcccttcgcgtcagccgatcgacgtttcttcgactgaggagccgactacaggaggcagccaggccgacgaggagtagaggaggcagtcttcagcagccgtccgtgtgataggcccttttgttccgccaccaactcttttggagtcgtggcgaggtagtgcgt

SEQ ID NO: 20134 - DNA, 646 bp, Oryza sativa
  unsure (1)..(646): unsure at all n locations
ccctcgttacggtcaacccatgcaataccaccagtcggtcacccaggctaaccgccagccaggntacgcccctcgtcctcagataaaccgtccggcacctcagccacagcagcgtgcccctagtagcgatactgcgcctaacagtgttacctctttcaagtcaccgcagggaccgtcagcagttcagtgtttccggtgcaaccagatgggtcactatgctagacagtgtcctcagaatcctaccaacaccaactcagggcatgctaatggtagcactgccagaactcctactctagcggcagctcagtctcgtcctagctctcaggcaagtggacaaggttcacgtgcttccaacaactttggtcgaggccgtgtgaatcacattcaagcagaaaccactcaggatgctccagacgttgtgatgggtatgttctctgtcaactccgtacccgcaatagttctgttcgattcgggagcttcccattctttcatatcgcaagcttttgtgaaaagaaatggttggaaaacccaaaatttgcgtgtaccaatgatagtacattcccctggaaggaatataagggcaactcaaatatgcccggaagttaaccttagaattgaggaagttgacttcctagccaaaccgata

SEQ ID NO: 20135 - DNA, 669 bp, Oryza sativa
atatatgctgccattgtagattgcaaggttgcatctaagtagagagcagatagatagatagatactgcaggaggagccagcttgagaattgagatcgatcgacgacgagacagcatagctagccgccgtcatggaggctgctgtgctcgccgtggtgttgttcatcggggtggcgctgtggtcgtcgtcgtcgtcgccggcggcggcggcggcggggacgaaggaggaattagaagacggtgatgaccagcgaggtgaggtgacgtatgacgggagggccctgatcgttaacggcacgagagtgatgctgttctcaggggagatacactacgccagaagcacccctgaggtacgtacgtgatcgcctccactgcatgccttgaatcgattaagctacatacataatttagtttcatattggacattgctgttttttctgtatatgtatactccttttcgttaattttggtccggtggtttatggagttgattttgagagtttttcatcggttcttggcaccttagcatacaacatacttcttattaggaactccttaaaacacatagttcttggaaaatataatactgttccttccattctcgaataattgacgtagataatatttaagtttaaaatttgacggcttatctcttttcagaagaattata

SEQ ID NO: 20136 - DNA, 6266 bp, Oryza sativa
aacggatggataagagaacatttatgaatgtctgcatccaacatggctgttgcaacgctcttggtctgtttttcaacgatgcagcgcactggcgacagaagacaaatacaagctactttgagaacgggaaaaagaacatatacaatgaaaactttattcttatgcgatccaagatagaccatttgtaatcaactttagacgagcaattttacagtacttaagaaggtaccataagatatcaccttttctattgtaaatttggtacctcacaatacctaggtactaataggtactatgaggtaccaaattttacataaaaattttggtacctcatggtaccttatcagggactataaaaatgctcacttcataaacatatatttatactagtcgatagcctgcgttttgctgcgggatatgtttaaataatgcaaaaaaatgatgtggagataatgatttgacattgcttctttattaagttagttttaaaaatacaacaaaactgcaaatgatatgttatgtttgtatgatatttaaaatattctaaataataattgctatagtgggtaatgatgtgatatattttagctttaaaagtcggtgggcatcaactatatagatattacagatatgtctccgtttgtgcatattcaacatatttgtcaacccaaatattagtatattaagaggtacagaaaataccgctagctgtagcctatagtactactacaggatagcgccactcaaaactgaaaattttcaatttgaaaaacattttcaaattttgatttgaaaataggcaaggaaatctataaatatggtgcttcttcccaagcgagcctaatttgccacaattgcatggaaaaaccttctttccagttgagccgcttaactccgtcatgttagggcggccacctgggataatcattttccttacgtggttgggtggccagccttcaataattaccaaacatttctcatagacatctgcgagccgcctaaccgctttgaaaaactgattttagctgtccgctatctgcagaaatcttttccataaatcttttctatggtagtggcttaaacaaatctctaatattataaaaattgaagatgtttttgccggtattttggtacgtcgttcttgtttgagtcggtttttaatttcgctcacttttaaaaatatagattaatgtttgagtcagtttttatatttgttcgcttttgtaaatacaaaaggagtcgtataagaaatatttaaaaaaaaactcatatgctaacttgagatgaaagtcggactcctaattgcagctcatgattttctttaaaaaaatcaagtgaatttctagagtaaattttatcttagctaaaccgtataacaataataagattaaaatatctttcaccagttgcaatgcacgggcattttttctagtaaggatgatgtggcacaatgtgagagctggtaatgggttagagatgaaccctgagctcctttcgataagctcatggctttgattggcatgatatttaggcgagttgatgataactataatttggaagaaacgttaacgacatgactacaaccgtacgagacattattgtgttgcgctttagtgatcaatatacctctccgcgagtttttaatcttgccggtgcagatcaaccttatttctgcaagcaaatcaaagaaacaagcaaaacaagataaaagcaatctggattacaaatagaaatttaatacaaataataagttgggtttccgtaacgagcaaaccggcgatctaaccaatcacaagattacatggcaaatagcgaagctaaactttaatataaacaatacccaagaaaccctgaagggtaccttgttatttaaggaggtgggaggaccgccaaggggtctctagggtcatactccaccaggttgggatgcacccacatgggctccacttgtgccagggttccaaattgaagttacaagcctataggctcatcataggtgatgtagcatattgtttttgtgatttcaactgactaagatggaatttggagatgatgctagattcattggaaagagaactctgagagctttgcatcatgtactcacaagttaaaaacgaagcttctatgtatatttggtggctgttcgaaatcaatattgttgtaggtgactgaactagattccgtaccttttacggcttgatctcgatatctttcagtaaccatggtcacattagttggatgcacttgtatccaaagaaaggatggcatgtttctaactcctagcacatgaatgtaattctagtttttgcagccacactgccactcaatggctagacccacaagatgacccggtcgcaatcacgctagacgcacccgagaaaatgacccggtcgcgatcacgccacacgaacccctcacctgccgcgatcatgccacacgaccacctgcagtcgtcctcgctgctccggttttaaatgttcgctctggagcctcttgtccgctgccgcggcctccctcgttctcccgttggtgagccggtgagtgtcccgggtttttactcccatcgcattgcacccaaaaatttttttttgtgctgctctctgctctcagattcatcacaatttactgttcgctcacagtttcaggtagctccagggggcctatctgccgcggccctcgtcgatctggccatcagtgagccggtgagtgtccccggtttccatttgtttgcctttcttgctgccattttcttttttggtcctgcatctcacattgtactgttcgctcccagtttcgtcaggcaagaaaagccttgtcagctgccgccggccggccggtcggcggatgagacggtgagagagcctctcctccatccccagaccccagtgccgtccaattgcctatatctaatacttgtcgactttgttttcattccaggtgtatgcattccggcgttgcaacggaaacccgtatggaagctcgcggtggactgaaacttaacaggtacatcattcgtcccaaaatatagctatttttagcacagtattttatactaaaataaagttatttctccactttcctcatcctttcaaccaatcacaaccatttttctccacctattttttcttttcaaccaatcacacacttcttcaaatcattctcatctaatttcttaacctgtaccaatcttaaaaatagttacattttaggacggaggagcttcgttaaaaaaaatgtataggtaattaatgtttacattgctgttattaccgcagaaggatcacaacgacacttttcatatttgaaccgatctttcgtcacaaattaacttttggtcttctaaaacattgcctcaacatccataaaaaattcccagttataaaaagaaagaatatgagctataaatttaattaaattcatcttaagcccatgttttcggtgattatataaaatgcttcagttagagttttaggggagcagctcattttgatttaatcagtttttgctaaacgaatgaaatggaccgattaatcgcgactatatatccactgtgccgcacgccgaactgcccgtatctaatacgtacttctctactttgttttcataccaggggtatgcatccccgcgttgcggcgaaagcatgtatggaagctcgccgcggactcaaacataacaggtaattaacgttaacattaattaattgctgtttatcacctcggtaggccgacttgttttgaactgatctttcgccacaaacttatataaaaatatatgaatcggcatttaaaattctaagcaaacagaaggagcaacacagtgataaaattcaaaataactgtatgtatgtatcgccagagggcagaatatactccgttttctaaatatttgatacagttgactttttttaatatgtttgactgtttatcttattcaaaaaaatttaagtaattattaattctttttctattatttgattcattgttgaatatgcttatatgtatacatatagttttacatattttataaaaaaaaaaataagacgaacggtcaaatatgtgctaaaatatcaatggtgtaaaatatttagaaacgaagggagtacattatattaggaaaccttgttttgtacttactagtggtttatggggtgatttataattattttcataagagcatgcatgtttaactccctagctagctacacagtcgtccacaacttttatagctggcctgctgcagcctgcccatattatttgtcctgcaaagcgaagagcagtcatcacgcatcagtagggtagatacatagattatgcatgtatacggtacgtgagttagcataggcagctagcttgccctactgttatgtactctactcgaccacctgcagctcgtcgaccccggcgcgcagcaacaggccacgggcaaaacgccagtgaacacagactgctgtgagattactctgcggcattttttttttccaacagctttgtctcattttactctgtgccatatactcacaccttctcattttaaatgcagcaatgattttctacacctaactttaaccgtccatcttatttaaaaatattttaaaaaaaattaaaaacataagtcacgagtaaagtgctattcatattttatcatctcataacaaaagtactaactataaaaaaatttcaaacaacacggacgatcaaaattgggcgcataaacttatggttacacttaaaatgcgacggagcgagtatataatagcccgttataactagttttattagtcgacaaactagctatttttccttaaaaaacaaattaactatattttttgttgcgtagtgtgtttatccatgcaatatatatagcctacacctttttagttaataatcaactatgagaccttgcttttgtgggaaaaaaaatactacattgttagcgcaagggaacggcaaagccatgtaatggtacagttcagtagtaaattgtcggactaacagtagatcagatcgaaagccatttaagtttgttaatttgttcacttttttattgttataatatatatttgctcccgcataacatttttaattccttgaatatatcgctaaccattttaccaagaatttgtaatgttttctgaaggagtaacacaaaagtgaaagaaatacgaaacaacatttgacaatttaatttggcttagcggtaaaatttgtaaagttttctgaagtaacacaaaagtgaaagaaatacgaaaaaaacatttgacaatttaatttggcttagcggtagattgtaactgatcttaagcatccctaatgttgtaattattttgtacatttacagaaacttaccagtattatatgttgagatttgcgtagggtaatgtttggtcaggtcttaagatattgaaaaaaatacgtatatagttaatccataaaagaaggatgtattcttttttttttaacttggacatgtttttattatttttgctccatataatattctactttagagtgttcttttaattgcatttcatgatagttttctaaagtgtgaaagaaatccatctttatattctccctactatctgcagatgcagtacctccacgagcttgaaagaaattattagcactaatttgttgatcctggtggcactatcatatctagttcatgctgtcagtgcgcaatcactagatgaaccattcaggtatatactgtatattaaatgcttttatattgtcaacgtgcataaacataagttatttttgaattgatcttcctttaattaaagtagtttagagtataaaatgaacttttcctttgttaaataaaaaattggattctaaaattaattatagtaagaagaaaactttatgcatttctctcatatataattaagagaataaattttaaaacgtttttaccttatgtttagacatttcaaaataatttatacctctaacattatattttatcctattatataatattaaaatggatttaaagaataattttattttcttttagtacagatgtgatttatttatacactttattactttcagttaagcaagtttcaaagactttttttaagttgtaggtaaaattttctgcaatttaattgacgggaagaaatgattatttgaaacaaataattatgtccaattgtactttcctattgtgttcttcatgcatttctagtgctagtactccctccgtctcataatataaggggattttgagttttttacttgtattgtttgaccactcgt

SEQ ID NO: 20137 - DNA, 615 bp, Oryza sativa
agttgtagctgtctcatttggtgaagcttcagttctgatatttgatcacagctacaccccatgtactgaatctatgggaaacctcttcccttcccattgtatcgttagtgattttaaatcaaatgtactgcatttttccacggatgtgagaaaattggattcttctggaattggatgccatcgatccacaattgtagcgtctaaaaaaatgtcttcttgatgtttccgattcgtgtaatacttgtgatgcagccatttgcgttatagacattggactaatcttccattcttggcctgttcatttttccggtagcatcttggtgaagactgaaagtgattcacctggaaatgcagagatatgtgccagtcagtaacactctgtagattgtagacccatttttaattttggcgtggtgctaatataatggaagataggagtgtgttgatggaacggtatgaaattgggagacaattagggcaagggacctttggaaaggtttactatgctcgtaatcttagttctggtcactccgttgcaataaagatgattgataaggagataattatgaaagttagtctcgtggagcacattaaagagggagatctccataatga

SEQ ID NO: 20138 - DNA, 759 bp, Oryza sativa
ttgagatataaagcgttgaaatacactttattggatgatgagctttactatcgaacgattgatggggtgttgctcaagtgtttgagtgccgatcaggctaaagttgcaatcggcgaagtccatgaaggaatttgtcgcactcatcaattggctcataagatgaagtggttgcttcgacgtgcggggtatttttggccgacaatgctggaggattgtttttgatattacaaatggtgtcaagattgtcagaagtttggggcaattcagcgagcgccagcatcggctatgaatcctattattaagccatggccattccgaggttggggaattgatatgatcggtatgataaatccaccatcgattaaaggatataagtttatgttggtagcgaccgattattttaccaagtgggtggaagcgattcctttgaacaaagttgattctggggatgcaatacagtttgttcaagagcatataatttaccgatttggtattcatcaaactattacaactgatcaaggttcaatcttcgtgtccaatgagtttgttcaatttgccaagagcatggacaacaaatcgttgaattcttcaccttattatgcacaagctaatgggcaggccgaggcgtctaacaagagcttgatcaaattaattaagcggaagatttctgattatcctcggcaatggcatactcggctggccaaagcattgtggtcctatcggatggcttgtcatggatcgatccaagtcccgccttat

SEQ ID NO: 20139 - DNA, 2596 bp, Oryza sativa
tttatgaaatgacatacgacctcaaacaggatcagcaggcttcatttattgttagcttcattgactgtgcaaccaaagaatctgaatttcacttagggaccctgaaggttcttagaaatcaaacagataccgatcgagaagtgccatttggttggatcctacccagactaattgcccgtaaggggtccgttaccttggcttttaggaccgataacttatacttgatagggttcacagataaatatggaggttggtatagtttcaatgggtacaaagttttgatcccgggttccactgaattggaaattaatggaggatacggagagggtgggatgggtgggtttagaaaactggaagatctacccctaagcaggagacatgccttagatgctgtagatattctttgggattacgacccatctactacacccaaggaagtcctccaaaatgcaacagcaacactactgttagtaatccctgaatctgcaagatttaaagaagtgtttgagccggtcattgctgattgggacagtaatgagggcatcagcttaaaggaaaagattaaaagcataggactactgcataattggggtatgctttcaagtgtgggaatgatcggattaccatgggatagcagcgaagtgcagggctatgttaaaaaaatgagaaaagacgaagtttatataaatagcaaagaggatgcactccgacctcttaaggttttacttatgtcgaaagcaatgagaccaaaagaactcgtcatcaaaaggattaatgacccccagtcctagagtgtgatgtcaacaaacggtatgatcttcaacttttaatatgattggagtctaaaattaattttactctgctttgcattcgtaacaatagatccttggaagtaatgggtgctcatattttctttatgatcaaaatattagtaaatccctagaagtacatgcacctgtagtaggttgctaggatgcactcagaaattgtgtataacttctgtaaatcttgcacactcccaattactaaacttccataatacatgtactagatcgatcccagtcattataaaaatatttaaaataggtataacatatattcttagtttaatgtgtaccttttcttgtacaatgcagtgatgctttgaggaagtgatatttgctagaaggaccacaacaaattttagttgcagtacattggatggaactgtgtcgatatgtccagttttattgaattgaaataaatttggtgcactctagcaatgttagatttattgttgaaaataacaatcgtaggcgtatattatttacactgtggatcaattagcagttaggtaatgccaggttgagatgaattgctgttgtggtatgagtaaaggacgaaacactgagaaaattcattcagcacaaaggctgtgtttagatccaaagtttggatctaaacttcagtccttttctatcacatcaacctgtcatacacacgcaacttttcagtcacatcatcttcaatttcaaccaaaatataaactttgcgctgaactaaacacagccaaagtcctatttggattaatgcgtcagttgccacgtcttggcatgctagtactgctagttaattagtgtagtgctagtttgcttaatgcaaattagcctgcgccaaaaagttagccatcaacgaactgctttgccaaaaggtttctttgtcaaatgtgtgcgctcaaacaatattcgctagattaactagctagctgtgccccccgcgcgttgcgcgggcatatgatgaggcaaactgtaatatctcaagataagaaaagagcacatcacaagataacatgcaacactgttccacagtaatagctctgcatatcataagataagtgcaacaccgttccagggtaatagctcaagatcaaaaaggacatataacattgttctcaattttgagtgatgtaatcaaaccgttgaatagtctaacattagttgtctaaggacaagggacctaggctgtgtttggagcaatatgggttcctgacatgcatagtgcgcacggaaaatggagcggtccattagcgagtgattaattaagtatcagctaattttttttaaaatggatcaatatgattttttaagcaactttcgtatagaaatttttttacaaaaaaacataccgtttagcagtttaaaaagcgtgcgtgcagaaaacgaggcggaggagctgggaatcagtagttccgaacacacatccctaagagcaagtttaatagtatagccaactagtggctccaaatcatttatagttaatctaataatagccagttcatacaatagttaccaagcatatactacacaattaatatttggtcccacctatcatacacacatgcatcttggagtatgtactgcagctggctataaatctgtagcccactgctcttctttatcgtcttttattttctcgaaatatgtttatagctggtttataatatgttattgtacatactctaatatataagtgagggagcccttcacctcaatggctagcttttgaggtggcaaaggcatcttacgattctacagttggtattagagcctggctagtt

SEQ ID NO: 20140 - DNA, 9862 bp, Oryza sativa
ttagttggacatggaaaatcagtcttagcaaataatttctcctccaaattattgagctcacaaaaatcatcaaactgaacatagcccaaagtatttaaataagttatcaaattacgttcctcaacatcattagtaatgtgaacaacatgcttaaaatcagcacacaatgaaacagtagatatagcatgttcattcactagttgtggcatggatataagtgaagcattatcacacaactcttctttatcacaaggaacaacaaataaatcaacttgtgacaaaggcaaatcagcaattggttccactaatggttgctctattatagcatgaaaattgacacgtgtagctcagcttgagaatactcaccttcatttatctcagcaccaattagttgacgttgcaaactttcttcagactccgctggtgcaacatcctcttttttctcaagtacaccattctccttttgttgaatgttttgaactccctgcaaaacgttagtaacgggagagacaaaagattgctcctccaatgtttgcacatcatcattttgcacatcatcattgcataaggatataggagattcagaaataggagataaatcacattgttcatacttcctcccatttgatatgatccgactctcaatgctaccagcaagcatgaataggtgtccaatatgattatatgtcacattagcaagcaaaacctgaatttcagaattaagcccattgaaaaatatgcgcattgtattttcattgcactctttgagaccactgtagatgatacagacctcaaattcatgaatgtactccctaatagttctatcaccttgtttcagatgttctaatttctccgaagagtacatttgtaataagaagtcacaaagtgttttcgaatcatggttttgaattgatcccaagtttcaggtttattactcacataactccaccaaaagagagcagaagaggtaaacttattactagcagccttaaccatttgagcatcagaaaaatcatatttatcaaattcattgtctactgctagttcccaatcaatatatgcaacagaatcatacttcccatcgtaaaatagtaacttagattcaactcgtgcaaaattatagtcaggtacctcatatgcatcttgtggagaagtcgacatctctcgtcgatggtgaagaagccgatgttgagcatggccgtttcgtgtccccttgcgcaatcctgccatggttagtagcaaacaacaaacataaacaacaatatgcatggtcctatcaactactaggtagtggaagctccaatatcacatacactcaagctttttaccaagctcttacaagttcttaccaaagcaagcggaatggtgatgtacaccgactcaaccaagcacctcaatggaggttggatatatcgatgccttggcaaacaattgttgtacggctgcaatcaaatctgtggagctctgggtaggcttaaatatttagcaaaggatagcaattgcacaaatcagagaatgcaaagttgaataatcgtttaaagtcaagtaccgtgctagtcctaggctagaacgtactagagacgcaagcttagatacaaacgataccacaagataacaccagaaacaattgaagcacactctaatatatccaaattcagctcaaagatacaactgcttttttttatttctttcttcttcttcttttttcttcttcttgttttttttcttttttttctcctttttttgggtgcggctttttttttctctttttttagcacctttctgcctttttttttcgtttttctttaaaagaaaagactcaaggacctcaatgtaaggtcatagggactcaaatgtaaatataaaatatacagggactcaagtgtaaaagtccaaagtaaaattaaaaattatataaaaatggaatgctgaatttatacttgttccgtttctccaaacagatcttggaaccgacaccaaacaaaaattcaccaaggtgtttgacacaactcggaagaggcgaaaccgacttgagagggagggagtcggactcaggtaaagtgggcgacaagaggagatggcgccaaccggtcttcacgcgtgggggagggaatagactcggcccaagtggaaagtttggccttagatggaaactaaccaaccggattgatctaatatgcaaaacttcctctgaaaaccgatctgttatcctcttttctaccgatctgttatcttcttcctcacacacacatgccgttccatgcacacacatgcacggcacaaccaccgaacagaagcccttagatgcaactcaagaacttaaaaactaaccgacagaaacttctaaaaactacaaaaatagaaccgtggcagcgagctgattccattttcgtaaatcccgatgagagcaaacatacggcggcggcgatgatagtggtactaaacgtgactaaaaatcgaaactctaaacgaactagacgctaagaccagcaacacgacttgacgatgcaacacaaattcaacaaagcaaaaacggaaaagaacaatgcaatggcacaaatatagctaggtgatggatgtaactttttttttagctttttctggttataggtagataaaaactcaccgagcaacgaaaggtctgataccacatgatgaaccctgagttccactcgacactcaaggcagttgtttggcccgatctttcggtgagttatggataactacaatttgagagaaacattgacgatctgactacaaccgtacaagacgttgtgttgcgcctttgcgatcgatacacctctccgtgggttgctaatcttgccggtgcagatcaactttattcctacaagcaaatcgaagaaacaagcaagaacaagataaagcaatctgaattgcagacaggaatgaatacacacgataagttggggtttcgaatacaagcagacggacggtctagccgacacgcgcgctacaaaagtagcaatggttaaactttcatcaaaacaaaacccaattaaccctgaaagggtatctagctatttatggaggtgggaggaccctacgacgtcctccacctggttgaggcgtaccccacatgggccccacttgggccggggtcccagatgaagttacaagcccataggcccattacaggtgatgcagcaccttgttccctcaattgcgcatgtttgagaaggagtttggtggtgaggctggatactttggaaaaaggactccgagagctttccgtcaagtactaatgggtcgaaaacggatgtcgtatgcagattcggcggaagtttgaagtcagtagtgtagcaggtggccgaataggattccaacacttggaaaacttgatcttgatatcatcttgtttatccatgatgtgagcaacggttgtatccgtagtaaccatgggcacatcaacagtgttttaaataattcaattaggttaaaagtaaaaaaaaatgacacataagttgtttcgtagtaagtatgtctaaggaggaataagtttacattaatcactacctttcttataaataatggaggtatagttccaaccttttcatataaaaggttgtgtttctcaaatgtgctttcttgcgcactcattttaaaatatacaaataatcagtttgaaatatatattttatatttttataaataagaaaatacttagaacatgtgacaagtttttaatacacgcatattgttatgatgccagactcagtcgtcatatagaatataattacgattttagtctcttactgtctaaatatgtcactgattgttaggataactaatgctcaacatttaattttgaaaatatcaaacactcatattcaaaagaaaaagatatggttgtataattttatacgatattaacaaagtgcccgtagagtgagctataaatattaatcttggtggtttataaatatatacaatctagctactaaaaatttttttaggacaaagatcatatatttaaacattgtcaaataacatgttaagtaaaagtcactatatatccctacggcaataaaaacaataaaataaaaaataagatgtccatgcatgttttattccttcacatagcatcgagccaatcaagctgctaatgcaaagtttttttggttattatttatgcattgattgatgataatttgatctaggtgcgttagtaaattttcaattcctgtgttttctatgctccattgaaacattcgttcttttcaatactctactttacacatgtattattttcacacttttcaattttttttttcaatgctgtgttacaaaggaacctttaatttctttcaccgagagacaaagtcataacatttcataattgtaataacacaaattatgatagcttaaataagatgctcgcgcaaatgcgtgggctaccttcctagtttgtattaattaatatataaaaaacagaatacaactttaaggagttaactaagataaaatagaaatattaaggctagagttgaaacctaataacaaaatgtgatttcacatagagtgctcctcgccagtagacatgttgctcgaataaatatagcctctgagcgtcagccatggtccctgcaccatccccttatctaatgaatgatctctcctcccatcattccgttgctgatgagaagacatgaaggataagcggcgacggtggacattctgattccttcaagacgggatccatctttcaacgctgtaccgtccggtgttaacaaataagatcttaaacacctcgtagtgcggtgatacggtggggtcgaagacgatgcattctttgtcgaagaacccaaattatagctcgggttagtggcagggcaatagtggcaagctcacccacctccgagtggctgggttcaccacgaggagagagaaaagcaaaaggaggccgttacagtggcccatgatggtgggatttttttcacagaagtgctaaacatcagtcgactgaaaacctacctccaaatcttgcaaattttggttcactagatgtgcttcgtgattcatgctccagctgcttcttctccaactttgtcacacccagaaattcccgaatagatttccaaacagaatgtgcattaaaacccccgtctaggaccggctggggtacacaaatgacaaaattgacacacagattcacgtcttacaaacatcataaaagtcttacacaaatgcagcggaaaattgaaagataactggagctaagccttgacttggactgcagcgggaacaccactccacaggcatcctcgacggcacggatgaagcctactcctcggaaaagccaccatctgacgcgtactcaaactctggggttttgggggaaatagagcaagactgagtacaaccaccgtactcagcaagtcataccggaatagggggtatgatgcagggtattatcaaaggatagctagagtggttcatttgcatacgagcatttataaacagtagttgaaagcagtaaaaacagttgtaatagttactcaatattaaccatccactgtccaacgctacaccacgttgcaacaggcccaaccatccacctgagctaatcaattccattagactagactaaggtgagactaatcacggtgaatctagttgaccgcccagaacagcgggcacggctgttcgaatagttttactctgatcagaggtgtacaactgtacccacaagacacagccccacgacacgtttccgtgcgccgacatgccaccacgacataccggaaagaggccgtgacaggacccttcgcataaccccctctaatcaagcacaccatacctcaggtttcacccccgtccccagcgggcaacgggcagtcccctctcgtgcctaggtgaatccggaagcgacagaggccgtcgcagggcccgccccactccatcacgcccacccttgcctggatgcgtcagctagaggaaagctacactacaagcccagccgttgcccacgctggcttgtggtgagtacgaggaattcttccagggtttcccgcgaaccggtccttaagtgccatgggtgcgaccatcaaaaccatacacccacagcccaccatttagttaattttaattaaccaacaccggagcggtgacactaaaccaacatgaacactaaaacctgaagtctagtcattaatgtgattcccccattgtgtgctagttgaactaagcatggctaagcaatccctagtccaatatctagtcatgttatatcccaggctaacaaaggaacatggtacaaatatcatggcggtaacagtaggtaaacatcccatggtaacattataaaacaatgcaatatttaagggaaaacgatagagcatttgtaatataggttcaatatgttcaagtgacaagcatgacttgccttgctctgctgctggaggaaactcggcgactatttcaaagtacaccggagcgccggaagagccgcaatctaagcgacatacaaagcaaacaatacaaacaggccataagactactgaaacaaagaacaaaattatttttaatggattctttgcatttttcttgatttactgagacttgaatgggcttaaacagagctcggatgaattttctatgaattttagaagattcactaagtttttactataaacagaaaaacccttaaatgatttattgtgcaataaataaaccctgggagagagagggggcggcgccgacatgcgggccccacatggcagtgactcgggtggcggtccgcggtggaccggttcgacggaccgggaaaggggcggcgcaccacgtggagctaacgtggcaccgatgcaggggccacgcggcagccacgcgggcggccgaacggacggccccgatcgacccggggtggatcggacggcagaggggtggcacgtggccggcgcacacgggtggctcaagccggcccggcggccacggcgcgcggcgacgtggcattgacgcagcggtggcgcaaggcggcgaccggctggcggtggagggcggcggcgcggcggctaagcggcgcgcgagagagagagatggagaggaggatgggcctcaccgaagaatattgacgacggcgagcgacggagggcgatggcgacggcgggacgagctccgggatcacctaagggaacaaaaagggaggagttagagagggggagagaaaccatggatggctagggtgccggccatggcgaagctcaccggcgtgcggtgcgaacggggttcctgcggcggaaaacggcgacggagaggcggacggcgtggccctcgggctcgtgaacccgaccgtgacgatggcgcggctcgccatggcggctagcggagtagcggcggcggcggcggagtggagggcgatggcgctagggcgatggagggcacggggagctcggcgaaatggagaaaaagagagaggggagggcggtgatgcttaaatgggggagagggggctcggacgtggctgggagcggcccgatttcgctggccgacgtggggaggtggaggtggagagagaggcgggatttgaaaatcgaatcccggccgtctcgagcgcggacgcgggcgggagagagagggagtgggtacaggagacgaggggaaggcggcgacgtgggcgacgtggctccgggaggcgagagcggcggttgcgggacgcagcggcgccagccagaggtgggagacgggcccgacaggtggggcccacctgtcggtgaccctaggggagaggggcgtggggcagccggcttagctgggccgtggccttcggccggcccagtggggagggggagggggaggggaagagaatgggccggcggcccattcgaaaagaaaaagaaaaaaagaaaaaaagaaaaagaatttctagggattaaatattgcttgtgctcatttttaattggttaaaattatttctagatctccaaaaattccattaaaaatcttgttagcatatttcgacatgtagaactcaagaaaaattccacatgccaattccgattattatttacattactttctttagggtttctctcttgcttttacaccgatattttgttgagaccatttataaattccatttaggcttgggataagaacttcagggtgtgacaaacctatcccccttaaacggaatctcaaccccgagattcggaagagctggcgaagaggtgcagatgggcggccttcaactcgtcctccctttcccaggttgcttcttcctctaagtggtggctccactgaaccctgcagaacctggtaaccttatttctggttctcctttcactggtctcaagaatacgaactggcttctccacataagtgtggacccccatttttataacaggaatcaattgtgtaaacagtaccatttccctggatcaagtagtctggtacacacgaattcatagctaaaataccaagtgcacatacacgagtgtctagtacgaattattacatcataagcccgcaggcatagttttaaatcatcgaaccgagcggtccagaatacatcccaaaaatagaagtagataaggcagcggagttaaggcagcggcacgccattgccacaggcaacgaccgtaactaagacctactgagcgccatcgtcttcatcaccctcctggtagtaagcgtaggggtccaccgaagcttcatctccgacctctgattaagtttgtatattgcaagggtgagtaccaaccgtacccagcaagccaccacagcaacaacacacatgataaagggtattcaaggaatggctatggttcttttgcacaaagcaagttttgtaattcttttcacaagcctaagacctagcatagactgatcaagttttaataccagtgttcgcattagacaacgacggttctatccaccatccattgtgatcccaaggatagcttcccgccattgaatcgtcatggttttctgaggacgtccaccttcccgcctctcaggaagtggctccatcagtatagaaatcattatgcaatatcccatcccatacaagttaagaatttagagtctagccaagtgtaatacatgtcccggtgcttaataaccgcgagcacggctattcgaatagatttggtttactcacactgcagtggatatacactttacccgcactccacgattgcccaacacatgagcctcatcccaacacatgagactcgtcacggcaaagcttttcgataaccttgcattggcagtacccgctccatgaacttaaatcctcatgcactctaggcgtccatgtttctagcagtgagaggagttctggcgctcccgggaaagagaagtctcacacacatattaaattatggttcaagttaagttctctctcacacacactcatggcagtcctaccaatggcgacaccgatgtagggcacgcctctcggccctacctcaacggctgtcccaccgtagcgcacctgcctcactcggggtgaaccatctatgcagggatactgcctccgctgtcacgtcgcaaaacgactctaaaatacatcctctaaattatgcctagaataattaaaatccgtgtgaaagcctccaacaattaaaatgtggaaagttaaaagtcaaataaggcttggaggatttttgtatatttcctaaaagcctaaaatgcgtaaataaattttagtggaatttttagagcacaaataataattattaagaaataaacaaagttaaaatgattttataaaaagaaaaactctaaaaagtcccctttccctgcctctcccacttgggccggctcggcccatctccctccccctccctctcctctccccgcggcccatccggcctctccccgcgcgcgcgccgctgacggg

SEQ ID NO: 20141 - DNA, 12803 bp, Oryza sativa
ctaatcccgccggcgccattgatggagcccgagagcgccgcgccggttttcttcccctccggccgccctctcccccttccaacccaatataaaccctccccgcacctcctccgttcgtttccgcctctcgccgcccttcctcctcgccggaatcgagctcgcgccgtcgctctctctctccgccgtcgccgccgagctccagtccgccgccatcgtcgccccggaccacctcccacctcggcgccgcctccttcggcttcgccgcatcctcgccgacctcgtccacccctccgtttcgctcgtcgaccgtcggagcgccgccgtccccgtctacccgagccgcgccgccgccttcctccgctccggccgccttttcgtcgtcgccgtcgacctagggtgagccgtggaccgccgcctcgtttccccctttccctcccttctctcggccgccgctccgccgtgcctatggccgccgccggcgaccataggggcgcgggcgcgccgcctcccgccggccgcgccgccgtggccgccttcgggcgcaccgagcggctgccgcgtggggcccggccgtcagccgccggcgccctcgggtgcggctgacgcgtggggcccacggcgccggccggtgtgagcccgggtgcacccggttcaccgtggaccgtgaggctgccgtgtgggccccactcccgtggacccggtccgcgcgccccctcccctcggctgacgcaataaacttttgtttaaattaaaatttaaatgaagaaattcgcaaatattcacttaaagagcatataaacttcaaatagccataacttggccatttgaactcggaattggaccgttcaagtctctaattttttcttaagaagtcaagaacccatttttgtgctttgttcctgcttgttatatggagtttattagagtaaaagccttttcttttccgttggtcgtgtagacgctgcagcttcggaagatccgctcttcgtgaaagttgaagccgacggttgggaaagcgagcaaggcaagtcacatcatccttgaacatattgaatcccagtttataaaattatgttgatttaaattattgcattatcgctttgttcaccctagaataaacaaaaccccaactagtggacactctactaatggtaccactagtataattttagatagatgcttcgccgcttaattaggcaacattaggtggttttacaactctagactttgggatattcatatcacctggacactatggaatggttggattattgtgtaattggattcacacctccccatctattcaaaatcctcaaaatggttttaggctggtctcggggtgcatggttttgatagtagcacctcggccataaaggaccggtcttcgggcctctgttgcaaagcactaccgtagttccacatgtctagtgggtaaggcttagtttgtggctcagtctggttataaacaaaagtacacggatggagatggacgaagtcgggggtcgatggacatctctaggataaatgaaggctacacgagctgcggcccggtagtcgagatgtcatggcacagggccggtgtcctgctgctaggggctcagtcctgcctacctgtcccgggggttccggccgtaggtggggttgggtcggtactcttgtctatggctaggatgggttggaaactatgtcacgtcttccgtctgtataccgtggtggtatgcggcacgtggttacacgtgaggaagatgtgtcttgtgggtaaagatgtacacctctgatcagagtataatctattcgaatagccgcgccctcggttatgggcaagccgagcaatgtacccaagttagtgttttaattcttaaaaccttcttaacaactaaaatgtggaatggttgccctaggttggcttggaacgagctgggacccagggtcgggttgtcagttcggtctgaatcatcgtaggccttgggttaaggcaggttcgtgtgggttcacggccttgattaataatattgtatagctctggaatcgtgtttacaaaatagctttgagcaactaagtgtcttttaatgctgtttactgcaaaccctaaccctttatattataacccccttgtactcccttgcatttatcctgcacttgtgggtgtgtcttgttgagtacggtggttctactcagtcttgctcaatttttcccaaacccagaaaaggagcccctggaagatgaaggctttggtgtctagctcgtgcctgccatcaagcgcctgtggtcgtcgccctagtcttccgctgtttctcatttgtctttgtgtgtgctgggccttcgccgcccatgtaataaattaactatttacgcttccgcttgataaactctgaaatgtatcaacttttggtgtaccttgcctcctgggacaaggaataatacacgcacgtaaggaacgcccgttgggttaattccggtcgtgacatccgctcggctatctaatccgctaggtctatacccattcaagaagtacggttgtacgggggtcgtttcatgcttaacttcatggctcggtccttaattgaccggggacggtactagccttttccatatatcaccaaaatcctccgtccgccccagtcgaaaacagttgtttagttttatttcttctttcacaaatcatgtcatcaatatcatggcaatgtggcgctcatgtcttcacatgccgcatctcaattaccttcccaaaggtaattacccaagcatatatcatttgataaatatgagtgtgcatgattctagaatagcatttctaagcaattgtcataattgactagggactcatacgtaatcatagttacaaagatttaaggataaacaataatcaaggcatggcataatcacaagtgggatgtttatcattgcatgtaattttatttgtaaacaaaatagtttcgcaattgggatcaatatgttcaaggaatagtgatgacttgccttgctcaaagtcttgcgggtcttgaccttcgcttggatccgcaactccctcgggctctatagttacgtgcgaaaatctatttgaattcagttataattcaaataaaaatccaagtaaatccaaatggaagtcgaatgcgaaagtcgattcttttatattaactttactattcgcgaactagggcaaacccaatttcgatttatacatcctaaactattttgcgggtataaatattttgttatcataagtttttaatctaatctacccaagcattatatccatataataggttagaaatttctatcgtgagctaaatatcggacgaaatcctaaaattatcttataatattatacgatttaatttagtctatgactaaacgattaaatataatatacgtctaaaattcctagtaattaaatccgagtatctaccgggaattgatcacctatagagattaccaaaacaatctataattatattaaattttgcaattctacgactataattgatctataattaaattctaattattttaaattttctaacttccctaatctccctctaatttctatttatttttccttttctttttctctcctcttttctttcttttctttttcctccctccatttctttcttttctcttccttctccctcccggcttctcccttcctctctctctcggctcaggctacccggggcggcgacggcggcggaacgagggaaggggcgacggcttaccgacggtggcggtggcgacggcggcgcaaggcgaggcgacgctcggcgcggcacacggcgcggcgcggcggcaccgagggcggcagcgcggcggcacgaggacggcggcgcagtggcacgaaagcggcggcgcggtggagagggaagaggggaggaggagggaaatggagtgggggaaaatggagagggggtggggtatttatagggaagagggggagaaggagaggggaaggggcggcggcttaatggcgacgtgacggcggcgcacggggctcgggacgacggcgacgcgcgggcggcgacgcgatggcggcgcggggctcggagcggcgatgcgacgggcagcggtgtggggctcaagacgggcgacgcgacgggtggcgtggggctcgacgtggcgacgacgacggcgcggggcgtcggcgacggtgagggcgcgcggcgatgggacggcgatgcggcggcgacgggcgacgcgacggcgacggcggagcggggctcgagacgacggcgacgcgcgcggcgcggcagcgggaccggtgacgcgacgcggcagcggcggcacggaagcggcgacgcgacgggcgagcggcacggcggggcgcggggcgcgaggcggctaggggacgggcgagcggcgtgtgggcgcggggcgtgagacggcgaggggacggtgtgcggcgacgggacgacagaggggaggcggagcggcgagcgacgcgcggggcccgaggcagcgcgacagaggaggggctagggaacgcgatcgaacacctagggagcaatgaacagtgtattttcctatttttcccattttagtctatttcttatataaatttgattccacaattcctaatttttgcatatttgaatattactcaatatttgtgttatcttaactaatgaattcaccctaaatcaatattactcatattttatttatataatttatttgaatttttaattagggttaattcttattctgtcgcatttaaatttaattgacactattatggtcgcgataatattttatttatttctatccttacataatctttattttaaattataatttatttatttctttaaccaacctaattttagggttaattcctaattaatttttcctctatttgtgatcgatgaactccgagatcataatccaataaaatcatcgaacaaaatcggcatgatgcaatttatttaaaaagttttcgcaggtccatatttttagagttttgtttttattggtcaaattttcagggtgttacaataagtcaggtcctcctgaatgtcaatgtgctccgaatcggcttgttctttgggtaccctcaagcacttctttaactgggacacatggaacacgtcatggataccagccatgttggatggaagttctagctgatatgcaacttatcctcttcgttccaagattttgtatggtcctacaaagcgtggtgccaacttgccttttatctggaagcggtgtactccgaggagcggagtgacacggaggtacacaaaatcccctgcttcaaaagtgagctcccttcggtggttgtctgcgtagcttttctgtcgagactgtgcaattctcagcctctctctgacggtcctgactttttcctctgcttctattagcacttctgttccgaacagctgacgttcgcctatttgatcccagaagagaggtgtccggcacttccgaccatacaatgcttcgaacggtgccatttgtaaactggcctgatagctgttgttgtaagagaattcagcataaggcagacttttatccaaagctccaccaaaatcgagcgcacaagctcgcagcatatcctccaagatctgattgaccctctcggtctggccatctgtatgcggatggtaggctgtgctgaaattcaaacgggtccccaattcttcctgcagcttctgccaaaattttgaggtgaactaactccctcgatcagatacaatcttcttgggtaccccatgcagacacatgatccttgctaagtacagctctgccaatttctttcccgtctatgtggtatgcactggaatgaaatcggcaactttagtgagtcgatccacgactacccagattgaatcgtggccagatgatgtctgttaacgaccaaatttggtaacctcaatatcggagatgaagattagatcgaagtggaatccaaaaccaagattgtttcggagacagagtaagaatcggctggagttcagatcggctacgtcaaaacacggccgagttcaacttagactgggttaagtgattgtcacgtcctgataaattcatcccaaaataaaaatcattttctaaaaggaataatagaattaattaaaattcgaaaagaaattggcaaacactaaaatacgtacaagaaaaattcgaatgtggtccggagaatttttgttaaattctccttggtctaaaaggagccctcaaattttacttgaattttcatagcaccggaaatatttattaaacaacaacaacaataaacaaagttgaaaaggttttataaaaagaaaaaccctaaaaatcccccttccctctcttgggccgaatccggcccatctccctccccttctctcctctcccctgcggcccatctggcctctccccgcgcgcgcgccgctgacgggcgggcccgcccgccaccctcgctgacgggacgggtttcatccccttcctcccgccgcttccgccgctccgcctgcgccaagcgccgccgccgaatccgccgcatcctgtcctccccgcgtgcaatcaatagggggaaattattccccgtgattccctccccctttccccctaattttccctccctctctcccttggattcgtttggaaaccctcccctaatcccgccggcgccattgatggagcccgagagcgccgcgccggtttccttcccctccggccgccctctcccccttccaaccctatataaaccctccccgtgcctccctcgcccgtttccgcccttaccgcaccgtctccccgccggaatcgagctcgcgccgtcgccctctctctcctctgtcgctgacgacctccggccggtcttctctgctcgccgggaccgtctcccgccccggcgtcgcctcctccggcttcgccgcaccgccgtcgaccccgtccaccccctcgccgagcccgcggaccgccggaacgccgtcgaccccgtcgacccgagccgcgccgccgccttcctccgctccggccgcctttttcgtcgtcgccgtcgacctagggtgagccaaggatcgccgcctcttttcccccttcccttcccctctctcggccgccgctccgccgtgcctatggccgccgccggcgaccataggggcgcgggcgccgcctctcgtcggccgcgccgagtggccgccgcgtggggcccggccatcagccgcccgcgccctcgagtgcggctgacgcgtggggcccacggcgcaggccggtgcgagcccgggtgcgcccggtccaccgtggaccgtgaggctgccgtgtgggccccactcctgtggacccggttcgcgcgccccctcccctcggctgacgcaataaaccctttttaaattaaaatttaaataaagaaattcacaaatattcatttaaagagcatataaacttcaaatggccataacttggccatttgaactcagaattggaccgttcaagtctctaatttttccttaagaagtcaagaacccatttttatactttgttcctgcttgtgatatggagtttattagagtaaaagcccttttattttccattggtcgtgtagacgttgcagcttcggaagatccgctcttcgtggaggttgaagccgacgtttgggaaagtgagcaaggcaagtcacatcattcttgagcatattgaatcccagtttataaaatttttttgatttaaattaatgcattatcgctttatttaaattcctgcgttatcactgttttatttagccatgcctatttacctttgttatgaccttattattattgctaatgttattattaccttgttcaccctaggataatcaaaaccccaactagtgggtactctattcatggttccactagtatgaatttaggtagatgcttcgctgattaattaggcaacattaggtggttttataactttagactttgggaattctcatatcatttggacactatggaatagttggcttacgttggaattggacacacacctccccctctattcaaaaccaccaaaatggttttaggctgggctcgaggtgcgtggttgggttttgttagtcgtacctcgggtactataaggattaagctcgggcctctgttgcaaagcagtaccgtacttccacatgtctagtgggtaaggcttagtttgtggctcagtctggttataaacaaaagtacacggatggagatcgacgaagtcgggggtcgatggacatctctaggacaaatgaaggctacacgagctgcggcccggtagtcgagatgtcatggcacagggctggtgtcctgctgctacgggctcaatcctgcctgcctgtcccggaggttccggccgtaggtggggttgggtcggtactcttgtttatggctaggatgggttgggaactatgtcacttcttccgtccgtataccgtggtggtatgtggcacgtggttacacgtgaggaagatgtgtcttgtgggtaaagatgtacacctctgatcagagtataacctattcgaatagccgcgccctcggttatgggcaagcctagcaatgtacccaagttagtaatttaattcttaaaattggctcaacaactaaaatgtggaatggttggcctgggttagcttgggacgagctgggacccagggtcgggttgccagttcggtctgaatcatcgtaggccttgggttaaggcaggttcgtgagggttcacggccttgattaataacactatgtgtaacatcctgaaaattcaatacaataaaaatcactaaaattttgaactttttaaaacttttgcatcatgctggttgttatgattgctattgcttgccaaaccataaatgatcacaaagaaagtaaagtaaggatcgatatttaaacaatagatataatttatgagaatatatttaatcctacaaataattatgcacaagatagtaaagtcaaatattaatttctattacaaattacaaatcaggtattagatattcgaaccatgattgatagcttgatgtcacaattagctaaagaaatagtaagattaaatctaattcatttgaatcgaatctcacatgaaatataagaacacatgaaatgatgatcaccactatagtgatcgtgtttataaataagtaattcaccggaatatatagattgatacttgcaacatgtcgccgagttacccatgacagaaaaatcactcatataaaataatggtcatataaataaattaatccttatatataaacaagaatatgtgagtgtttaaaattagattaatgttgtaccgagtcttaatatactatttatagaataaatagattcaacctatccgtgtaaaatatattgctataagttcattcaatgtgctattgtaataataagggccacactaggatattttagaaccctcaaagcctccaaaattatctaggctaattttagaattagacctcatttaaataatacaatagaaaaatatatataagaataaaatatgggtaatattaaaatttggtaaactttcatctaaattaaaacatatattgggtaaacctcatttatgtaaaatttggatttatagaatgaaatttatacaagggataaactaaaatcgggttaaatagaaaatggcactgttcattgcgcctaaggtgttcgatgtggtccctagccttccccctcctctcccacctcttcccctagccgccccgagcccgtccatcgcgtcgccgctgccgcgccgcgtcgccgttgcgtcgccgtcatcacgtgccgccgcaccgccgtcgccgtcgcgccatcgccgtcgcgtcttgtcgccgccgccgcaccgcgcgtcaccattgccgctgccgcgccgcgccgccgtcgcgtcgcctcgcgcctcgcgcccgcacgccgctcgcccgtcccgtcaactgcgacgcgagcctgccgtctcgcgccccgcgccgctgctgtgcgccgtcgccgtcgcatcccgtccccgctgccgcgccgcgcgctgtcgccgtcgcgtagccatcgcagcgcgccgcgagccgtcgccctcgcgctgccgcgccttcgaagccccgagccccgtgctgccgcgcgccgtcccatcgccgtcgcatcaccgcccacatcaccgtcgccgtcgtcggtcgcatcgtctcgagcccctcccctccgcgcgcgctgtcgccgtcgctcccgcgttgcgccccgtgccgcgtcgcctcgcgccccgcgcccacgcgccgctcgtccgtggctccgccgcctcgcgccccgcgccgcgtaatcatcgcatcgccgacgtgccgccatcgccgcgcgccaagccccgtgccgcgccgcgccgtcccatcgccgcgtcgccgtcccgtcgacgctccgccgtcgccgtcgcatcgcccgtcgccatcaccgcccgccgagccccgagccgtcccgagccgcgcgcccgccacctcgcgccccacgctccgcgcgccgtcgcatcgccattaagccgccgccccttcccctctccttctccctctcttccctataaataccccaccccctccccacttttccccactgcatttccctcctcctcccctcttccctctccaccgcgccgccgctctcgtgccactgcgccgccgccctcgtgccgccgcgctgccgccctggtgccgccgcgctgccgccctcggtgccgccgcaccgcgccgtgtgtcgtgccgagcgtcgccttgccttgcgccgccgccgccgtcggtaagccgccgccccttccctcgttccgccgccgtcgccgcccggggtagcttgagtcgagagagagaggaagggagaagccgggagggagaaggaaaaaaagaaaagaaagaaaggtgaaagaaaaagagaaggaaaaggaagaaaagaaaagagaaaagaaaaaaaagaagagagggtagagtgggccccacctgtcagtcactatagcttgtggataaggttgtagtataaataaatgaattaggaacagtagccttttacaatttttcggatttattccaatttgaatccataaactagcgtaacttattcgttttaactccgattcgagtgaaacttgaacctaaattcatctaaattcataagcttaccaatggtatacaattaactatttaataaaatatatttataattataaattaattaatatcaaatgattagataatagttaacctaaatagtgtgccaataaataaaaatggatattgtacagtagaataattatccttaatatgttttgtcactgtagcaaccacataaattaagtataatcaatgtttgaaattaatggatatataggaaaatattagtgccatttattaatctatgtccaaatataattaaaacccacgacttattagttatttaaatagagttagccttataattattaggtaagtaaaatatagatacacatagatcggtcctaagcttgtttatggcaaataataacagagctagtgtgattaaatcacctatatgaaattaatcaacgacatatcccatataatagcatatattaggagaggtgagcaacccttagttaaccaagcagtaaatagaaactattcaaataaatgattcaatatattaagatattgtgcacacgtatattgtacatcccattatagatatatggtatcgtattaatttgcttgttgcatatattaatttagagggagtataagacaaacatgaatattagataaatactagctatacatcttgtcctcgtataattacagatcaactgtaaatttggattattcattgtaaaattatgtgatgggataatccgtaaccataatatgattaacctaaacaattctaacatacaaagcaggggtaattgttaaccttttataatttattttgacaagtgaaatatgtacataattaaaataaagcctccattaataaaataataatacaaatgattcacagtaattatttgaccgatccaaaatccatccggcaacagaacctctagtgtataaccgtgctatgtagataaatgcatgcctagccataatccttccatagccatttgatagactaaaccaccgattagccaaatatatatgtatcctataaatgctatgttggttaactcctaaataggccacgttgacaatagaaagattaagaaaccttagcccctagcgagattggaatccattagcagacatgaatagtatattttgttgtgcatatttggttgttatttgaatattggtttttcttgcgtattatagaatttatgtatcggttagtcgtgaggcaacgtcagcaacttccaggaggtgaaggttgatcaagaattatatcaagaataaggactatcctgagcaaggcaagtcatcactattcgttgaacatgttgatcctaattgcgaaattgttttgtttacaaataaaattgcatgcaatgatgaacatcctacttgtgattatgccatgccttgattattgtttacccttaaaatccttgtacccatgattacgtatgagtccctagtcaattatgacaattgcttagaaatgctattctagaatcatgcatactcatatttatcaaatgctatatgcttgggcaattacctttgggaaggtaattgagatgcggcatgtggagacatgagcgccacattgccatgatgttgatgacatgatttgtgaaaggagaaataaaattaaacaactgttttcgactggggcggacggaggatttgggtggtatctggaaaaggctagtaccgtccccggtcaattaaggaccgagccatgaagttaagcatgaaacgacccccg

SEQ ID NO: 20142 - DNA, 2430 bp, Oryza sativa
gtcgccattggtaggactgccatgagtgtgtgagagagagaacttaacttgaaccataatttaatatgtgtgtgagacttctctttcccgggagcgccagaactcctctcactgctagaaacatggacgcctagagtgcatgaggatttaagttcatggagcgggtactgccaatgcgaggttatcgaaaagctttgccgtgacgcgtctcatgtgttgggacgaggctcatgtgttgggcagtcgcggagtgcgggtaaagtgtacatccactgcagtgtgagtaaaccaaatctattcgaatagccgtgctcgcggttattgagcaccgggacatgtattacacttggctagactctaaattcttaacttgtgtgggatgggatattgcatgatgaattttatgctgatggagccacttcctgagaggagggaaggtggacgtcctcagaaaaccatgatgactcaacggcgggaagctatccttgggattacaatggatggtggacagaaccgtcgttgtttaaatgtgaacactggtattaaaacttgatcagtctatgctaggtcttaggcttgtgaaaagaattgcaaaactagctttatgcaaaagaacctgaagccattccttgaaataccttctatcatacgcattgttgttgtggtggcttgctgagtacggttggtactcacccttgctatttatatatcttttaggagagtgttgaagagaagcccttgtcggtacgcctgcgtatccaacaagatgatcggagtgcaatttcgttctaggtctcgttccccagtcgactgcctgtggcatgttaaccgggcccttatattattttgtcttccgctgttgttctctgatagttgttggcctacctggccctaatgtaagtatttaactcttttagcccgaattcattcgtgatatgttgtgatacaactatgtatgtgtgtaccaactactgatccagggattggtacagataaacacagaagatttccgatttccaaaatcgggggtcgacactatgtaactctaggatcgtctttataaaatggctttgggcaactaagtgacttttaaatgctgttttctgcaaaacttaacccctatattattaccccttgtacccccttgcattaatcatgcatctgccggtgtggcttgctgagtactgtggttgtactcatttttgctcaatcttttccccccttcagtaagagaagctttggagaagaagtcttaggtggagtcctagcttataccccagttgagcgcctgtgaagatggagccgtaggcccgctaatccgctgctgtttatttttgattgtcaggccttaagtgcctttgtaataatgtaaatattatcgatataataaagatgtgtcttttatatcatgtttgtgtggtgtaccccggcttttcctgggacggggattaatacactagcgttcgggaaaatgtatttttctcggtcgcgacagtaatacagccgattctaacaatgcgacttggtgtatgacatcgggttgagttgatatgcttcaagatgattgccacgcatggatagagtcctgagaaggcaattgtatctattaattaggatattttaagtaatttgcttagagatatgtttgggcaaaagtctgccgtaaagacttatggtatcttagagtttgttagagataagagtcgtgtccaatatggacattgtttgtaatttttgggtataaatagaccccgaaccccatgtaataaaacaacacatgttcaatacaatttcggcgcatcgccaccctttttgctttagttttatttcgaagagttcttgctttcgggttgagctgtatcagtttcgatcttcaacaagaggtaaaacttgttatggcggcttgcgctctcgggattagtgcttctatctttatgacactctaatcttgtttatgtaattcgtcgagttatcttatatcttacataatctccggcaatatcggtatcaaacctacaattggctaacatctgtcaatagaaggcagccgattagcctaaataccagtgttgacttagatcatatatgatatctaccactctatgacacatccaacggcttgattgtctagatattgtccttcttttcatacttatagctgcatcagttgagtttgatcttatgcatcgtgattagaatctcaatctctagcctgtctttggttgccgattagggtagtatcggggtttcagccgatcttatctgatttagctatatttgtcctatatgcctcattgacatgttaaatccgccctttatgtcgagatcttattgcatttaagtatattaggcttttgtttagtatattctacttgccttaatatcttaatatagagtgatatcggagtattagccgatacgtgctagatc

SEQ ID NO: 20143 - DNA, 1233 bp, Oryza sativa
aagaagacatccataagatagcttttaggtgttctggtgcaatcggcttgtttgagtgggttgggatgactttcggcttgaagagtgctggcgctacatatcaaagagctatgaattacatttaccatgatctaatcggctagttggtcgaggtatatattgatgatgtggttgttaagtctaaagaaatagaggaccacatagccgatttgaggaaggtttttgagagaaccagaaaatatgaattgaagatgaatccgacaaaatgtgtttttggtgtatcggctggccagtttttaggatttcttgttcacgagagggggatcgaggtaactcaaaggagtgttaatgcgatcaagaagattcagcctccggagatcaagacagaactacaagagatgatcggtaagataaatattgttagaagatttatttctaatctgtctggaaggttagaaccttttacaccattgttgagattaaaagctgatcagcagtttatttggggggcagagcaatagaaggctttggataatattaaggagtatcttagttctcctcctgttttgattcctccacagaaagggataccttttagattgtatctatcggccggtgagaagtcaatcggctcagtcttgattcaggagttggatggaaaagagcgagttgtattttatctcagtcatcggctcttggatgctgaaactagatactcccctgtggagaagctatgcttgtgtctgtatttttcgtgtacaaggttgaggcattatctattagccaacgagtgtactgtcatatgcaaggccgatgttgtcaaatacatgttatcggccccaattttcaaaggaagggttggaaagtggatattctctttaaccgagtttaatcttaggtatgagtcgccgaaggcgattaagggacaagctatagccaattttattgtggaacatcgtaatgattcaatcggctcggttgaaattgtgccatggattttattctttgatggatcggtgtgtactcatggttgtggtatcggcctagttataatttctcctcggggggcgtgttttgagtttgcttgtactattaaaccttaggcgactaataatcaagctgagtatgaggcagtgctcaaagggttgcaattactcaaggaagttgaagccgatgctattgaaatcatgggggattctttgctggtagtcattcaattggcaggagaatatg

SEQ ID NO: 20144 - DNA, 1260 bp, Oryza sativa
tttgcagagcacacttgatcctcttctagcgttattcgcgctggccgctagttggtggatttgttctgtgttcacagcatatagagctccaaagtcaatgacactgtgagtcccttcagctatctctggtctgtgtgcacgttcactgtcattgaagtcctcaacatgctgattctgctgcaggaagcaaaagcaatcaaaggcttctactcagccaatgtataataaaggatcacctaaccctcgccaaatccaattcttaagcccatccaagagggatattggaagaaccacatcaaacagttcagccacacagtatggctggagcaatttagccaatggaggtaacataactgctactgttgtatgccttcctggaaatgattttttggggctggtctgtaccccctatagtgaactgtcagtaagaatattaacacatttgaacttttgaagtgctgttttaatttttgtctgtgtgttgtactagaatggtgctcttttaagcatgattaacttgagtatctttaaaagcatcgtatttgtagcatttgaaattggctttctactggtttttgcaggactggtgtctccaacacttacaaagagggtggtacccgataatcaagatgaagaccactactccaccttccacaatatccaaccaaggaaatattcaaaggaagaatgggatgacttcacccagaaatccaccagaaaggcacttatggagtgcacggcaaccccagagtttgctagatgggttgctgataatgctcaccggctacgagtagagcagcaagatgacgcctcggaggacgagctcatcgagagttcctcaaattcatccgaagaaacagcacaggaagctgataccgggctgttcaggtggtattgatcttggcatgctaagaggctatgccgaattgctgatgctgtgcacgctctgtagaagtaggaggcagtaagaaagctagttagcagtagggttagcatttctattatttccactattgttcccacggttcatgcttcttggtgactgtagttagttagcgatctcaagttaactaatggtagatttagcttagttcgtaacgggccatggatcggtagttagctagttgcctagagttgatcgacttaccagagggctcgaacttgtgtaaatgcagtctattcgatccatcataattgataaatcaatcctgttggaacgttggatcggtattaggattacagtggtagctcatcttatgg

SEQ ID NO: 20145 - DNA, 18673 bp, Oryza sativa
aatgcttgggatctccgtgttgacttcgatgtcgatatgaggtaagggcagcaagaagccaagggagtatgatgtcgataggatgtgggcttgaaagaatcatgcaactacaattctcttcctattgttttagtttcttttacccctcagttccttgcgtctgctcttctgcaaggcatcccaggcgattcttttctccttttcaatttttctaaaggcatgcgtgcccatcgtttccattctatgacaggggtaaagaacgaggaccactgttttcttttctaaattaggaccacagttgcttaatcaactacggagtaatacgagtgtttgctttttctcatataggaaaaacatttatgtgaagtcgtgttcgtcgtccagccgcacaaacgtcgtccacaattctcacgcatctggacgaggctactgatgcagaatgtttgctggtacgaatgtttggtcccttcataaaaatctgaaagctgttaaacaagaactagtgctgcttgtagcataatacagtatcatttggattccgatgttatcaatcagctgacgagccgtgcgtatggagatggaataataatcggacgcgcacgctgcacgaatcgattcgattcgacccatctcttgtggatctgtgtcttggccgtctcttcttcctcccaccagcctcctcccctgggtctgcctgcagagtgcagacaaaaccctcccatctccagtggatcctcttctcgtctctcgaccccacaccctccactggaggcctccaattattggccaacgcacgaaaaaaaacgtgaatactaaaaaaaatgatcggatgggacgtttactataaatctggatatggacatgtagtactaggaaacgtcacatccggttatatgttgttatattctgagatggagggagtaattagaaggggtaagacttcgaatatagaccggctaacctaccaccttttcacaaggctatccggaagactcttgagtgtttctcgccaacgcacgtctctatcgcatgagtttctccccattctaatacggataatttcaaatttctattccatcacttccgtcttagtgtccggatttctcattgcctaacgcctctgctgcatcttgtgctgccgcctgcgtcaggtactacgaactactcaccacggcatagattaaaggagatagagagggacagaacaaaataatggtttggtgagatgatagtattaatcagtatataaaccagcttatgacattcctgcgcgtggagaacgtgtgattacgaactcttgtcgtcaaagacccactccacaggaccacagccttgtctgtgtattttttttttagaatgaagaaaaaatgaattttagaatgaagccttgtctgtgtattggaaaagaataaagatatttttatttgcctcgtattctcgtgtaatggcatactacacctactctatacaattaaatggtactgtgttaaggaatgaggtaaacatggcatgctgattgagtttatgttcaggtaagctatgagaaaatgactcactgatttgtttagatgatcgattaattgcattacttgtttatttagtttatttaggctgagttcttttctgcatctccaaataacaacttcatttccgttatcatactttacgaactactacacaatatatttcgtgcaacaaatttctatatatttttctaaagtgaaataaaatctatttttaattttatagtagttaataattaattaattatgctctaatgaactttatcgttttacgcatggctgaatattctatgaaaaacatgcagaaataaacaggcccttagccatgctacagtgtgtttttcttttaaaaaaagacgtggacataaacccgtttataccctcatcatgtacttgtttgtttactaaaattgtaaacgagaatctcgggaatcagttgaataaggcaactgaatctcaaagctttcgttgtatcgagcgtacatgtagcaaaaaaggaaaatattccttttcccaagttgttttctcctcctctttcttctttttaatttaactcggctatctttataccatggtaaaaagtgaaaccctccacgtggatcgctataagattctcctccccctcgctctcctcctcgcctccccccacagcggaagaggattccaacgagaaggcgagcgagagagaggagaagaaaccaagagagcgagggcggaggaagcagtcgagctctcccagcctcggcggctaaactccccccccccctcgctttcttcccctccttcctcaatctccaagcctcgatatccgtgttcttctctgaccgaatccgaatcccgcgtttctttgttgcgcgcgcgaccgcccgcgggaatcttggtggttcttgggcgatcgtgatggcattggatggcggcggcgaggttggcaggaggaggaggaggaggggatggggaggcgggttcccgagcctgatgcggcggaagcaggtggactccgaccgggtccgcgccgccgagggggaagggcaaccccagctcgccaaggagcttaacatcccggcgctggtcgcgatcggtatgttcatcgaattcctgattcttatgttttttaatgagagaaatgatttgttggctttcttttttcttttgtatgacgtgttttttcttttcttttcttttttttttgaaattttgattacttgtgttgaaattagtttatgcatatattcattgtgaaatgtttatgaatgtacagccttttggaaccagagaattattagatgtttattgtggtttcaatgtttagttggttggcctatttaaaagtttgaagattcagctggcaaatttatatttgttctttctttagaagtttcattctttcattcatggagttggaatgactagcatcatacattggggaatccattttttaatagttctccagttgtttattacatatatctgaatgctctgcattagtttgtgacagaaattcattaagtgtataggagtaagtgtgtgtggtactgtggtagtatactagtataacgctatttctagctgctgtgcttctactactttttagttgtctatctccaacttcttctacttgttagttgtctatctccaagtctctgttggtgttatggtgtatctctcatgatctttgactttcaaaaatggaaaatgatcctccaactttagacctgtaaattccctcaaacaaaaaaaactttagctctgtaatacataaacacttgtttttgtgggaggcattaactaattacactgtagtgaacttctttctacacagtaaattaatcgagctcataagttctacgcagtaaattaatctagttcataagttgatgcaaggtgaatgattgtaattctacctaggtgtagagaaatactccctttgtcccaaaatataagcatttttagagttagacacggttattaagaaagtaagtagaattaaataggggagagttgtgattggatgagaagtggatgtaggtaggaaaatcgaatagtggatggttgtgattggttgagaagagaatattggtgtagaagttgttatattttaggacaaattctagcggctagaagttgttatattttgggacggagggagtatttgtttacatgaactgtccatgttacatgaattgttttagtgagcgtttgtgttatctaccaggtgtcggttcaacaattggagctggggtatatgttcttgtcggaacagttgctagggagcatgctggtccagcattgacaatttcatttctgatagctggaatagcttccgcgctctcagccttctgttatgccgagcttgctagtcggtgcccatctgctggaagcgcctaccattattcatacatctgcgttggtgaagggtaaattacttacaccataatggaatacacactcttcatggaagaaatattgcacctttgatagtctgtgatattgtcaaatctattgtcataaaggaggattaacaatctaagatactgtaaacagatgactagagtttctcacatgactcatttttatttttctagtgttgcctggttgattggttgggctttagtgctggaatatactattggtggatctgctgttgcccgtggcatatcccccaatcttgtaagtgtcgtttttccttcatctagttctatggcatttgatcaatattcgaactacatgtctcatatattctattttcataagtttcgctcgtctttcaggccttgttctttggaggaccagacagtcttccatggattttatcacgccaccagcttccatggtttgatgtcattgttgatccctgtgccgctgccctcgtttttgttgttactgttttgctatgtgttgggataaaagaggttgttacattggtcgatttgtaagtttcctattctttcatctgcaaactaggattataggactgttactaattattctatttgaatctgttgcagagttcagctgtacaagagcttataacagttctgaatgcttgtgtgatgatatttgttattgtagctggtagttatatcggcttccagataggatgggttggctataaagttactgatgggtaatgcaaaaaaaaaaaaacagttgattgtattttgagagtaattactgatgcacttaccatttgaacatttcagatattttccacatgggataaatggaatgcttgctggatcagcaactgttttctttgcatatattggctttgatacagttgctagtactgctgaggaggttaagatgatcctaactaaccatgtcgtccacttcctgtatggggatgctgatttttccctctttcaacccttataggtgaagaatccacagagagatctaccactgggaataggagcggcattgtctatctgctgttgcttgtacatgatggtttctgttgttattgttgggctggtaccatatttcgctatggacccagatacgcccatttcatctgtctttgcgaaacatggaatgcagtgggccatgtaaggactcgctctccttttgtttattcccatatatccaattatctataatggtcttgcaacgtgcttatttagtctgtcactatgctgttttgttttaggtatattgtgacaagtggtgctgttcttgcactttgttcaactttgttggggtcacttcttccgcaggtatacaaacacatccctcgatataaaaaaaaatcctaataattcccaagctttaaacaagacagtgagcacatagagttgattctagtcgtctactatatgcttggtccataaggaatttgcgttctaatatcacagtcaattattccgcattatattagtgagagtggtcttctaactagccaaagctgaatctataatccttgtggaaaaaaagttatttttttgttgtacttctcacttgtattctgatttctgaatctgaatcaaactgcttggtccataaggtcaattattctgcagtacattagcgagcagttgattgcacttttcacttgcattctgatttttgaattttaattaaactattcatataatgattaacgttgtttctctccttgcaattttgccgataggctctgttttgacaaaataaactatagtacctgcaaatgtatattgaactaataccatatcaacataaatgaaatttgtagcacacacatcaacactagattgatgatgtggcatgtataccagtacttgttacatttgagctatccctgattgccttatacgtaaaactgatcccatgcctacacagacaaactcaaatgagaacacaaaaacataaacttagaaacagacacccacccgcccactctttccttgcacattattatgtgaaactgagaacttggggatgcattaccttgttttttaaaatacattttaaagattttagttgccatttcatgcagcctagaatactaatggcgatggcacgagacgggctgctgccatctttcttcgccgatgttaacaagaggacacaagttcctgtaaagagcacagtcgtgactggtctctgtgcagcagctctggcttttttcatggatgtttcccagctggcaggaatggtaaggaacttacccggctgttatctttggatatactgatggtcttttgcaatgagaggtgcattctataagaccatacttgccattaagcattacagagattgtaaggtggagataaaattaaatactcatttgttgcaggtcagtgtaggtacactccttgcattcaccatagttgctgtctcgatcttaatactcagatatattcctccggatgaggttcctctgccttcatctctgcaagaaacattctgtttgagccaagaatatgatgaggaaagggttagcggtattcttggagatgagagatgcaaaacatctgaaacaaaggatgtgattctcgcagaatctatggaggatcctctcattgagaagaaaataacaagtaaattgcattcccatttttcttataactgctgtattttatttacttcagttatccaacaagaaatcttctgataaactctgcaggaaagatggacgagatgaagcgtcggaaggtggccgctttcagcataggatctgtttgtgttggagttatggttctcacatccgcagcttctgccacatggctgcctttgtaagtgtcaatgatgcacaaaaacagtatgtagtgatagccaggttccttcctgtttcgagaataacctctatctgttgttgatgccagtcttcctatgtgtattggctgcatcgttggcgctctgttgcttgtagccggtcttggcctcctctgctggatcgaccaagatgatggcaggcattctttcggccaatctggaggtacatagcaaactgttctctctttttaggaaggataaaacactgctttattctgccagtacattcggactaaacagcacacttcttgtgcaggatttacatgccctttcgttccacttctgccagtcttgtctatcctcgtaaacacatacctgttgataaatctggggttcgtgtctgacttacccaaattattactccctccgtctcatattataaaccactttgggtttgtgctagaaaaatgtagtaacatctgcagcaccaatttagtttcaataaatccatattgactatattatatttttatagtaaatttattttttgttggagatattgatatatttttctgtacacttgatcggactagaagaggtttgacgtaaaaacccaaagtgacttacaatataaaacgtatggagtatttttttttctttttccataccactagatgcctttaatctcaccattttctctaccatccatcatgaacattaattcattttgcattgtcttgttcagtggagaggcatggatgagagtaggcatatggctgctgataggcgtcttggtgtacattttgtacggacgaactaacagctccttgaaggatgtcatctacgtccccgtagcgaggccgatgagatatacaagagttcatctggatatgtgtcctagaaaaaaatattttttagtttgcactattcttcagtgacaacatgcctcacctgtctgcaattggaagattagcctggacagaggagatgctaaatcattcatacttggggaaaaaacatggatgcaatattatatttaggatgtgcataggtgtatatataaacccaattggacagtggaatacatgattttgtgtatataagccctttgtactaaatggtaaactgaaaagcagttatcgatgaaaaaaaagtgcaatagacgaagtactactatacttatatccctattgcattatctttgctgtatttgttttctttttggttgtttgttcggtggaacacgtatgggttatacctctatacgatgcgagttgtagtagtatacgtacgtactgcatgatcccagtccgaatcgaagtctcatatatatgtgttagcctgtatttttacatgcctagctagtcgatcattgtaatgtaataaaaaaggagttgctgtccgtcgacccgttccaccaatacgtacgtggagatgatggaggaggatcaaccggccgacgaggtggtgctgctgctaccggaggaaatcctcgccgagatcctcgccgcctgcccccgcgcagcctcgcggcgtcgcggtgcgtttgcacggactggcgttctaccattgactcccgccggctgctacgtgcggacctcctcccgctgtcgctcgctgtcatatttatcgacttctggggccttaggtttccggacttcttctcccgcccaacctcatcgacctcaccgtcgacgatcagcggcaagctcgacttcttgcccatcaaaatagatctccacagcatctacgccataacaggccactgcaacggcctcctcatgctccccggcgtcgtggtgaacccggccactcggagatgggcgcgcttgccaccattgccacgccacttcaccgtgcctcaaggattgttttataacgaattcatcatcttcgaccccaccatatcgctgcactacgaggtgttcaagatcccatacggtgggacgacggactacgtcgaccggatggatcccgtcttgaaggaatcggaatggccaccatcgtccctcgtcctacgtgtcttctcctcggccacaggccaatgggacgagagatctttcaccagagaaggggatgccacaggaacacatgccgatgcacagaggcagccatggccgtggattcaacacggacatgcttattggaggggagtactttatgtgaacacatgccatgtaatgaggtttgatctctttacactatttgtttactaattttgtaaatttcaaatccttacaagttgaaatcttttttatgtctggtaatgtgtgcatctctatatctttgttctttgcaggatatctctgtctgatggaaaatatcaagtaattaaacatcccacagtttactacaagaagtttaaaccaaattttttaattggaaaatcagagaaaggggtgtacctcgcgtcacttgaatttgaccataatctttcaatttgggtccttaatgaatcatgtggtcattttgagtggttaccgaagcaccagaacaaccttatgcctttgttgctacgtttgaactgtggaaaacaagctcgccggccatggattttacagaatgttaactatcatctttactgtcaaaagtttcctggtgaatggaatttatatgattgggagtatgatccctctcatcctgattatcaaagcgatagtgatgacgacgatagtgatgaagcattggatgaaaataattttaaatggaattttgacgatgatagtgttgtagacactcaagaatgttttgagaactataaaagtggcagtcttgatttcctcggctttcatccatataaagagatggtttttttagttcctcgaaaggattggcatatcattggaatagcacaaagctccaatatttgggaaatttatgcccgaaacatcgtgagtacttcgttcgaaatggaaatataaaccggtcatttccatacacaccatgttggatggacaatttctcagaaactagataactcaatcaagattagcatgcaaagctgtcatttggtgtaggtttttggtttgttatctcaagtaatgattctaagttatacatatcatattgtcttgttgctgctataatattttgttgcataagttagccatgtcaactgacggttgattgtgaacgtcaattttctatagtcattttacaatacctcccactaggggtggcaatattttagtaggaacaagggcgaattaagccaggatttgagaaagaggagacaagccaataagccacgtccacgaaaaaaaagtatatgcctttattatagctaatacataaggaaccaatatatgtaaaagcaatcatccggcttcttgttcatcttggctagatgattcgattttaataagtggctgatttttttttcaaagaacataatacgtgactgaattgtattatcagtggattggctccattctcttaggaactaggaaaattagagctcaaatatttagggtattaagacagagcataaacccgtggacgatggctcgactctggcaaccccaccgcaataccttcgccgctgagtaggaatagatctcactgttgattttgttggtcctcagtcatttgcttaagtggaagggcaatttagtcgtcgtgatcgtatcattggccaagcatgccagctttgcaggtccaataatttcgttccatcacaagttgttgaagcaggaggaacagccgctggcataatcttgtgctcgtggccatagtctgccgttgcacaggcagagtagtgccacccctccttcccccgaattcagtgtgcaccacggtcaccgtgggttagcccgcataagagtgtgcccaaataacaatagcaaagccaaacaaaaccaaaaccacaagcactaatattggtaaataatcggatctaacaactataggcctaaaacaaatccacacataggatatatcaggattaacatgtgttcattaatacagcttccagggatttaataggtaagtacaatactaaataagaactcaacatatagccgtataggatgtgagaattaacatgcgtttaacacttcatttttcagggacagaacaggtacaatactaaatacgaacaccatttttttttcttccagcttcatgacacataattctcaaaaggcaatgtatatattttcctcttcatgatgataaaccagccgcttcatttgaaaagcgagaaacaaactgcttccagcttcatgaacttttctggtctaactccatatttccttcaccatacatacattaaataaagttagagtggacgaattgctgatccaaaattactatatgtacaagatcctgaaggccaaatcacacactactgaaagtcaaaatcatttctattgagaaccataaataacaagatgcggtaaaatcatgcatgacaacatcctgaagaaaatttggctagctgatagaagtcatagaacaaaatgattccatcagtgatttcaaattcagattttcaggagcccgatatttttttcctaactactcaactgcaggaaagcttactataaaccactaaaaaaaattaacgaaagcattatatgttgccttgggaatgcatcggcatgataactatattatctactatccccaaagtagcaaacgtattgaaggatgataccagggatacagtctggatagtttaactttctgtaataccttgattagaaaattctcaatcccactcttcatatatgtgattgacatggtggcactcactaacacacagacgtcaccatagaatatcacatcagagcattggaatggtttagaatccgtctggacctatatgacacacctaagataaatccagagacctaaaaatacattttgtgagtttaggaatctagatgatacacccgtacaagtaatctagatgacacacacgtacaagtataggaccgtcaatgtacttcactcttctactacatcactacccaatctaacatgagcggtagtaacagatctggtccattacatctactacaatagatgactcatattcacgagtggtataaaaagagaaaaatctaatttctacggttgatgcataagatgatctacttgactccatgagtgtggtattctccaggtgtgttcgatggatatggctgcttctatatatacagccacaccagctacatcaaatgcagtaaaatttgtattggcttgtaccgtactgcagccagccacaactggctgcaatgtagctcaagcgaacaagccaaaactttcaacacacctagtttacctcatcatcgagggagggataatatactcttttttttaattctaataagctagcttttgtgactaaagggcccaacaaattccatcattagcatgttatataaatttatcagagtaaatttcataaaaccccacctattatagttcaggttacacaaaaccacatggatctcgacatgtggcatataaccctagttattgtggtcataaaatttcacaaaaccgttaatcaatttgacgtactcctatatcaaaatataaaataccatatttatatttatatgtatgtaacatttgtataatagataaagaattcgtaaattcgagatgtgatcgtaaactgaaaagtgaggtagattaaagtcaaaatgatcaatagtgtgatttcttgaaactttattatcataatgcctagggttatgtgccacgtaccaaaaaccatgtggttttatgcaaatagaccacaataccagtggtcaagtgaaatttacccttctgtgatatgcctcacgccactagaaaaccatttttggggacaccacccatttatttctactatcggatttaaaaacatgtacttgtgaaaatgcattgaaggggtttccgatcacaaactgccagtaaaatttgattttcattggcagccgctaaaacgctctacatgagaaaaaaaacacgatactaaatcgcagtctcctagatgcgagagccagctaaatctatcttctccccaagtctctcctccttctcacctttaccactcccctctctctctctccgtccctactccctctagcctcctacctccaccgcagtgctctcagcaatggtgccacggcggcgatggcgatggcgatggcatatgtgacagcgacgactgcaacacgccaatacgggggtggtggatccgccgctggtaggttcgggagtggcaaattcacaggaggagcttgtccaggcattcggacggtggatccggcggtggggggcacataggtggtggatctagcaggggagagctaggctcacaggcagtggatccggcggtggtgaggctcgcggggcatatatcctgctattgagctcgggcatgaatgctagcgggtgacggagttcaggcaacaagcagccttggtggggcgttgggttcattttgttactgcaggtaagcatagtatcctaggactgatatcggcatcacggttatgcacgagacagttcaccattccccaatggcgtaccctcatttgcattgtctatatggtggtgtcaaggtggggtgtgacatggatgaagacgaactttatatgaaaattgtagctctagaatagatctacatctttgctgtagaaagttttttcatttgagattatttagtattcaaatattcaattgttgcatgtggttctacgtatgaaaaccgcctttaaaaatgagagcagtagtagtacttaaatataaaagaaaatcataactcttttaaatgaagtcggatgatgacatactttgtatgaaaaaattgatctacaactttgtagatgaaagtttgtttatttgagattgtttacggattcaagtatttgtttttctatctcatatttatttttcttttatttgtaaacgaccgcagatggatactgtcgacgtttgatgtcgcgattccggtatttgcatagtatggggatcgttggtactaggatatacgtgagactgaggtaaaagagacagagacgatgatttttatacaggttcgggcccctgaattgttaggtaataaccctacatcctgttggccgaagccggtattgctcttattcaccataatcacaccagtataatatttggggtagcctatctaactgttgtcgacatggcggtctgaagttctgactcgtaatcgacaacagggtagtcttcctcctcgaatccgtgcccggcgagattagagatagcgctttcgtctctcctgacagtatccggagacaccgtaggggactagccgtgcttatccctgaagtcgatatccggcgtcttgtcttggcgtatgttggcttgtatgttgatcttgtgtcttgatctattgttccgtgtattctatggtgggtgtgtcccctctcctcctagggggtcttgtatttatacccataggtgtccccttgtccaagtagaactaggaaaaccaatatggatacaatccgagtagtccttgtcgtttccatgtagaactctggttgtctttccttatccggaactctctccatatccaaggtcagtttccgtataaaacatggtatgtggtgggtcttgccgagatttagtcaactactattagatatgtggtatccataaccctgacagatacgtattatatatgaaaattgtagcccttgacgagatttacaactttgtagttaaaatgttctattcgttttttgttctcagatctatttttgaatttgtttcttttagttttttaaacgaccttggatagggacatattctatattaaaattgtagagctcaatgatatctataactttatatttgaacttttttttcaattgagattgcttaggggagcaaatattcattagaaactctctggtatatatgtttataaaaaaaattatttttttttcaaatgagcttgaatggagatatgctttatattaaagttgtagagctcggtgtggtttacaactttttagttgatgactttttcattttatattatttagagtgtaaaatatatgttgcaagttttatgagaggtagagtaaaaaagaatagcattcaactcatagtcagaagtgcttcatatgtgagatggtaaggagactatgcactaaatgataggacttaggttcgaatcctattcatgtgtgaaatcatgtgacttgtgacataagagagatgcctgctaaaatacgagatttttttttgagtttttttccctatagagatcaaaaactaaaaattcattttcacgggtaagtacttaagagagtcacccgtgaaaatttccaaggatggtcggtattccgcccgcacaaatcatgtgatatctacataccatagctacatgcatgtctgaaaacacctgtgtaaatgggttattggccgtatgcacaaacgcttcttaaaagtagtggatgatcttgggtcgtgacctcaggccattgctccactgttgagttgtagtcttgcagattcagattcagtttgtattagaaacaaaaatgaaaatatattttatttttagcatttttacagttatatacatgctttggaaaaaaatataaaaatatacgtgtgccacgaaatggtaacacgattgtttggcgcaatgtgaaggtacgggaccgtctgctgggacaatccggtgtcgtggacgaacggtaccgtgttgcattggtccatggcttggccgtgcggcactgcagtcccgcgggtcagccgcgcatgcggcatcgcgagccggctgagtaatgccgcgagatggctgcgcgcgacatagcctcacacatgcatgcatatatctcacgtatacctcatgcatgcacatagtatttatttgcatcttggccggtgtcacattgccagcccaaggaactatgcggtgccgaacagacagccagcccgggacccaagcggtggtccacatttttacgccgctccaaacactctgtcccgcgtttccacctggcggtacaggcatattttcacaattctgcttaaaaagaagtatataattaaaaaaatagaaataatgcatatttttcaatttttttaaggtgccatgctgtgtgattcgtgatggaatttgtgacttgtagtttctgtaattgtgtggtgtgttaatttatggatgacaataactgcaattttgttccgtgatgagcatattgattatgttggatttgttacaataactaattgtcatttcgtgcattttttaatggaaaaatcggctcgattaagtcgagctgactcttttttgttttttttcttgtggaatcaaaatatgtaggtgccggttctcaaatcctcgtgtcctcattagcaccactttggtagtgcctgcatcagatccgacagtaataaaggtacgaactggtactgtttatatgttctaaagtggtgatcgatcacagcagacgcaaccattttcggtataaaccacctgaaaatgcacctgatccgcatgctaagttgctgctactaatcacacttctgtttacatgttctaaagtggtgagcgatcactgccgacgcaaccattttcggtgtaaaccacctgaaaatgcacccggtctgcatgctaagttgctgttactcttcacacttcatgctttttgagttgttgccatataatgcatgcatgcctgatgccttcaacaaccaagcaccacatgcatgcctcaatgaccagtgaaattcacatagccacacctaactccacgcctccacctcattatgtatctatatatctctatatcctcatattctcgttgctcgtataacttctcgtgtgttaattatcccgtattaatataatggggcacttgcactcctcatgtgcatatggattattttgcttgatatcgcacactccgaagacgtggtggtggcgcagacagttttatgcgacagcatggatatgtctttcgaaatggagaatgcttgcttcccaaacacaatgcctagcatcgattgttgcatttttgctgtgcatgtcattgacatggcgattttaaacgatctagagtgtctctgcggtttgaaggatgaacggtcattctttgataacggtttatccctacaggatatggctgatttctattccagtagtatttgccagggtcaggatcttataaatgcccaggttgtcgtcgacgcatgtgaaggtacgcacgtaaaattatttccacatattaccccccctttattgatcgtgagtatattcattcggtccttgcatcgatatctttatcgccttttccccctccccttttttctttctttctttctctcttttggaaactttaatcttgaaggtagtctcctttcttttggttctctgttaatgcgaccaagcgtgcatcgttttctgtataggtatggagcaacgtagcaagatgccctcaatgcctcctcagcggttgctcgaaagcagggtccgggtcgaggctagccctgccgactcgccaactccgccggcttctacctgatttgctccttggaagaattgttagctggggctggtgatcatatgcctgatcagttctacttgagcaaccgtggcccttttcattaatgtagtttagtaaatcgatttttccatgctattatttggttcttgtatcctgggctccgcccaatctatctttaatcgtgctagctgtgtccttgtagtttagtggaatctatcctcttaaagaaagtggttttcgatcaccatcctcattgtaatcgtgttttgtcagttgtcaaataactctggtgttttttttttctttcagtagcagttatttcagttccagctcctcgattctgtcctttgctcccttgtttagtttcgtttggtttccacatcctttttcactgtcaggttcatttcttagtttcttttggcggcaacttgaatttcttttctgtttagtggatgacaccgcgtaccatgtcaacatgtccgctctgtttgatgaaaagaaaagaacaaacacagaaaaatatgataaagtctacttcatcctttgaagtattgaggttggtttacttaaaccctctagtatgaaaccggatattttattccctaaaatatagaaaacggtttaaataacctcatacagtggttttataggtggttttatggtaaacatgacgatgcagcagtagttttagccacatggactatatggagtggctatagcgatagactcgattaagttttatatggagtggctaatgacatggcgatagactcgattaagttttttttataagtggaacatcttgagaacgatatcattactatagaaagtaacaaaggatacgacactatagatgtcggaataggtaaaactaacatctacagtgcttttcctaccttcaaaggatgaaaaaagaaaaccgccacctttaagcaactataaatgtaggttttagagaaaaccggcaccaatgctataagtccttttttttaaaaaaaacgaacacttttaatatattatagatgttggtttattaaaaaaaaggcacatataatattattatatatgccaattttaaaaagccggccccataaaaatcgagtcgggtcgagccggcgggtaggagaaaatatttttggctagcggggctcagatccacaaggaggagaggataaggccactacggcactacctctcctctctctatccatatccagccacaacctccactctctctatctatctctctatctctatcgtcgctggcggctgcgtcatccttgtcgctcgatgaccaagtcatccctgccatcctcgtccggtcattgccgatgcccagaggcagccatggccgtggattcaacgcgggcacgtttattggaggggagtactttatgtgaacacatgtcatgtgacaagtatttacttactaactaataatttctaaaagtcggg

SEQ ID NO: 20146 - DNA, 14857 bp, Oryza sativa
  unsure (1)..(14857): unsure at all n locations
tggttacaagccacaacatgacactttatgggtagcttcgagggttgagcaacatacgtgtttgttggagaatacccgtctggtgcacagaaacctgacagcggcatttgtggcacaaatggtatattcaaaggtggttagaaaaacatctttgtcccctttcaccataatgcatgacgttgagaaagagtacggatatgagatatcgtacgacaaggcttggagggcaaaacagaaagcattggagatgaggtttggaacttatgaggattcttatcacaatcttcccccactattggaggtgatgcaggcaagaaacccaggcacacacatggctattctcgatgaggtgaatgaatatggggagaatgttcttcgtcgggctttctggtcatttgggtgcatgatagaggcctttaaaaattgcattcctttgctctgtgttgatggcactttcatgacaggcaagtacagaggaacaattctaaccgcgatcggagttgacgcggatagccatgtcgttcctgttgcttttgcatttgttgaaagcgagaacacatcaagctggctatggtttttgcggcacattaaaatgtgtgttgttgaaaacagaccaaatgtgtgtgttctgcagaccgacacgccggtttgctatccgcgatacagaagcttcaagaagatgtcacacagtccgtgccatggccagatttacatagcagatggtgcatgcgacattttggggctaatttttatagacaattcaggagtaagagattgatggacctgttcaagaagttatgcaagcagaatcaacaaagaaagtttgatgccatatgggagcaactggatcgtttgaccactacacacatggaagaggttaggaaaaaacccatagttgccagacaggaggagccggagggacttgaacccattcctaatgaagcaccaagtattactcggcgcaggaagcgtggaagggccacgaagtgcttcacggagtgggtagaatttgagccaagggagaaatggtcgttgttgtacgatacagatggatcgaggtatggtgtgatgacaacaaatcttgctgaagtatataattgggttatgaagaatacacgacctctaccacttgttgctatcctggagggcatcacgaggggtacacagaagtatctctgtaaaaggtattccatggctagtctgaacctcagcaaacccagtgttaagtatagccccgctattacacagtacatggatgagaaaagtaagaagggaggaatccacagagtgtggcctgctgggaatagagagttgttatttgagatacgacttcgtgacaagagtggtgtcggcattgggactactgacatcacattggaatgcacgttgtggccagagtatcacgcttgcaaatgcaattgcaacaagccttacctgttacatcggccatgttcccatgttcttgctgcttccgcaaaagggggtgttgatggaaacatttttgtttctccctactttagaaaggaatcgtgggaggcaacttggcgtggtgaattgcgtggttggcgtgccgtgtgtgatttcactcgtcctcctccagggcaagccaattgggttcctgactcaaatttattagttgatactaagggtcgtcgccagtcacgcaggatcaagaaccttatggatgaagctgaagtgaaagatcgttctcgtcgtaagaaagcttgcattctttgcggggagaaccattcccgtaaagattgcagcatgtacaatgtagggcaagatgccacaggcgctgatgttcgtcgcgttccaaaggggaagtcgaagaagaaaaataatccttagttcgctattatccttggtggactccctactttgaagatcgttatcgttcaatttatgtttagtgcgtctgtaattttaatttgaactttcttgcacttttattacccgaatctatttgtaatggccttgtaattttcattttgaactgcactgcacttttaatatcgtcatgtatttgtattggaattgtaatttaaatttcgaactgcactgcacttgtaatatcgtaatatatgtgtcgtgggcttgtaattttaaattgaaatgtattgaactattcttatctgtatctatgtgtgctggtactgtaattttaaattgaaatggcatgcaaatttgttaattgaattatgttgcatacatttattgtactgttaccatacgtgcattgtactaatgtggttttcgatctgcaggtatggctgatcaaaatgatgggcagctgatagacaaggagatcgataggaaccatcgatcgcgacgtcttagtacaggaactttctgcaatgtgctaaagatgcgaggaccggatcaatattggcgtattgatcctcgttgggttccaaggtgtgtgaaaatatattgtttttactaatacaaggtgtttatattttcatgtattaataacttgcgctctgtcatgttgtaggctgagagcagctgggttgttgacgtttgcacggttggtcgagccttcacgtgcaaggtccgaacgaatccacattgacgcggcgcttatgagtgctcttgtcgatagatggaggcctgagacccacactttccacctcacagttggagagatggtgcccactctgcaggatgtgtcttatttgttggggctgccgatagctgggccagcagttggcccaacaatggtgaatgctggatgggcggatgaccttctggccagttttggtggtgtgctgcctgttgcactggaggatctcacagatgggcacgggcctacgaaaagttggttgaatcagtttcgacaggatgtcttccctgatgaccaggaggagtggatcgtgcagcggcacttagtcgcttacctgttgtggttgtttggatgggtgatgttcacgggaactcacgctgactccgtggacaagcacttcatccactttgcggagcagattgcagagttacctatcgcggagattccacagtacagttgggggtcggcggtacttgcggcgacatatgccggactgtgtgatgcttgcgtgaggaacagcaagcaaagttcactccctggatgctcgttgctacttatgttgtgggcgcacgagcgcttcgacattgggaggcctcagcttgactcgtacgcaaactacggtttgcgagagatgtacaggtctggtgttgatgacatcgacgatcgtcccactatgggatccttgtggacacaccgtgaggtaatttttgttaaattcgtttatgttatcattatgaatactagttcacaaactttccttatatgactgatgaaaactactacttgttacagccgcagtgggttagcgggacgacacgtcgtgtctacactcagtttgtagctgactttgatcagcttacgcctgaccgtgttcggtggactccctacactcagcacgatgtcaatgatcgtgcaccgcacggtctcgcggatctttgcacgcgagatatgcaactctggaggacgacttgtcacctcgtggtggacgtgcacgtcgagccacacaatgtccacagggttctcaaacagttgggcatgtatcaggacttccctccgagagatggtcgtcctttggctgatagtcttcataggttagttcacatcacagttgtttaatcctacattttttaaaataaatcactgcacaacattttttctgatgtgtgaatttgttgttgtgcaggtactccagaaaggggctcgggctttcctacgagctagttattgtgaccacagttcagctgacggtacaagagtgggagcacgcagctgataacttggcacttcagacacctccagacgatgggagttattatggagcttaccttcgttggtaccgcagtgttacacgatggaggtgttttcctccacaaggagatagcaccgtcccccaccaggcagcgattactgacacgtttgcccctcagcctagatcagcttacaactcaatggtacgtgtttatttgtggaatttgagcaactagttcaatatttttaaaaagttagcaagtagttcagtatgtctaataaatgtgcaattggttcacctagttccttttcttacataaatgtggaactagttcagtatttataaatgatgtgcaactggttcattatttctaacaaatgtgcatcttgttaaatactcttaataaatgtgcaactggttaaataattttaattgccttgattatttgtggaacaggcggaatttgttgagcacgttcacgtggagtccgacaccctgctgcaaagactagaggcgagacctccagtcgtcaggtctgacgacgtggcaagtgtccttcgcaacttccgtgcacgtgctgccgcactactacgtcgtgtctcctgtcggagcgcggcagatgtggtgcagacgtcgggccgacggccatcaccaccactaccccgacgttccagcgtggatcggagtggtccatcctcttcacgtcgcgggtacgaagcggcccacacatctcacggtcgtccttcctttcagcacaccccagcaccggagtacaccagggggtcagccggatcaggggtacccacgtcgagcacggcaccaccacgtccgcaggtattccaaactccgccttatgttcacccctcgcagggagcatctgggtcggcacacttcccttacatgccaacgggggacaacgtgttgaacacaccagcatggggacttcatatcactccgcgtgcgccagagcagggccacacacagcacacatgtaagtcattttaaacaataacacgctttagtttctaattatatgtatcgttactaactacgccatattttttggtttctccctcttgtacaaacagacgatgagtacggttcggcgtcgacgcatcacggagtgcctgcttactcccctcgcacagcattcattgaggacttcttttccactgatcctccccagggggaagtagggatggattactggcacgcagcacctcaggtcacacagccgacgcaggagacggaggccggtcaggggccagacgtgacaccacagcaggcagctagagataggcacccccctgataatttgacatatcccactgagcagattaggcgtaggaagaagggaggacctagcaagcgtgcgaagggcactgatcgtccttgacttatctatttgtattaaacttttagtcatttatgttctgtccgtactatttgagaaacactttacgattaacttagtactatcagtactatttcataaacttcttcggataattactcagtagcatacccttcgaatgaatcatgacaaattatcattcaaatatacaaataatgaaactaaataattcaaatattttaaccaacaaataaatactacaatttctgaccaaacattatcaaaaccctaaatcacatacatataacattacaaaaatattttcctttcttacacactaaaataaattacatattattaaaaaaaataacttattacaaataaatggagaacgcgaccctgtcgaactgcggcagttcgacggacatcctgtcgaactgcggcagttcgacagcccagcctgtcgaacgggggctgttcgacagccctgcctgtcgaacgggggctgttcgacaggtcctgtcgaacggcagccttccgatctcgtcgccagtcgcgctctggccgttcgataggcgccctatcgaactgcacccgttcgacagggacctattttcgcgattttccccggttgaccactacttttacgattttccataaaaataatattaattctcaaaaaaattcgttattggccgcctgcacaaacgctgcttaaaagtagtggatgatcttgggtcgtgacctcaggtcattgctccactggtgagtggtagtcttgcagatttagtttgtattacaggtgccatgctgtgtgattcgtgatggaatttcaaacctgcagtttctgtaattgtgtgatgtgttaatttatggatgagaataaatgcaattttgttccgtgataagaatattgattctgttggatttgttacaataattaattgttattcatttcatgcaatttcattttttaatggaaaaatcggatcgattaagtcgaactgactcttttttgttttttttctggaaataataatatgtaggtgccggttctcaaatcttcctcccctcattagcaccactttggtagtgtctgcgttagatccggcagtaatagaggtatgaactggcaccgtttacatgttctgaactggggatcgatcattgccgacgcggtcattttcggtgtaaaccacctgaaaatgcacccgttccgcatgtcaagttgctgttactcttcacacttaatgctctttaagttgttgccacctacctatgcattcatgcctgatggcttcaacaaccaagcttgcatgcatgcctcaacgaccaatgaaattcacgcagtcacacttaccgcacgaacgcaaggtagtagttggtagctctaaccacattatgtatatctatatatctctatatgttcggttgtcgctttactcgtataacttcttatgtgtgttaattatcccatattaatataatggggcacttctactcactcctcatgtgcatatggattattatgcttgatgtcgcacgctccggcgacgtggtgctggcgcagactgttatatgcgatagtagtgatatgtcttaccaaatggagagtgtttgcttcccaaacacaacgcctatcatggattgctgcatttttgttatacatgtcattgacatggcaattttaaataatctggagtgcctctgcggcttgaaggacgaacgtgcattctttgataacggtttatccttacaggatatggttgatttctattccagtagtacttgctagggtcagaatcttagaaatgcccagatcgtcgtcgatgcatgcgaaggtacgtaaaattatttccacatgttacccttttttatcatgagtttcatcctggccttgcatcaatccttatcaccattttccctccctttctttctttctttctttttctttttttgaaactttcatctccaaggaagtcacctttcttctgcttctctattaatttgatcaagcgtgcatcgttttctgtgtaggtagggagcaacatagcaagatgccctcgatgtctcagcagctgcacgaaagcagggtccgggttgaggctagccccgccgattcgccaactccgctggtttccccctgatttgctctttggaataattgttagttggggctggtgatcatgtacctgatcagttttacttgagcagccaaggtttttcattcatgcagtttagcgatcagtcgtttcatgctattattcggttattgtatcctgggctccgcccaatctatctttaatcgttttgtcctcttagattagtggaacctatcctcttaataaaggtagtggttttcaatcattaatcgtaagagatgtgcttctatgctctacaaataacaaacagcacaatttttaaaaaagatgagaggcccaaattagatggtacataattaatagtatgattatgaacatcatttagagagggcaatttcatcattgagggagttaatctccgacagccccaccaaagctcacacttttcctgctcgaagccgtcacaaactgaaaaccactaatcaacaatcacgatcaccattgtgtttgcaacgcatcacaaacacaaatcgttcatcagttcaaacggcgagcccgttggcgcagtagaccttatagaggaggtggggagatgttttgcttccggacacaacacaggtgaagcccatgaagaatgaggatggggccgacgactgccaatgttacccaccctgcccatcacaaacggatggttagattcgatttgatacctcgagacatgttggaccgaagcaaatttctacttaagtactcttggataatttaaatagataaaatgaacctctcaactcatgatgcaggattagggggaagttacacatcaattctctaggaatcttcgcagatttgattcgaatcttggaatatttgtacgtcctccaaagcgagtttgtcaggaagactctagtttaccaaaaaaaaagagtatacataaatcacatgaactattatgttcgtaatttaatcttctgagacaataagcattttaggataaacaaaataattggatcaaaattatgataatcaatgaatatgcaatggcatgtattactgaaattcatagatgtatttctaggtcattaagtaatggggtgaaattcattttccatcctgcaagaggccctaagcaatatatgccaaaacaagaaaggtatccataaaatattttccttgggattaatgattagtttatgcaaatattattggcttcgaaatgaggaatgatttatacttgaaatgccctgttataacgcagatgagcccacgttatgacaagatagcctatcatgctcatggagtgaatttgagtgtctaaacttaggcctggtttagttctaaatttttttcccaaaaacatcacattgaatctttggatacatgtataaaacattaaatatagattaaaagaaaaactaattacacagttaagggggaaatcacgagacgaatcttttgagcataattagtccataattaactataagcgctacagtaacccacatgtgctaatgacggattaattaggctcaaaagatttgtctcgcggtttccaggcgagttatgaaattagttttttcattcgtgtccgaaaaaccttccaacatccggtcaaacatccgatttgacacccaaaaattttcttttcgcgaactaaacaaaccctatattaatgtacctaactttgtacgatagatatgggcggatcaactaatcaacacgtgttgaggtgggtgtttttctttttacaataaaataagttatgggatgaaatctcataactaagtaacaattttgatggtttatgcttttctgccttaggaaaatggcaattactgaaaaaaatttgataatataccttcctttttaatgatttgcatttatatatctgtataagaagaattagcacaaatatacccgtatcgcacgatgggaatacgggagcggtacgtaaccgcagccgggttgttcacgcaggttgaacgagcggcactgcggtcccgtgcactgaaagtgcggcaccgcgtcggtgccgtggtctcggagagctggaacgtggtggcgaggcggtgccgcggctgtgtcctgcgggaccgtcgcgtccccgcagattggtgatgcgggatggcgcatgctcctccaatacatgcatgcttacgtgcatatgctttgcacgagccagccaatggaatgccggctcacaggatgctacagtacgcacgtaatctaacttactgctaatgcatgcatgccactaatcccgagcaaccaatccgcggaactgcgtcggttccgcgcaactgtatcgcggcaccgctagactgacacggtcccacgtcttcaagctgcgccgccggtgcggtagcgcgttcccgttcagcgggaaacgtatgtttcgtatatatgtgtaaaactacaaaaaataatgcatatttcaaaatataattcggcaattactccgttagttactcaccattgaagatcatgagcgtacaacgtaagtaggagaaaaaattgaaccatgtgtatagggaagaggctgccctgctctttccagcttatacaccggattattgaaatgaattatttgctctagtttcttaaaaaaatcttgttctaatgacgtttaggccacttgttttaagttatttataaatttattttttaaaatgttttatttatccacataatcaaattaataatcgatgatattaatatgctcagtaattgtaacatacccgaattctaaatcttaaaaaatttcctatcaaaatagttggaagctaacttttccattttcgagagccgaaaattttcatttttaacctaggagtggtcaatctgacttgtactaaagtaaaatttgagaacatattaaaaccatttcatctctaacgtaggacataaatgcgaacacaagtgtagacatgcatactcacatatgatatggtttaacttaagtctttcttgtgcatttggatctttgtttgcatttcatatcaggactcatgagcatgattaaaagataatttcactaagcaaaacctaaaagtgttcatgagtaataatattaaagacatgaaaaggaagtctaatattaccacttcaggtcaagagtagtctaaataaatttcttataactatttagatgcatctaaaaattggaaatgcacatataaagaaagaccttgctaattatctaaaataatttgtgcaagataaaatcatgggaaaattcatgtaggctctaattaacacgtagaactcactgtaattttggtacaatttaataactaaatttgataccttaaataaatcagtcaaaccagtcaaataatagactaattataattcctaatcggctaaaaccatattttgtctaaaagtgcatttaactgcatggaagagcataagggaaataatttattcaaatattaggttaattttaaagaataaatattatttttccagaatttatttcttctgtttagacctcctaaaaattcaaacaaagttctatcgagcccattttctccatttttctaagagcaaactacacatactttttgagtgtaacccaagaaaatggaaactaggtacatacacctacctccagaaaaatccacctgaatttatctacaccacaaattaatccatgaattaacaaatatggggaagagaaataatcctgaaaaattcctgaaaatctctgaaaatcaagtctttcaccactctcacccacggacccacctagcttacatcgacttgggctcacttggcagctacttgggcttgcccactccctatccatctcttccaaccgaccagtagacagaaagagagagatcgagggcgctggcagtgctcgacgtgttgggagcgacgtgtcgacgccttcaaaatgccgagctccttctctactctcccagacgcgtcgccactcttcactttccatcccagtgccgatccaaccgagggtgagagctccagctctcccactccacctctatttcatcgtcggccgccgagaaagagggcgccaccgatcaccaacaagccgtcaacatccctatataattcacgttctattatcttctctccatgccgatcaaaactcgttttgacaacctctcgattcatgcagccaatcgatgggaacgctgccatgcccaccggagctctggagcgcactctgtgcaccgccgcagcgacatcatcgccgttcccgcttctgtggtcagccaggccaagctgtcgcgccaccatcatcgtctcatcactacgaccaaaatccctcaagaacccccaatatttatgggccatggacggagatcggtattgtcttctctggcttcggccaatcgtcgccgtcgccgattccttctcctctggtgagccattgtccgatactttgcacatgaagcatccctgagacctcgctaacaatgtatgtcctcatgaatgccaattagattggtagatcaagccgtcgacatcatcccggagtgaagcgccgtcgccaagccatctcgtgtgctgccgccatcgtccggacctcgtcaactccggccaacacctcggtagagacccaagaacctccaatactcacatgcatgcacccaatgaaccaatacatgactgcggatgcacatgcaccatcacccgaagacaccttccgctcacactcgccatcggcggtactccgatgtcccctaaccaagaaaactagaggaatggaattgcgagaacatgctcttcattttatattttgacctgaactccaaccgagccgccgtttgccgccggcgaagccatggcttagctctgctttatctagagcacaaggacgtctcctgtgaattagattaagtacaggggtctgtatataaatgtagaatcacactgacatatgggcctaggaccgagtaatgatttatgaaactctaagggcctttttgcatattggactgagactgacttagacccataagcttagggccccctttgatttggaggaaaaacataagaattttagaggattttaatcctataggaaaatttcctatgaagccctttgaaacaaaggattgaatcctatccaatcctttgaaattcctatggaatggacaatcctatagagattttggaggaaattttgcaagagcttcaacctcttgctaactttcctttgagtctatctctctcatccaattcctgtgtttttcctgttgttcaatcaaacggtcattcctgtgttttgcaatctctgttttacacttacattcatattaaaatcctacgtttttcctatccctatgttttctcaatcctgcgatttaaagggcccttaaaatctgagaatataagagaaaacaccaaaagcactcatttttcaacagaaaaacatgcaaaattgtagagtccataataaattgaaaacaactcattttggagtaaatcaaatttctgtgaactcaccggattatgaactttaaagttatgaaataaaaacttgcactcacagtacaactttcacctctaaaatttatctaagaaaaattttacataaagcatgcacaaacttataaaatgcttacaaaattcatttcaactcattttggggtaaattcactttacacagattcaccaacttacactcccgtggtaaagtgaaatagaaacatatactttntgccaaatgtctctaaaactaatatcttcaaaataattagttttatgtagcctgaacttttagaagtttatataaaattcatattaactcctttttcagtaaactcaatttctgtacaatcacaaaattatgcacttcaatgatataaaataaaaacacacacttatagtacaataaaagcccctaaatatttatataaagaataaacaaccaaatatacactttagcttaaaaaatttgtagaaaattcatctttagtctaaatggagtgaaccaaatctctattaaccagcaggaaatgaacttcatcccagtaaaataaaatatggcaccttctgtactaaatatatctctaaactttaaattgataaaactatatgctaatcacatattactagttaagcaaattataaaaaatacatccaaacttcaaatgaacccattagatcctagatggaccagagaacctataactccaacctctcccaccaaaacttaaggcacttagctcatataataatttctatgttgacataataaattgctagcatagactagagctcccctagtttataaaaatatgaaccatgataataaagaccataagcttatgaactacaaatggattaattaaccaaattattccttgagtaaattgcatcgccagtacatgaactcggcaggtaggtgcaatctagtgcacaaacttgtaaaatgcttgttttggtgcatgaacttgtccaatgcgtgcggaggaaggcgaaaaggacactagatggctaatcttattgatttaggagctaattaggatactatgtaaacatatatctgagaaggataccattagacatacaactcttcaataaagaaaatagaataggatagagggatagtagaaaaagattacaaaaccaagcaattatataaaggttagaaatatataaaattcatcatttttatgatgaaggataaagtagagaccaaatttataaatattgcatgtcttttgcatactcactacatgtatgcatgttacatcctaatcaacatcaacatcataaaattaacattgccaagttattttggtcctcgttcacatgaactagacaagttcatgtactgaaacgagcattttataagtttataaactaaattacactcacctaacaagtttgtataccaccaatgcaatttactcttattccttttactcaactcaatcaagaagtaacatgttctggacataaaactattaagacatatacatgtaaaacactatatgcctacaacacgctataacttgtaaaatttataagaaaatcattataactccaaaaaatcgtgaaaccaagtatgttagtcttaaaaaatagacaccactacacgcctgtgaagtctaatataataaaaatcacttggcaaaaatatttcataatgctacctaagccaatagtacactataccgacgtaacttctaaaattcataactctctaatgtaaagtgataaaatataaaccctttcacctaaattcatatttgactagtacctattcactatgcacaaatcattcattttagagcattttggatttttcgcatattttggtgtttaattgtataacgtgtactttgtatagatgattgcttaaacggtgaagaagtgatttagatgctgactttttccagttactagtcaagtcccacctccctatctctttgatcacattggtcctatgttttggaggttattgaaaatgtttgcaaatcttgcatgtcatttgtacactaatacattaaaattttgttaaacttgttaaaataacacctattgattgcattatcacttgaacttcacatataaccataaccttcattcctagcccgggctgcggg

SEQ ID NO: 20147 - DNA, 11324 bp, Oryza sativa
  unsure (1)..(11324): unsure at all n locations
caaaagtaaaataaagaaccaagaacactttactttagctttaatacaaatgcattattatttctataattcatttttcaaattcatatttttctgaagtggtttattagtcatacaacttaacaacagatgatgtgctttgtgccctatggaacagaaattataagcaagcagatagcaagcaaatatactatgtcaagtaataaacggatcagttaattgatatcattgacacattcaagaggaatgacttacagggttgtgcatctcttcactcaaaccaaaattttccagaatagaagcaaccaatgtggagaaataatgtacagcataggagccaacccctacctgaacatcagaatagtaatgataaacatgtaagaagaattaattgcaatttcctgaagagtatatcaataaaattaataccaggaagttgtgggcataggtaacttaccacagatccataaattgtgaggtaaaataaacttttcctgcccattggtaacaatttcatcccctataacgaaaaataggtcagaccatcaatcaattttttttcgccaggacagaccatcaatcaatttgatagaacacatttttccataagcaaaataaaatacttgttaaaattgagtcactgatcgttccttatcaaaagaaaatgttattacttcttggtcttgtcacagaatttagagttgcttcatgctctattttacaggaaactaagagaaaaataaaactatcttcgctaattagagcaagagatctaagtttagacttgaaaatattatgaataaactcaagagtgaggtgttttagcgaaatgcagtaagttaacaatgtatattactccttaataataaacttggtggaagtgccccaataacaaaatgcagccagttaacttaacaatgttgtattttcatgtctttcaatatgagtctttattgaacagtaagttggtgttcccttagcaagcacctagcctgtctaggaactatttaggcagttgctgctggccagccacaatacgaagtgtctataccaacaatgataaaaagaaacatacaaaattatttgattgagaatacctggaaaaggacaatcagaacaacaagcaggaccccaagagccatagaactgctatagtaaaaaggcgcccatttgctaacaatgggtgataggaatagcagaataaatccaataccgaggcaagctagacgccatttctgaaactctgcataaatacacagaacaagaacagtaattatagggaaggaatggacatagatgctcttgattgtatgactggtagaacaaatattaggttcatgaataatacacaccttcttgaatggaaatactgaacctagtagatgtcttatcagccactttaacatcaacatatttgtttccatatggagactttacagcattccacatgccattttgcaaattttgccattcacctgtctcacattggcataatcccatagaagcattcctgcaaaggaaaattgactcatttctttcccgaagcatgtgtatatttacactttggacagtatgacttacccatgaaagcaaatttctattttccaatggaacttttcaggcattgattgggaaacattcattttgactcgtatttgatttgcatagcttccaatatgtaacttcggtattccagacaagcgaactcgctcgcaaaactgtccacccagggatgaaggaacaaaagtcacctctggattttccagactaacatctgcggaagtaatcaattagaccagcatgttaggtagaagacattggaacacaaaaaaataataataataggacattggaaccatataggcaaacctacaaggggattatcatacaaaaatccaagtgttgtgctaaaaggaacatgtaagtaaaagggctatacatgaaaagaagctcataccaaacacacaggtgaatcggaacaaagtgggtacggtctagctattaagagatgttattcaggtaaaaatcatccatctgtatacttcaaaatgacaatacttatccttcagccaaggccgaaaccactgaatacaaaacaaattttgagacattatcaaaaatgcattggttctgaagtaaaaggagaggcatgttactgcagatttattcgcgacaaaagagttgcaactttccaatcacccctccacaaaccaactccaaaaccctattctataactaagccccatgaaaacctaaaatatgaagcagctaccagacgcatcttacagcgaaaaccccaaaccaccccaaaggcccctaaaccctagatagaacggcgctacgatccccgtgcaaacgcagcagcagtcccaaatccggcccatggtgcaccaaacagcgggcacgattatacctttgatggaccgccccacggcggcggaatcgaaggccgcggtgtcatcgccggtggagatgatgaggagcgcggcgagcgaggctaggagcaggagcgggggagccgtgcgccggtacgacgaatgggaggtggaggtggcggcggcggcggcggtcgagggcgcgctaccggcggaggagccggtggtctccgccgacgacgaggagacttcggcggcgggggccatctcgcgcgggcggcggcgacgctgcaaattcaagcgactcttcttcttcttttttttttgttttattgctattattatctgatgaagaaagcgaggggaaaaggagattggtttttatggcgaaacagctgattgtcttcgatggtaagctacggctattgtcactgacaggtgggcctgttttttgctgactcggcgcttcttaggcttattttattgcgaggaaattcctgatgagtttgtgagggagactcctccgttgaccgtcaagacctccgagcaaagaggctgacacgcgggcccatgcccgccaatccgccatggctaccgcaatagtcggttagcgcgtacttggtttcggtgagtacctaaattttgacaaattgaccccttctcaaaaaaattattttaaaaatggtaaaagattttgttttgaaaatgaactacaaactacaaattcagcgtaagcccgatagcattgagatcaaacgtgcaccccaaattcacattcgcctcacgaggcacgaggggactacatgtaagcacacgaggctaaacatacacgattacatatatatatatataaatgatcaatcgcattttgatgaccatttggacaagaagcaaatcacgggtattagaatcccaattacacagtgagagacagaacgtggaagattttcttgatttctgcagaaaataagcttgtttcattgcgttttctttcgtcatggactagaagagtttgcaggacccgtaaggtcaaatgcgtagttggccaagtcatccatgtactcatcaagagcactctcagatatctcgaagttgtgctcgatcagctgcacgcatgggggaataattagggaaacacaacaagaacgaagccaattcaagcaaaggtaacacgaacaaggtggttggtaccttgatttcactcatcagctccctctccatcatctgtatcacacgtttttttcaagaaaaaacacgagcagaagatgcacataaacattgttatctggaagttctgtatcatgaagttttcaatatctgattaattcaaagaggtgcaaatatgatgatgtcattctacctgcaaatcgtccacagagaaactggtctctaccatctgcaaaggcgcagcatcgatgttaagttgcgatcgcatagaacaagtgcatttgcaggtgtgtcgcgaaaaacatacctctatatcgtgatccaacagcaaatcgttcaacatctgcatcacatgttgaattcatcatgacgatatataccctcaaatcaggtacaagaaggcaaaacttcaattaaagatgaaagaagatttgtacctcgatttcagccatagcggcatcgttgtccctaaccatctcagatgccctgcacatcgcaacatgtttttttgagataatgaatagaaatccggtctctatatccacaagtggatatacacagccaactgcaacatgtttcagagaagtttatggcatgcagcactgtatctttttgaaagagaaaaaatgccatgcagcatgtgaattccacaatctagtttcctcaaacaaccatacagatcaagtgcttccttgcttggagaagtggttctcagcagatcatgatcatgaagagacccaacacctgaactgaaactctccctgtacttctgaaaaacaaaagaaatcaatagcacgaacaatcaagatgcatcaagatcttgtgcagcagaacgagaatgataatagagagaaagaattatcaaaatatctgataaaaagctctgcaacatggcaggagggtacctggaggtgactcttgatgttgtgggtcgtaaggcttgtgacacccatagcttgcattgtctccttcactgcagttggtttagcttctgaagattgcaacaaatgtataacacggcatcagttttttttaacaataacatggcatcagttccatcaacgagtattttgagatcaagcagtgaataacaaacagttttaccatagggacctccatggtaggccacagcctccacaaacatcttatggagatcatcagaccatcgaaggtaactccttgttggctgcatagcccggataaggcgagaaaccagaatgctcgacatgcaatcatcctcttgtgctggctggctgttggacattattctgtaaatcatactcagagcacttcagtaaatataaaagacataaagcctgtttggattgtgtatttgtgtaatcaaacaagacagattcattaaattgtcagtatggagtaaatgtgaggatgtgcccttatggtaagggaaaacatttccaaatagaaatgtgagagatcaaacatgagtaccgatgttttaaaatcctatttagaaatcaagaatgcattagatcagaataagagaaaccagaacttaatacaaatactagtaccaatgtatatgatgaagaaaaaggaattgagactgtgccgtctatttttagggagaagagtgagatggcattccaaccttgaaaggatatcaccccttttatatagttcttcctatcactacactgcctatggaagggacattctacattttgtctagcacatcggtcatcacagttggtgtacatggaaggaaaggtaggcagagaagtacaagatttcaaaatggtaagataacaaaatgaatgattatctcatattaagcatggagtataacagggtgctcttttcgcagcacatgcggcctctgcccaatacatgaatggaagggcatcatagatcatgcaaaatcatgaacgtgataaagaaagaagcacagaactgcaaatataaattaggtacaaaatgaatgttgaggttaacttatcaggcaagctggatgtttatgatgtgaacaaagtcctatcctgccaacacctagcagcagcatggcagcatgaccttgtcttgtcattgtgatgtcatctgcacatttttccaatcaagaaaatatagaattacagaaaatcaatcatccatactaggtgcctaaattttgacactgcaaaacgttgtccatccttcaaatgnnngcggaaaagtagggaacaactccaaaagatctggaactggaagtactatcgaaaattagttcaatcatacatgtatttgcacagatgtatcatgaggtgctctttacatggaagatgaaacatacataaatgcaactcttgtcaaacttgtattctaggtatggttggaaattttgtagaacagtagagatcacaaggatgataagaagtgcatcacatgagcagcaactgaattagtgtataatcaaattgctgatattatacataggagtacatcaccttcttgaaatgccatcggtaatacatgctattttacaaagaatgtaattacaagagagaacaagaaaatgtccctagttctcttcagggttgtaagatggcagcaaaacggacactaatcctcagcaacatacttgttcctacgagcaccaaaagcaatcctctgcaagtgaaatcagggacaatggttattcaacacagtggaattgacagtagttgaggatgtcaaataataacaaaatacagtggagatcttactgaaaatattctggagtaggctttcaagcctgtgagaaaacggatgtaggttggtttcatggactggttagtaggtattgctctgatgtttggaacgagataatccgcaacctatcataattcataataaagttataaaaaaatatattttggaccttacagctaactagaagactcaacgagtgtacattaccatcaataacatgtaaggcaggtaaattggatcactcatagatatatcccgtgttacatgaacctggatgtcattggtggtataaagcactgcccatgtcatgtaaagcttttcaactttttaagttcaatcgagctaacgtattgaactataaacaactagtttttttatgtgtcctatgaaaatattagatggccacatttgttctgatcaaaacaactgaagctgtgcgaataattgttttgcactgaaattaataaatactaagggtatgcatgtgtttcatgacagatgtaaaggtatgcatgatcaacgaggtattcattagcatgtttgaacattgataatgcaagtaaatacgtcaggtttaacttaacccatcgataaagaattgtctcatgattttcatgaacatataaccaggtccagagatcatgttcaagctatttggttagatatttcaagctatttggcttgcagtagctaaatcatgtttgctacttcagtcttcagccatatggaaactagaacaagaaacaacgatatgctggggaaaaaagaaatcaagatggagctcttaccacattagcaggttcagctaatatattgatgaaaaatttggcctgccatcagtataaatccagaatttaataacgatgaactatcttgtcaacaattgttaaaaggagaccatgtggatcactcacctgctttgttgtggcaccagacataagaagatctgttgtaaccatgccaggctgcacagattaatatgtactcggtataattattcttgcatcattattaatcgattatacaagaagaatgcaaccaattaacttgcagagatgcatgattcaaagcttacaggaactaatttgctaaactactccagtgtttaatcatctagttaagtctaaagtagtaagacaccaggaaaaaggttggagttatgtaccgacaaattgtgcaccataacattgttcacttcattcatctgcaactcggcctgcaattagaatcaaattattttcttcctgcaaattctaataaacaagaattccagaaggacaaaaaaaagaggaaatgaaaacctacattgcgagttctccagaaaaatcgttccatttaagaagggaagggtctgaacctcaagactcaagtccaaggattatatggatgattacagctttatgttttttttttcaaattattaatgagtattgagtaactatttgataatcacagctttattgttctggatactgagaaatggtggtaatcaatattgcatcatagttgtgatgtcacaatgcagttaacaatttatatgaagttacaatgccacaaatagtggactatgaataaatgctacactggatatgttctgatcaaaacaaaatgatatgaggttatatcctcacataacctttacctgcagagattttgtaaggtgcaccacacttctcttcgttgcaccatatgcagcaaacctagtcattatcaataataatcagtgtctatttctgaaaggatattaagttattaagtagtatcctggtgtaaccacaaaagcactagttaccaaaatataattatatttaatatcgcttgatacccccaaccccccaacgcgcgcgcgcgggggccaccgcagtggtgtaattttttcatttggttgaaactactgataacagtacagtatatgtctatatggaagccaaattcagcacagaaacttatgaggcacagttatgtggaatcataggtactctcctattagcaattagcaataaactaaaaggacataatacatgatgtgaaatttcatagcttcatactgtatgagaattcaaacataatgatataatgattgaattgcacattgagtgtctacattttactacagaacagaacaaatggaaatgcataccttggggttggccttccatcagaaccagcaccatcgatgttaaatatgtggccacctcgaggttggtttctcatcatatttattgcctaagatggcaagatggcaagaagatgaatatttggaaaatgaatcttcacagttgttgtaatgaaattcagaaagctagtatgagttgaaagaaatacctcacgacaacatatcattaatccaagagtgttagttgtgatcacttccctattaaatcaaagaaagagtggagtttgaatatagcttgaaagcacaattgaatgtatttggtcaagccataaataaaaagacagcatgaaaattacatgagagcctcgtcggaggtctcgaccaacggtttgtaactatatgcatttgatccagcattgttgatctgtgccaaaggaacacaaagataaggagaaaatcctgccttcttatggttctagattttacccaaaaagattcaacactacataactgagtgcttcaattaaattactgaagtttaaatattcaaaaagggtagctgagaaatttcgaacactcatgagtatgtagtgagaatcagcataactttatagccagtgattttcatatttgtacatatgaaaagaatataaacatgagtaagttcatgtgcagatatttgatgatgatggggtgattatgtacccaaatatcaatatacttcatcttgtcacgtgcaaaatcaactagtgcctttacatcctttccttccctaacatcacagacaattccctgcaataatacaaatagaagcagttcagttgcataagtattattgcactgtaaaattttcaacaaacataattataagtggagactccaatggcagtaaaagtatcaagtagctcagcagtaggaagtaggtacccacacatgttgctctccaaattcctttttcaagtcagtcaccgcagattctaccctttcagctgtagaggatagactgcatgtcaaggaaaggctaaactgtaacttgtttgcttttttttttttcattctctcactaaaagtgggctcaagaaaatcctagcaatccatttgtttattcattttaaaatttcatgaaagatcaatttaacaggtcagtcatatcaagcagatgacccctatatagagcacctaatgagcgataatgagcatcaaatgacaaaagctggatagtgcatattttagtgttaggtcaatggatcatccaaatgagaagagaggaaaataaagaaacaggtaaacgagacttgaccatgcaaatcaatttgcaatgcatcttaggctcgataatttatccaattttatttatgtcatcactcaaaaataattactaaaactagcgctacctattgaaagcacaaaatcatttctgtacctgatcttgagcagattacaacattatcgccagccttcaaaaattcctttgccagagcatatcctatacctgtttaagagcaaacaagggtcattgagttgtactacaaaggtttttgaaacaagcttccacaaaggaagcgtttaggagatatacctctaccaccattgaccaaaagatctaatatgtcaggatttaaatatttttttaccacaatacagtatcaaagcaattgctccacacagtttcaagctgatttgcattgtttgattaaaaggtcaatgccgaatgcactgatgttctagttcattttgtcttctaaattgtgtactagaaagtaggaaatgaactaattaagcaggttcttatgctggtagcggcactacccacttccacccctacttccaaattggtgttgctctcttctcggctacataaggcacgaaaaaacaacatcgccaccacaccacaccctgaccatctgaattatttccaacacaagcattcagaatttcagaaatatcgatcaccaccagttcctatatgctcctactaaattgcatcccaacaaaaagcatccacagacatcctacttctttcttgtaagcaagatcaagcatgcgaagcaacacgacgacgagggggggagaactcaacaacacctttcgtggaaccggtgattagaacattatacgggggcaccatggccgccctccgcgcgacccctccaccaccagggacagcctccgcgcggataccggcagcctccggcccgcctctcgccgcaagccggcgccgcgccgtccggccgggcaaccgcgccccagcagcggccgagcccgacggccggagcggagccaggcccacctgcgcctgggcacggagcgggaggtaggcggcggtggccgccattgcggcggtagcgagacgaggggaggggaggggaggggagcggagtggagaggcgtcgtcaactgcggtgctcgccttgccggctcgccgtcgcggagtctggataacgattaacgagcgaggattttagaagggagggggcctgcgagttaagtacggatgttaagaggtggaggtggcccacaagtcagtgtgagcaatcatcctttctctctctctctcttttaaactactagtagtatgtactagtactattttgcaaggtttttttaactattatatgcatgtgctttacaatagttttttttttcgaacgcgcaaaagaattgcacgtcaatatattagtaggaaaagagtttttgttacacaaagcaatcagccagattggcttatgcctaaaggggggacttgaagctaggaactactacgacggttaaaaacgtaattccaaacagcgggagggggcaaagccacgctacactcccaataaatccccaaaaaaagcaacgccgactaaagaccacagctggccctccgagcggatggactccagaaccactgcgaccgaagcgagcgcagagtcgaaaaccctggagtttcgttccttccacagctaccaggagactaggaatacctggagtcg

SEQ ID NO: 20148 - DNA, 734 bp, Oryza sativa
tcagaatcggacacttttagaaaatctccatcccaaactttttcagataaacaatcaagaccatccatttcccaaagagccaaatcggcactggcaacattaactaacctgtcggctggtacaatttcaatcttgtcgccttgccactgaatcaagcattgatgcatagttgaaggtatacaacaattagcatgaatccaatcccttccaagcaaaaagctataggaacccttcccatcgatgacaaagaacgttgtagtgatggttttgttgccgccaaagtccttgagcaccatgttcgtcttgataaggtcttcagcatttctaccaacttcctgaatgtagtataaggcatcaagtttaccgcagccccaccatcgaccatcatcttggacatcggtttcccattgacataaccatttatatacaatggcttaagatgacgattccctgtaccttctggcttctcaaaaaccgcttgttgtggtgacaaaacaaacttagccgattcttattcaacaacaagttcatcactatcggatatcggcttgtcgtaccccaaactcagcaggcagcgtgaaaaccatattgaccggagcggttacaacactttttcctttagctaacctttttgcctcatcatctggggcctcatcggctacaggaacctgattcttaacacgccactcctgccttggctttgttttcttcagccaatggttaatttcctgttc

SEQ ID NO: 20149 - DNA, 690 bp, Oryza sativa
tactttgtaagactggtagtgggaagacttacacgatgtgggggccactgtctgccttgtccgacgatacggtcagcaaagagagggggctgactcctcgtgtttttgaactactgttttcacgcatcaaagaggtacgtcatgatttgctatatagctcccttttttcctgattgcaaattaaaggtccatatgtactgttaatttgcaggagcaagctaaacactccaataaacaactagtataccattgctgctgctctttccttgaggcaagtgctatttaagcctctaaaatcacaataattatgattctctcttgtgatagaaattcagaattactttttaagatatgcagatctacaatgaacaaattactgatttgttggaccccgtgcaaagaaaccttcaggtgaaatggagtttcagaatttaattaaaatacttcctaggctgcttctgttctgatacgtctcgtacattttcagattagagaagatgttggtacttcttctgtttatgtaggctgcttctgttctgatacgtctcgtacattttcagattagagaagatgttggtacttcttctgtttatgttgagtcattgacaaaggaatccgtgttcacgataaatgatgttacacagttgctagaaaaggtaaaactgtttgtcttatcatctaaaaccttat

SEQ ID NO: 20150 - DNA, 15809 bp, Oryza sativa
ctacttattgttgctgcagaaacctgattaatatactggcggaggtatcccagtctggaaaacaaaggcatcatattccttatcgagattcgaaattaacctttcttttgcaagaatcacttggtggtaatgctaagctcgcaatgatttgtgcggtttcaccatcacagaagtactgtttgagactgacatgctattttcttttgccattcttgcttcttcatgtgcttataatttgttttttcttctgcagctgtaagagtgaaacactaagcactctaagatttgctcaccgtgcaaaagatataaaaaacaatgctgttgtcaatgaacaaagagaggatgatgtcaatgttctccgtgagcaaatcaggcagctgaaggtattattttaatttctttttggtaatcatgattttcaattaattggctctatcgttattgcaggaggagcttcaacacgtgagatcaaatgggagcttgccaggaagcaatggcagcccttccactgggtggaattctcaaaatagctttcttttgaaaatgagcttgagtcgtccaactgcattccccaccatcaaagatgatagtgatgaggagatggagattgatgacaatgatgttgaaaagccttgtaatttagaaaacaagtcttcatttcctcacggggatgttgaaacaagtagatgcaagtcaaacttggcagcaagcattcagaagggccttcaagtcattgaaagccatcggaatagtgttacttggaggagatcatcattaggtcttaacactagacttatggacgctcatctttcagttccagtttgcaaagttgatgtggctattcaaaccgaccccgaagaatctgaaccaagacaaaacactatggctctaattcctagcaatcagcctgaagcaactacagatggaaacagagaaatctctgattgcataaatctacagttagtaacagttgatggatcaataccctctaatgatctaaagcaacaggaacaagtctttaaagtaggttactaacttactatgcagatgtgtgcaccatttatctgcaatatcagcatgacaacttatgcaagggtttgttttattcctataggctgtggagaaggtccttgctggagccatcagacgagagatgttacgtgatgaacagtgtgcaaagcaagctgctgaaattcaacagctaaaacgtttggttggtgccttgcccatgctatcagattttaggatcttttattcgtcgatctgaagtgttttccttttgcaggtgcaacaatataagcatgaacgtgaatgcaatgctgcaattgcacaaatacgagaagaaaaaattgcaaggcttgaaacacttgtggatgggattttaccaactgaagaacttatgcatgcagagaatctctctctccaagacgaaaacaaggtcttctgcttttccatttattttctatgttgccaaatatctacttggttcttttgaactgagcaaagctatattcttaaacatgtctctgtatcaacaaaaacagattctccatcagaagtatgagaaccatcctgaagttttgagtgctaaaatcgagcttgaaagaatccaagaagaattggagaggtacagaaacttcaaggatgagaaggaagttttactggaggaaatccaacacctgaaaaatcagttgcattacatgctgtcatcatcaatggcattgtgtaggcctccagttgaacttgtccaggcaattagtactgtctcagatcgtccaaccatttcggctttggaagaagctggtgatgacggccacagcattgtcgatgctgctgagagtagatggattactcttacagaagagcttagagttgagcttgagaagagtaaatctctatctgaacgtttgcagcttgaagtggaatcagaaaagcaatgctcagaggaattaaagggggcattggaaatggcaatgcaggggcatgctagaattttagaacagtattgtgaattacaggaaaaacatgcatccttgctctcaatgtgtcgcaccatcaatgatgggattgaagatgtgaaaaaggaagctgcaaaagctggtgtgcgaggggctgaatctaagttcattaatgctcttgctaggcaagtatcaattttaagagctgagcgagagaaggagcgtcggttttggatggatgaaaataaaggccttcagcaacagctaagtgatactgctgaagctgtgcaagctgctggtgagcttcttgtacggttaaatgatgctgaggaagctgcatcacttgcgcaggtaacattttctgctttgcatacatagatatgcttggaaccttggtacgtagttatcgcatactccctctgtattcgtaaaggaagtcgttttggacagcgacacggtctccaaaacacaactttaacttcttgtttctataaaaatatttattgaaaagtgatatatgtatacttttatgaaaatatttttcaagacaaatctattcatataatttttaaattttcaaactcaacaacttgagagttatttatgatttatattcccaagatttgacttaaacattgtcgtaaacgacttcctttacgagtacggagggagtactgtacattaagtttgattctataatttataaagctatttatcacatgctaaattcctcgagtaagtgatcctgagtgtaagcatcttttttatatgctctgctttagactccagtacaaagccaatctgatgatgtttgcatcgatactcccagttaaaaccgaacacctaattcttcccttgttctgtttttttatggttccatgccttcacttctgcgtccaaatgaaattctgttcaaatcaactcttgtgagccaattgcacccttgtctcaggctaatatccattgatgcatcttaatttcccattcggaaataatgtactaccaattattttgcctttcatgatttgcattgtttttttatctggttctcgttacttatcttaaacctgtgcagtatcaactaaaatttaagtaacctgaaaaattagaacaatgataattgagttgatgtcactatttcatcaaaactaagaacaatattttcctttgctgcagaagcgggctgagttagcagagcaggagatgaacaaggcctttgcagaaatcgacaacttgaaaagggatcatgaccaagaagttcttgtgctaaaccagcggctcgctgaatccaaactgcccagcaatgttgtacagtcacctgagcctagtgagaccggccccgctagatacgacacaggtgggagcttcggcgatgagcaatggcgagaggagttcaagcccttccagtcggtcgaggtctccaaaagcagtgatcccagctcatggttttatgggtacgacaaatgcaacatttgatgaggcattctggagccatttatattgatttatttttggattctttcacctagaaaggtataatatgttgtacaccttgccattgaggaaaagaattttcccaacgttggctttgccatggcccatataccaaaccgcagcatccctcgctgcctagtgcctgcctgcccctatcagcaggactttcacaggttgtatgttgtgtcgcaaactgaaaactgtaaggtgtatgtttagatggattgatgatgcatgtaaaaatggcggacttattttttgggcagttggagagttgatgagtcgaaacttacagttaaaatttatcagaattatcttttttttcttacagttaaaatataatgaatttgaagataaaatttacatacaagtgtaattagaaatttatgtataatttttttttctaaaattttcggttatatttgctaattgatatgcaaaacatatattaaaagcttatgtgaataggatatgtttatgttattacaagtttgtttagtatcatctaagtcggctctatctccatgcatcgatactgttttgccgttgtcgcctctgttgtgcactcaaaacttttttctcgtttgccagcttggcaagtttttgttgcagtaatgtaagagcgagtacaatagcgaattaataatctaatctaattattatatagtaggattttagcatattagcagagaaatactccctccgttccaaaaaagccaacctaggaagggatgcgaatataaacaaagggatgtccagattcattatactaggtaggttgactttttttttgacggagggagtaaactgtatagagaaaagcccgtgactaattagacgcgcttatgcaaatctgcacatacgtgggctctctacatgtcacggcgcacaatagaaaaatagaacatgcagcaatgcccaactccttggaacaagggactgttacgattaaaagtttaaaacattgaaaccttgaattggtgaaagcaagttaatagtctgttgttgtatgtatggtagtttagctatctcttagatgtcgttggttgcacgtttattgaaggaataagttcacctgtcattcctcaactttacaccgagtttgtttgacatcccttatccataatatcataaatcttcaccccataaattatacaaaactgtgcaatttaggtcccatagcagcatagatgcctggttttgccgacgtggcatcatagagaaaacaaaaggtatgtggggcccatgtgtaagtgagacaaaataatgtgggccccacatctcttctttcttttctttattctcttctctccttctcttcttgggggctcgacctctcatcctccttgccggcggcagatggggaagaggtgaccggcaagcctgggcgagctccgccatctcaagaggctttgtcgtcaccactgccgctaccgcacctaacgatgacgatgacgacgcacacgcgccagggcggcgcccatgttcgccgccgctgcacccgacgacgacgacatgtgcgtgtgctccaccgcctgaccaagcaccccgcctttctcaccgccagcgactggtatcatctcgccaccaacgatgttttgttgttgaccatcatccatgcgccactgttggagccagccccattgacgccgccggacgccatgcctcttcccgaagactgcactgccaaagttgccgccgattgccacagctggctttgcggcaacaacaacttcatcatcgctgccgcccgccagatctactctcctcctcttcctccacctcctcctccgccgccgttgactctcaccgaattgattagtcgctcgcgtgaatgggtggatatggatattgttagtgtttgatggggaggtgggggtggtaggtgggtgaggtgtggcaagatcactggcatgatgcctccctaggtgagcggtgggatccatacggcggcggcgaggacgaggagaggccgagaggggatccatctgcactggcacgacgccttcctaggccagtgacgggatccatgcggcggcggctgaggagtaggagcggccgataggggacccgcccgcgctggcacgacgccttccctaggccgcggcgggatccatgcggcggtgaggaggaggagaggtcgtcgtcgttgggggtggcggcggcggaacctctcgaggtggcggagctcgggcgggcttggcggccacctcccccccatctactgctagcgaggaggacgagaggccgagcgcccgagaagagaagtaaggagagaggagaataaagaaaagaaaaaagagatgtggggcccacattattctctcacttacacatgggccctacatactttttgtttcgctctatgctgccacgtttatgggactaaactgcacagttttatatagtttatgggtgaagatttttggtacagaggataagggatgtcaaagagggatggcaggtgaacttattcctttatttaacattctctaagtgcagttagcgggaaattccggccagatttattgggcttatatggcctagagggctagatgtctctagaatctagatcggcggccgggctcccaccactccacactccacaggaatgctaccaccactcgtgtctgcgctttcgccacggtctccgtcgcgtgggcgcgaggaggatgcaaacggaggaggcagccggcgaggtggtgggaggcgttgtctccggcggtggcgcttggcgagtgaggctggtgcgggcgctcggtgcctcggtgctgaccgcgaagagagggggcttgcgggcaaggcatgcagctcaggtgctcgacgaaatgccgcacgaggggaaggcgctgttccagctgcggccttcggggatgagcgcgcggcagggtcaaccgccgtgaacgtacagtgggatctgggccaggatgctcggtttgaccgggttgccgcgatggcgtggcggaggcagagcactgttgccatggacatgatggctcccaattgggcaccttctgctttcatgtgtcactggggcagatgtcttgacacgatgacaaccgggcagtggagattgaagagatctagatgtgtgatcgatgtcgcctatgcggggttgcgctcaggctcagctacacggctcatacttgctgacatacgaattgatcttgatcagagtggttgttctagtagcaatatctgatggcagcaagatcaatttcccagatagcaagaaccatcgatccattctatgcgtcttcctgtcaagacctcagatcagtgttcatcagttgatgatcaagtgacaccatgatgcagagttacatgtttcactcaaggcaaaccagaaatctcgtcagaagcttcacgtcctacatctgcacaggggcagcaaaaccagaaatctcctggtcatcaagtcctcaactcaaggcttataaatagaaaggccccaggcttctttgtatccaaacacctcttcacatttttccctccaagaaaccgacccgctccactccaccccgcaacgcaagaaaccaagaactcctcgaccgccggctcgaggccacggccacccacccaccgccgccgggaagcagcgattcttcctcgggaaggaggacaccgccggccatggatccggaggcggaggaagcgcagcttcgcctcgagatggagttggcaaagaaggccaaggcggacatgtctgggttgcaacgctccagcagcctcggcttggaccacgccggcttgtatccgctgccattgccgccagggtggcggtccgccccaacctcgcccctgaggacaccatcgagcccgcccccgctccagttcccgccggcgtgggcggctgatgttgccggcacgtcgggctcggcggcgcccgaggacgatggcccagcaagaaatgccggcgctgatgaagccacggctgggtctgcgcccaagaacgaggacccagcaagagctgcgggcgccgatgatggccccacgaggtctgactacgccgcgatgatgcggatggcattggccaagttccaagacgacgatgctgctgccgacgacgaggaggcggcgtccgcggtgatggagcaggcgatgaccggcctcatggacctcacctaccgcaaagcgaagcctccagagctgccttacgagttcgccacaagatggcctattcctattgctcatgtaagtgcctgctccttggtctcttgactctgaattcttggcatttcttgtcgaggcttccagctctgttcatgttcttgtcatctttgcctctttgcaaacccgcctccttgttctgtttcttgtttgtttttgctgctggtgggtagtaggaatttctttgttcctgtttgttttaggacgaggaatttcctaaggagatcaattgcatttctttctgcatctattttgtttgttgttgtgcaagaactgcctgctgtttgattctttccctgcatcgtgatcagtgatcaccaatgggaaacatcttgtgctatttatgatcaatgaagaattccctttcctttagttgggcattattaattagcatctggttgaatttccttacacgcgctcgaattcgatcatttgtgcaagtcccatggcatcttgcctgacagttgcattcagtcaaatcgattgacccatctctgcttcttcatacgtatgatagttgcatcgaatcaaaagtttgatccatttcttacccacctacactaatcctacaattatgtgtgttcacaggatggtacgcttcaagcggaagtaatgcgtgatcctgttatcttgccttctggatatgtaagtgacaagattgcccctttgctaggattttatccaattttgttttagataatggaggtttttatccagttggaattctgtataattatctgctgggtgttttcagttttgtttgttgtagctaatgttctgccaaaaagctaagattgtcagaaaccaggcaaattatctatcaccaattgacaaaacattgattcgttgtacttatacacttgttacactggatggtagtaattagtgtccttgtttaaatattgttatttacaatgcacttctagtttttaggcttcacttgccgaacactaaaatgcaaatcctcttggattagatttactcttgagtttgcatcatcttaaatcttagattcctattttttaatctttcaaatcaaatgctaaccttctcttggttctgttaaaattaacacccgcttcctgctttctgtagtagtttgaattgtcaaatgctgcttaggtttgatactttattcatgcacgttatgatggttcataagttcatcttatgatataatgactagaatgtatagtgatcctgaaggatagaacacgggacaaaataataattttaccctagtttctttcatttccattcatgcatagtcttttgcccctttttctataatatcctgtaccataacttatgaacattttggcgatttagcattctattgcttgatatattgattagtaaaactttttttttttgccacaataagttactgtgtgctgtttttctgaagttagctatggtggttatgttctgcaaatccaccatgatttggattatcccagtaaccatattttgcttgtttggttgcagtctgttgatcaaacataccaaaacaaccaaaaacggcagaatccatggacaaataccagcacatttactgatcactccttgccctactctctctctgttccaaaccaccttctccgtgacatgatttctgcatggtgcctcgatcactcggacctttccccatctaccacttctgatacaccttccactcccttggaaccttcagaggaggaacaaattcaacgcatcctaaaactattctcagggaattctgcatcgcaacgagaggctttgaaactgatccagctactcactaaaaccaccaaaggggtgcaaccttgccttgccaagtatgcggacattatcccagtgctgataaatcttaggaggaaatataaatcgagttggacacaagatcttgaggaagagaggctcacaataatcctcaatctgaccatgcacaggcaaaacagggagatcctagctggacagaatgaattagcaggtgctataaaaaaaattgttaagaaggctggcaatcgtggtaagcgaacatcatccttggcgaaggtagcttctatagttgctgtcctgtcagagtttgacatgttcaggaaaagaatgctggatgctggtggaatgaaaatgcttcgaggtatgctcaagataaaggatactgaagtgataacggaggctgccactgcgatccttgcactctacgcagatggtgaaggcgagcaaccagccagatttcatgaggtgcctcagatgctgctggaatgccacatgttcactgatgggatcctgcttcttcttgaccgtctgccaaaatccccacgtgttttcagaaaaatctgtgatcaggctttgcaattggtgaatatcgtcatggctgaagatgcaagtgggccggtgacacgtaagggcatcctctcagcaatttccttgatctacgagattgttgaaagggatgtgggtaagatgaatgcggtgaagaacatggaggatttcatcgagcggttgcgtcagctatcatcagatagattgccgatgcagaaaatgctccaggtggagagaataatcaggactctgtcagatgcgtttccagctcctacggtgcgagggcgatgccaagaacccagtggaagccgtcttctagcttgaatcttatactgttcttctgtacagatctcaaaaggctcgagattttacttctgctcgcttaactttctggagaagtttgaatttgttgactgtgcagcaatgtgatggatcacacgaacaattcaaagcatagacagaataactttgtttcacttcctggtgagagattgtaacaaatgattggtgttagtaactgaccgaattgaatattattgtgattctgtgtagtactcctgtatgaagagaaaaatcttgtatcaactggtgaccattcgtttcttttctcgagtgttacaattggtatataatcccttgttaataattttgtttggagcaatatttcttatatatagaacatcttctatgagcatcaaacttgggagtcaaatgcaacagcataggactcggacaagaaggtaaattatttattttttttaggggctgtctatatatcatgtgacagaaaatcccacctcctatcattcgaattttggaccattggatgtgctttaagattcgtgcagccccttaaccctaactcctcctcctccccccggtttctagatcatgccgccaccctcctcccgtcccacgcgcgatccgctgccgccaccaccgccaccgccccaccgcgccgccgcccgcctcgctggctggccggaaaaggtcaacggcgccggtgaggcccccccggcgagcccctccccctcccccttccccctccccttcccccctcactttctcctcatggcgcaacgacgaggtgcccccgccccgccgtcttccccgtctccggcagctccccgccgccggatccgccaccaccggccgccgcctcctaatcccacccttgatttgccctcgccgccgacgccggcccaccgccctcctccatccccacggcttcggcgccgccgccgcctcgctgcccgctggagtccaccgcccaccgcggtcctccgctgcccacggtcatccctctaagctccgaggaaacccccctcttccccctcccccaaccctcctcctaccctcaccccaacctcaaaccctaacccgccggagttggggtgtcgccggcgccggagaagaagaggagcccgccggagttggaggagagaagccgatgcacgaatcttggcatagatccaatggtctaaaatctgtaagatttcatccctaaatttcattcgaatgccatatagcaatcccggtaaactatttctagttccgtataaatgtttgtgtagaagaagatctaacgaaagtcaagccagggcagagcagaagaggatcggtcgtccgggcggaaccaaaacatcggacaaacttgcaagatgctgattccagaaatgcttataattagccgtctgatgaaagtttaaccacatcatcagcgttagttgtgcggcatgacgtcatggaccatgaccatacagtctgaagaagcagtcggccactcatttaaatcccaaaattcaaatgattttgtctattcaactattcatccgatctataatctaattacacggttggatttattacgattatatctttataataagatctcacttgataatattttgatgggtttttagtttgttgcagtcttaaatgttgcacgtagtgttaattagatgttgcaataaatatttcgtggtgttcactatgtaatttgtaaatgttgcacatgttggcgttttgaatgtttcagcaatattttttatttttcaacaactacaacttgatgattgatgcatgctataacatagaacttaatgtttcgtctaattgttatcatggttgcagacaatatcttttaaatgttgcattctataaaatatttattaaatgagttgaaacatttttttttgcatgcgatgaaacaattttatataaataatgaaacaattcttttaaatgttgcatctctataaaatatttattaagtgagttgaaacattttttttcatgcgatgaaacaattttatataaatagtgaaacaatggttgactatatatataatttcatcaatgtgatatattattctaacgatttaattaagacaaatataatattctaatttgatcgtgcatcatatatgtatttttaaaagaaaatattgtgtaaagatatgtaatgaataagtacgtatatataagaaaatggggagagaaaaaaaaatagcaatgatggtcaaacaacactgcatgtgagcaagaggcatgctagttgctatgtggcagtggctacttgccagctagcagcgcatgcaacacaacagcagggcgtttttttgacaaattggtccttgcagaaaacttatttcgaaactagtccctaccaaaaactatatccagaaataggccgtcggatcagcgccaaagcggttggtgctgaggttgttcttatctgcgccaacgggactggcgctgacatcgcgccagcgtggcgggcgaggcgcgatgtggcagggcctcagcgccaatgcacttggcgctgacaccttgcacaccctaaatagaccgatgtgcggcaatgaattaacggtgtcgctcgtggtgcaacggtaagtttctttcttgctatatctgaggactagggttcgaatcccaggtcagccatttttgtttttttttaaaatcatcaatctacgtgcgtatatattaatgatgatctccattttcgtttttgtcttcaaatcttcaatgtacttttttttgtttaaattaatttttattaaaaagaaatatcacatttagtacaaatttaaaaagtagaagaatggattaaaaaaagtttagagacaacttttaaaagaaatatcacttttttataaaaaagaaattagaagaatggatttaaaaaaacttgagtttttttttaaaaaataaacaacaagttgagaactaagggtaagttttattctaaaatgtcacgtgtttttttaaaattaaaacaacacttgagcttgtaaaagaaatatcacttttttaaaaaatatttaaaaggaataacacatttagtacatatttaaaaataaaagaatggacttaaaaatacctgagctttgaaaaagttaaaaccgcaagttgagaactaagtaaaaaaaaagtttagtaaaaacataaaggagagggttcgaaccctggtcactgtaacgccacctttcaaatacctaccactgagctaagccaaacctaattgttgcttttgcttttgcttttatttagccagtataaaggccagcgccgctgtagaacatatattctgatatatatatatatatatatatatatatatatatatatatatatatttaaaaaacagagagcatcattaatcatttatatgtactaatgtacgcacgtagattgaagatttgaagaaaaaaaaaagaacgaacaaggctgccgtgatagggagtcgaaccatggtgctagggtacacaagcaaatggtcataccattgcaccacaagtgcattgcttattaatggccgcgcatccttttaattagcctgtacaaggggtcagcgccaaatacattggcgctgaggccctgccacgtcgcgtctcgcccgccacgctggcgcgatgtcagcgccagtcccattggcgctgatatgaacaacctctagatatagtttttggtatggactagtttcgaaataagttttctataaggaccaatttgtcaaaaaaacggcaacagcaggggtagaggggcatgcggagcatcgtctgatatttcgcaaattttcggacgtccgacgtatatataagacatgttgatgccgaatcgctctgattagcccaattgcaccagtgtgggctgtgaactattattgtaacggtttaaacatcttatatgtttatatattgtaaactagcaaggtgtcccgcgtaaattgcgcggatagtatcattatattttctctcatataatagcatatacgttttgtcattatattattaaaatatattacaatgacaacataattttaaattttgcaataactttacgaaactactgatgtgtaatatttatattgtattttatatacgtgttagttattaattatttttaatatcaaattttagttatttgtaaatcatatatattcctttatggactttagacttgtcttttaatatttttttttaattttgaatttttattatttctaattgtatttctacgtggactctaaactcatctttcaatattctttaatttttaattttaatttcagttacttctaaattgtattcctatcttaactttaaactcttcttcccatgttttttttaatttcgaattttagttatttgtaaattatatttttatacggactctaaacactacttttcattttattatgtttattctgaattttagttagttttaaattcctatatggactctatactctacttctaatatttcttattttttaattccgaatttctattttttttcttaattgtatttctatatggactctatactctacttctaatattccttatttttaatatcgaatttccattatttcctaattgtatttctatatgaactctatattctacttctaatattccttatttttaattccgaatttcagttatttcctaattgtatttctatatggactctagtctgctcttctaatattctttattttttaattccgaatttcagctatttataaatctttttcttttctccaattaatgtgagaattttaggtcatgagagcgaacgtggaggctcctttttattccgaattttagttagttttaaattcttatatggaccctatactctacttctaatattccttattttttaattctgaatttcagctatttctaaattgtatttctgtatggactctgctttttttctttttctccgattaatgtgagaatttctcggtcataagagcgaacgtggaggctctttttattccgaactttagttagttttaaattcctatatggactctatactctacttctaatattccttattttttaattccgaatttctattttttttcttaattgtatttctgcatgaactctatgctctacttctaatattccttatttttaattctgaatttctattatttcctaattgtatttctatatggactctatactctacttttaatattccttatttttaattccgaatttcagttatttcctaattgtatttttatatagactctagtctcctcttctaatattctttattttttaattccgaatttcaactatttctaaattgtatttctatatggactctagtctcctcttctaatattttttattttttaattccgaatttcagctatttctaaattgtatttttatatggactctactttttttatttttctccgattaatgtgagaatttctaggctataagagcgaacgtggaggctcctttttctattcctttaatctatatctatctatatctatataactaattaaaaaataagtaaggcttccggttaatcttttcgtccgtcattaag

SEQ ID NO: 20151 - DNA, 16698 bp, Oryza sativa
ataaaggagagaagaaaaataaaaagagaaaaccttgtttgtggagcagtccatccaaagcagcccggattggattagtgacgaggcagcccatccaaagcagctgcagaccggcccagatagcagccgcagcccaccagcgagcccacagagcggaggagaagcagcccaccagcccagcacagtactgcgcaacactgtagcaaccgaacacgaataaagtaaagaagagatcttattacttaaaacatgtagtcaccaataaaatgaattatttaccgacaaaataaattcttttttaaaaataaaaataatcacatgtgtctttcttttttttaaaaaaaaagtaatcaccaacaaattgaatcgtgtttacatttggattttttttccctcatcaattgctcattcgccacaggacacctaatcacatcactttttttcattcatcgtataatttcttctattatttagagtgaaagttattctgcgatataccacatttttttctttccttctgattatttaagtgagtggttatgcaattggagtgcagtgaggttaatctgatagctagcaaaaaatatatcttatattatggttactctttacaatatgaaaaaaagtgcttatcaatatcgagtaaaaaaaataacaaagtactgcaattgactcataataatacatgacaaaaaagtaaatatttttttgtggtttcaaagtttagtatccatgtcagtggatttagagcaacaaataattatatcatgttagcgtcttatttgcactagaaagattcgattcgactataaagacctcaatgaacctggtgtttatgctcccacacactaattactatttttttcttcccccagtacaacgcatgggcattttgctagtaatataatagatagattgcatctatatcgtaagtttatgcacggcaagcaccagtgtggaaattctcggatttgtaatgccgttttttttccggctgaaaccaaatagtgtcgacatccaacaacacacacatccagatgaaacaaagattaatgttctagcttggaatatatatatatatatatatatatatatatatatatatatatatatatatatatatatatatatattactttggtgtgggtccttccaaaaagactaaaaaaacctatattctaaataagcataaaacagatataagttaactcgggaagtagaaacaaagcaaactactccctccgttccacaatataagaagttttagagttgaacacggttattaagaaaataagtagaagtgaatagtggagtccgttccataatataagaagttttaaagttgaacacggttattaagaaaataagtagaagtgaatagtggagtccgttccataatataagaagttttagagttgaacacggttattaagaaagtaggtagaagtgaatagtggagaattgtgattggttgggaagagaatattggtgaagaagttgttatattttgggataaatcctaagggctaaaagttgttatattttgggacggagggagtattatattattatgaaatttacattaccacacaaccatcaatcccgaccaccacagcattcctagttatttaaaaccatcactaaaaataatattggtatcacttttggtttttaaagtgaactggtactgaaagtctgaaactggtcgagcatgttggagtttaattcaatttaatcactgaagaagggaaaatatataagaaaagggagagaatctaataggtgtggctcattgatttttttaataaaaaaataatgaccagattgtgacgcgaatgccacgtagaaccaaaaccacttcagattaagtggggggatcgttatttgtcaagtttgaatagttaaatctgaaaatttggagacaaacatttagaataataaaacctttttcaaattgcatcacgctggtatttattggattttccctttctgtgccagtgcaaaaaaataaaataaataaatccagaggataattaaaaaacatatttaaattctaaattaaaatatgaaattcatacaacatttattaaaaacatgattacgaattaatttaaatcaataaattatattaaaaaaaggaaataaatattatttattttctaaaaccttaacatgaactaaaatatttaagaaactaattttcaaacttagaattaaaagtctattagcctaacccaactcacctaatccaaaccctaaaattcataagggctattttgaatagcaggattgaaaaaaaaaaaggaataggaaaaatgcagaattttgataggaatgcaagttcaaaatagaggattgcaaaacacacaaaaaaaacacagaaataatcttttgattagaccgcaggaaaaacaaaagaattatatgagagagatagactcaaagaaaaatttccaagaggttagagcacttgttaaatttcctttaaaatctcgataggattgtccatttaatagaaatttcaaagaatagcatatgattcaatcttttgtttcaaacactttcataggaaaattttcctgtagaattgaaatccttcgagacctatttaaagtctaatttggcttcttattcttctcaattcctttcattttctctcccaccaggccaaccaaaccaggctggcctgaccttcctacctccagttggcaagcccaagaagacagaccgcccctaaagcccatgccatgccctttctccctttccaccttgggcctttaacgatggggagttggggacctaagctagcaggacaacttcgaccttgagttctaacacatttcctcgggacgcttcagcgtctatggccgagggaggcgacagtggcctactagacggtttcgaggaagatggatggtggcggtgcaaggtatagtgaaaaccctaaccgatcctaacatctttatcctgcttccatggtagacaaatctcatggaaaaaatttgaaatacagacaaggaagaggaatggagccctcaccacggtgaagaaccaacaaggatcgagcgggaggtggattgatggccgctactataaagaaattatagatatttgcacatttatatagccaccttttctcttcttgccatatatatctcctctatttgggcatatgttataactggtgtatattggctatatatatatcagttccccctctctcacattgagtacgtgacatctcgtaattctctatctagatttaaatccagaagtggttttcttttaacggagggagcacatgatatcggagtctgcatttctcatgtctttccatgccctagcagcgccatactggtcatgcaccctctctttcaggcttggctagtttgcgcgcatatcctagctacgcaagttgcacagccacgcgcgccttacgccgatgagcatattaacactaatgacaatagttagtattattatttttaaaaaacaatacataaataatttagttaaaagtttttaaggaatagtttgaagttttaaatttgtggtagaaagattttaaaaatctagtcgaaagtttttgaaattggggtttaaagttttgaacattgagtttaaagttttgaaatttgatatgaaagttttaaaatttgatttgaaagttttaaattttgagttaaaatttatttttttttaaaaaattcagtagaatatttaaaatttaagttaatagtttcaaaatctagatgaaggttttaaattttgggcagaaagtttaaagttcaggttaaaagttttaaatctctatcaaaagtttacacaattttgacatactttgaaaataaattaaaaaataattcaaaagcataaaatcactaaacacttactatatatggttgatccaagccatcatgggtttcatccctgtgccatcatgatcatcggcttcatcctatgccatcttgggctttatgcgatggctcggtagaaaaccgtgtcgtgtgaggtagcctacccacgcatgtctgcaccaaatagagttttcactctcttccttgtcatgcaaactccatcgtgccacgcccatcctatccgtgacgtcctatttcgaggaccgctgccctaacgccgcacctccgccacgctcatcctccagcgccgcattctcgccgtgccgtagcatcacgccatgttgatcgagtccaccccagtccttcgcgattgcatcgtccatgtcggctaagatggccaactgatccctccttccaccaccggcagatccatcagagctgtcttcgtcaacccctatgctaccgtcgttgtcaagtcacacgtccttttttttttggaacgactcgtacgagaagtgcgaagttctattgatagagcagaaaaaaattataagattacaaccctgaagggtcgtaattatcgtaattaaccaggaaaaagaaaagtcacatgtcctaatcacaccataaagcttaagcacccaaacttcaacaaatggaaggcttttatctcaattaatgtgcggcaagtttggcctctcctcaactacggccctgtttggagaactagccaagagttattttgagagctattttttagcacaagaaaataactctccaataaaatagctctaagttgtttggatcgaagggctattttgagagctatctggcttttaatgtaccttctcatggagagagatagagagaaaagccactttttcagtgggccccacctaaaatagccccaattagcaccccttgggtgggatagttttttgggtgggctatttccaaatagctcacccttttagatctttttgagttatttaggctatttgagggagggctaaaaaatatcccttagatccaaacagggcctacattgccatcaccgcccccgcacgccaagacgactcagcctaggaacaagccagctgcctactgcaagaaatcggtgagacggaggtgcgagaaaatagacaatatcaaaggttaccgaatatggaggggcagcaagaaagtgataacgaacgagtcagtaaattgaggcccactggaatgaacagtgcatattattcagcactgaaaaagattgtgcgacttgtgctccggaccaaccagttattgttcgaggcacacatgacttgtcccttaaagatgtggactgtactgaaaaagagacgtattacctactgctgagcaagtttaatagtatagcctactaccggctttaatttatttatagccaatttaatagccgcttactatactattaatatatggtcccacctatcatacacattgcgtcttatagttcgtgttgaagctggctacagatctgtagcccgctgtttttctcttatcgtttatctcattaaaatatgtttatagctggctaatagtatgctattgtacctgctctaatgagtgtgtgttagcggccagctcagccctcgacctgcctgcacgttcgcggttaggtgggcttttctgtcatgttagcagcgacttgtttggttgggttgggtgcaaagatgaaagatgaaagagctggaagatggaaccagacctcgatcaagctacagcggcggttatacagtaacagccacatgactaaatatttaatatttttagaaacacagtataaatataaatgtacacaacacgcacacaattatctctataaacgtaaatacacacacatatctctatgagtatctttgaaagagtagaattaggatgtgtcatattttaagattggcaaatattgatgaagtatccatgcacatctcgatatcgatatcgataggtacgttgcctagcaccaacaaaataattagccgtaaaaatgagcacgtgtcaattttgggacttaaacttaggggagtaagttctgtcacttttaaaatagtatagagacatttgaataatatagacataactcgtaccataagtttttttttcacttagtggatttatataattaactattgttaaattgcagtttggatcactttattaccaagtttaactttagcccaccctttgttccatccttttttactttggactagttaattttatcattatatagtaatttggaccatcccaaaccatttcttaaccacatgaacgaccttgagtacattatctccaacacaccatgacccctctcttgtgcgcaagccatatcttttgttggagggatgtggttaaatatggcaatagaagagaattatggtggttaaagtaaaaaaatgtaaatttaactggtctcgagtgaaaatattagttaattaaggtgatctaaaataaaacttttgaaacaaaaggtggcttaaatttcaattgagaatccatagtggtatatatttgctaattaacattaacaaacggcatcatccttctccactattttcctcctcctgatgtccttgtcatttaattaatttcaacatggcagatctccgtcgtgatggtaacatcagcatattttatatcatccatgctctaatatatttgaaaggtacatatattctcattaatatataggcatatatctagtagggaaaaaagaaacatgcacctagtcacctagactcctagagtatccgaataaatcctacctacaatactcacaagcttcacgccctagtatgttataacctgccactaaaagagaaggaaactatgcagatagtacaggtacgtactacctcattcgttccaaaaatatcaggattttatctatataattatatgaataaaatcccttatattttaacatgtaaatactagaaaacttattgaaacagtactgtcagtaaaaatgagggggatcaagtgaccagtcgaggaagcaaagctgagttttccacaacgcaattaatagcaaagagaccgacgatctgaagatatgatagcagagaatgactttaatttcctggaccatttgtccaccaaccgctgccaacggttttgtcgacaaataaccgagcagtcattaataaaaccagtgaaattcatataaaatttaccaaaaatttgaattcagttcatcttgtgcttaccaaaattttgaaactcagctagtttatctgcagccccatcgtttcacttatacttatcgttcgacttataaacaaccaaaatgagataatctatccaatgtcatctcattttaacaatttgacattaatattgtctcttaatataatataccagcgagtttatcgattgttctaactttttctttcaaaattacccaaaatatctcaaagacatataaggttaacaatctatttattacaataaaaatttcaaaaaaaaatatgatttttatatagcctccttatacaacatggaaagtagtttgtatataactttcaagataatttttggtattttatttttttaagaaagttattttttgtttggtatataatagaaaaaatgtgttgtctaggtttttaaagatttgcattgaaaacaacaacacatacagcatatagcagataaattgtattatgaaaaaaatagaaaagcaaaaatactgaaacttatatattgtgtaaagaggctaaaaatttcatatttttctgaaagtttttgatagaataaatcaattgttaacttgtatgtttataagggtgttctaggtatttttaaaaaagaaacaagcatagtggcatattatagaataattagtaaactcgctggtttattatagaagggacaattaatgtcaatagtaaattattgaactaggacaaatttagtggtacatagtaaattttctccaaaataatttttgggtaaaacttccatatacgtgtccttagagattcaaaagcaaatggtgtgaaataaactatgataagaaaaaccataaaatcaaatctaaattaagtgttgaaatttaaattttggcttataaatatacgcataagcgaaacaatggagtggctagtgttttctaaatgcagatcgagtaataaccggggtaatgcattttgaagccttgtaaaaatgttctgtagcaacattaatatcctgtttgattttagactattcagcggattattgcattggacaatctaggtgatcacatgcataaattaaatattttcagaaataaacttaacgaatatgttaaaacaatgatctaagtaatgcaatagaagaatttgttttagaaaagtatattttttgaagtgtggagcaaataatttgtttcagcaatctactagctagtacataagttggacaaaaaagggtctaaaccctccacaacttggtttaagtatcacataaaaattaaagaggaaaaaaaaatccaaataccccctacaagtcactagttttttcaatgtcctccctacaaattaattccatgcacaccatgctagagatccacagtatgcgaggaatcgctaagcgcgatgagaaatcaataaaagatagatataggtgagaagttggaagagaaaatggacttgtgagcaatgttttgcatgaaactaacttgcaggtgggagattagaaagatcactaatttgtaggggttattcatattttctcaaaaaaataattatttatttcatgcaaactgagcatacctcaattgatttagtttcttgtggtagatcctacctgcttggattccggtcctactcttggtattggtgttcgtatttaacgctaattatttttttagtggtatgtggcgtaccaactagggacttgtggactttggtgactatgttaatctaaagatagtagatgatgcaccgcgcttcgcggtggaatacaagagtgaatataagttaaatgttgtagaaataattgaccaatttgggctgaaatattgtaaaaaaaatgatgtaaggaatatattacaacacatgcttatatgtttagctttagaatataataaattgtatatgtaatggctatgcttacatattgagttttatagatacttggtgggttgatatgtcatgcttgaatgttatgctttaggatgtactatcgataactatgtttgcatgcatgttgagttttaaatgcttaatatgctttgtaactatatagaaagagtagatattgatccaatatatcaggaggggcgagtttatatgggtgtgtacttacatgagtgtctacgttatgaatacgtactttgtgataaaactattattgctattttgcttttgtaatacactacaactttggtactgctattaattgtctgtgttaattagtatctacattaaatagagataatttagaaaacaatatgacatgtatacatatgaaagataattatatgatatccaatatcatctatctctcctttttctcgtaactaagttatcccaagctgtctaaagaaacgataactcatttttctctctcgctctccactctcatcgacgtcaaaaaaaagtattaacttacttatagtgtcccactaattgctgttgtatatatcctaatccaccaaactgtaggagttgaatcatttttttaatgtgagttaggttggttatgcacaaatatgactagatgtgtgtattgtaacaaccaaatcttcatgggctgtactctaactcgccacaggtacaatttatcattatattttaaaaagcagatatcaatcatacccgttaattaaagattacacttatatttaaaaaagaaaagtcaattttactccctttaactctttcatccactacactggataatgtcacctgtgacgggcccaaaccctcacctttgacgggtttgggcttggtcagtgatcagtggtcactggcaagtccaatcacctttgatgggtgaccggcccgtcagaggcacactcacctctgacgggtccgtattttccggcctgtcaaaggtgaggatctccacaagccaatgtgtagttgcaacccatcaaaggtagacacctgagactcacctccaacgagttcaagatatgaacctgtcggtgaaatgggcctgggggtacgcacagtagagggaagtgtccttcccgtctagtcgcgcggccacgcggcctcgcgtcctcctgccccttggatagcgctaaggtggccatgggggcctcggggtgccacgtcatacccctcgggctttcggggcgtgctaccccgaggccctcgcacggccaccacgtggcgaggagagcgggcggtgcgaaggacgcctcttaggatctttaatgcgtggcgccccaaccgtccctcaccgcattttaacgcggtgtgggtggatgtacggcgccgcccgattgacccatgtcaatcgggagtgactggtctgtgaccggtcacaggtgattgggcgggcggcagcgcccccacgtcccgccctgtgtcaggcggaatgggggcaggtacgccccgtcccgtcagtatgctgccaggggtgccctccggacgtggtgagccaccaaagtctccatgcatttaaagggggaatgacagggatgtcccccgtgtcaggcgggggacggcgctgggccccacccaaggacgcacagccaccttgcttccggttgaaggcacgaatggcggtctaatcgaggcagggtgggttcctctcccctggaggagtaggtatggacggtgcatgtggtatccccttgaactataaaaggaggacctcgcccaccgaaaaaagtgacgactctcagatagttttgagttcgagaggaagaacggctagggtcccctccagagctcaagacatcctgtaaaagttgatcataatcccatgcacaggagtagggtattacgctcgatagcggcccgaacctgtataatcctttgtcttccacacagccccgagagcgatttagtagttaaacgccaagccgaagtaggcccttgatcatcgcgctgtatcccccggtcgaactcacaaaggggggggggggtctcacgaccacccgctagagagggttgctcctcgacagaacccatcactggaatggaaagtcatcttaaaaaaatggtgcccagttgcaaccatagaaaattggtaatagaagccgaagaactaataattaaccccaaacatttcaaactaattcctttcaaaagatggcaagaagccggagaacttacaagttttacaataggaaccgaaaaacaaactacaaaactaaaaactactgggaaactgcatttcagggaaattgttaagattctaattttctagctacatcacaacgaaaaaatctctagtatcttcaagaaaaacaagacaaaagttcacaggtcttcttctaacatcaattaatctccagcggcaacacatcatggggcttcaacaagaccacacccgaatcaaaaacttggaatcgatgacttgcaagatctgaaaccaaatcgtaagcacataaacacattaatcagtacttgggaatggtggaggaagctatggcggtggccgcgcgaggatgcaggaggaggtgactagctctcggaggagggcgcttggggacggaagaggagaaggctgtccagtgccggatctggcgtcccccgacctctaggaggctggatccagcgtcccccgacctcagtggtggcggtggcggtcggtgcttgaaacggtgaggacgacggccggtgctcgcgcgtggagttggaggccgccgccggatccggtcaaccccgacctctaggaggcgaccgcatctgcacgccgtcaagccctcctcaccgccgccatgcaccgcgcactgagccacgcaccagatcgagaaaataagagaagggggaggagggaagaaagaagggggaggaggatggggtaccgccgaaccaccactgccgcctctcccgagggccgtcgggtcctccgccgccgcctctcccgagggccgcccggtccccttttgtttctgtgagtgtggataagggagagagagaggtccccttttgtttcttggataagggagagatactatatataaaaaatttgaatttaaattcaaatttgaatcgggtatgtaaacttttgacttataaactttgggtctatagtttttaggtgtataaactttagatgtatagaagtactatatatagaaaatatttgaattcaaattcaaatttgaatcgggtacgtaaacttttgtcttataaactttggatctataaactttaggtgtataaactttaggtgtataaactttagatgtatagaaatactatatatagaaaatatttgaattcaaattcaaatttgattcagatataattcaaattcaaatttgaaacgggtatataaactttaggtctataaactttaggtgtataaactttagatgtatagaaatactatatataaaaaattatttgaattcaaattcaaatttgaatcggatatataaacttttgacttataaacttttggtctctaaactttagatgtgtaaacttgaggtgtataaactttaggtttataaatttactaaaataggaaagtaatgcggtgccaaaaaaggaaaccgggtggaggggtggagggagggaggggggaggggatcgatcgctgccccatccccagggcgatcgatcgccgaacaacatttccgcccgtccatcactctctcccctctcagtctccctccgtcgctctccctgtctcctctccctctctcctcgatggtgccaatgctcctccccaccgcttcacaatcacctggagattaggggttgcagtggtagcccctctctagtgggcaggccactggatctggtcgtctggaggttagggtcaccggatcacatcccctcgttatttgcatgtcatctaaatagttatgaaaaaaaattgagaagattattaatatgtgatatatcattcccacaaccatacaagttgaaattcaacttctataagtgttggtatttcttaacgacattactagaaatataattcacagcaatggcgcagaaatactcatggtatattatggctacagagttcatccgcgagcgcacggatataccattttagcatttcacccgagagtattccaagggtatcgtatttatttaatcccgtgggaagatcatagtagagagaacctgactagtaatttagatgttacttgtaataatcatagtttaagcaggagttaacataattcaagggtagaatgacacacaagcatggaactactcattctcatactaaattacctaagctaagttgaaagaaaatagaaagataatctattcctatacttctagtatatatagtatacatacattctagttatctgacatactagctaataccctctatccgatgctctcctggtacttcaagaagccatccctgactgccgagttccttacgacagcccgtcatgaccatacaaccggggctaaatacggaggagtagcctccctaggaaattaacttagaactatatacactcacggaggaatacccgtactgagctgtcaccatcagcggccgacctctcatccgcagcatataaccccaaataatgatacaccgtaatctagacactacgcctaaactaccagatactactctaatatcattgtcatgacatagagtaattgcataagcaaacactatacccgtaccaatgcatctcccagataagctagcagtataatcagtataacacgaacataatgtaaagttggcatttatatatttagaaagtatttcaataccataaatgtataaagaagagtattctaataaaagtacaaagcttacgaaagagaagagaagagctactagagccatacccgaactcttccgaaggcttccggactccgatttctactctattcctactccactagcttaagactactaaactaacttgagagaatatgagagagctcttgcttgaggtgtgtgagtgaagtgaggatgagagctccttttatatgcaggtaatgacggttatgatggttggaaatgtcagtaatatcctccaatcgtcattggggatcaatcccagccgtccatcaagaccctgcatccattggcgccacgggaggttcggccaaaccaggggccggcccaacctggcctaaacttggcatgtggcctcctcctttgctcttatacgtagacttatgaattttggcccagttcatcatgtcaattatgagttcttggcccattcatgtataattttgattctcgacatcgtccgattgatctatcgtctgatttgatgtcgatgctcctccactttatgattattctctgcaaaaagttagtgaaccaaatactagtgaaatattattattctaacatggatatgcattgcaagcataattagttctctattttggtaatattgacggtcgaaactgatcgctaacgaccgtcaagaataagttaaaaaaaaataaaactaaactatagctagtcgacgtatatttacaattaaatttgtttttttcgttgtaacattttagaagttaaatttgaccatacgtattggtggaatgacctatcacatagtaatttgatttttttttcataatcatttaaatacatgtaaataaagagaagatgtcctctccataatagttcccatcatattcggcagccacgtgcattaaagtgactgtacaattgcagcatgcaaccactgtacgtacactcttaaattttaacctgtacacttgtaattttcaacggagaatgctagttgtcaggcctccgatgagaggggagaaaaatcagacgctgcatggtctgccatttgtatgcaaagaatctttccctacatgcttccatctctcatttcttcaaaagattttttctcataaactatttatctaatgtacgatctgattgcatcactaaattgttacaattaaatctttacaacaagaccacacatgattatattttaataaaaaaatattttaattttttattgatttttttaaatgttgcatatggtctcttttgatgtttcaaccagtagttttacaatgtttcagctagtgtactcataatgtttcactatgtacggatcaaatgttgcagtgaattttgatattatagaacacgctgttacaaaaaaaacccacgtattttggaaacccctattaagggaatttgttttatttttttgttccaccaaaaagtttcacctaatgtactcacaatgtttcactatttatatatctaatgttgcagtgatttgagatactctattgcaacaaaaaacccacatattttggaaaccctcagaattagttttattttttgttccatcgaaaaatgtttcgtttagtatacccgcaatgtttcactatgtatggatcaaatgttgcagtgaactgaaacattctttcgctatttgcccgtaatctagacactacgcctaaactactagatactactctaatatcattgtcatgacatagagtaattgcataagcaaacactatatccgtaccaatgcatctcccaaataagctagcagtataatcagtataacacgaacataatgtaaagttggcatttatatacttagaaagtatttcaataccataaatgtataaagaagagtattctaataaaagtacaaagcttacgaaagagaagagaagagctactagagccatacccacacgtctctgctgatcgtcaatctccaacagggcctcctcgtagaagtcgtccacagcctcagcccatcgtgacagtcgggtcattatcgggctgtagcagcaaggtgtgtcctgaactgtgcagacggagttgccctcctctcgaaacgggtggtgagcaaactcagtactcgccaactcagctcggtggatagagctaagtcggaggaaggcctcccgggcagcatcctgcatcgcgatctccggcaagtcgcgacggtggcgtgtcgggaagctgtagtctaactctgaaggaactctggtgtggacctcgacccgagcctcccaaacagatccacactgtctcactcggtagatcggaaatctggggtatcgcagacgccttatcagccggtgtagctcaatgacgtatccctctgagcggggtacgcccatctcccaggtggcgggtgaatccggatctgccatctaattttaagaaaaacccaaagtcagttgagagtaaaacttgttttgtaaagaaaatagttaagagtaagatgaaaatcgtaccgagttttgtaaacatagcatttttatttttgaaagtattactaaatgggaatttctcccttggccaacttagaaaaggggtggggtgccttttggtcttttcctacagtcgtatggctctgataccagctctgtagacccccgtttttataacaggaatcaatcgtgtaaaccgtaccatttccctggatcaagtagtctggtatacacgaactcatagctgaaatatcaagtgcacatacacgagagtctagtacgaattattacatcataagcccacaggcacagtcttaaatcatcggaccgagcggtccggaatacattccaaaaacagaagtaggtaaggcagcggagttaaggcagcggcacgccattgccacaggcaacgaccgtaactaagacctactgagcgccatcgtcctcatcaccctcctggtaataggcatagggatcctccg

SEQ ID NO: 20152 - DNA, 579 bp, Oryza sativa
caaaaacttggtggtacttaatgttgcgaacaatcaaattggaggctcttttccatgttggatgcatcttcttcctaaactccaagtccttgtcctgaagtccaataagttctacgggccgttggggcctactcttgctaaagatgatgaatgtgaactacagtatctccgaattcttgatctagcttcaaacaacttctcgggagtattgccttatgaatggtttaggaaactaaaatccatgatgtcagtctccattaacgaaacattggtcatgaaagatggagatatgtacagcacatttaaccatataacatatctttttactgctagatttacatataaaggactggacatgatgtttcctaagatcttaaagacctttgtactaattgatgtctcaaataatagattccatggcagcattcctgaaactattgccacactaagcatgctcaatggtctcaacatgtcacataatgctcttacaggaccaattcccaaccagcttgctagtctgcatcaacttgagtctttggacctctcatcaaataagctttctggggagatccctcaaaa

SEQ ID NO: 20153 - DNA, 609 bp, Oryza sativa
gaatgggattagtggaagcgtgggcgcgagaaaggagggggcgaaatagtgggcgcgagaagcgaggagccgggcacagcgctggcaagagtataaaggcactgaggaagggatctgtttccttcctttcgccattattccccttgtcttcgccgcttgcgccctaactccttctttcctgtgccctaccttcgccacacgcgctcgctcttaatcttctcttcctccggcgccatggcacggggctccgctctgctcgatggtagcgtgctgccgccttcccgcattgtgagcgagaggcaggctgggctggcgcgccgtttcatgccgggatctgccaccggccgggagatagtcacgctgggcgagggacgcccggcgccagactacccggggcggtccgtcttctttctcccctttgcaatggcagggctggttccgccattttcttctttcttcatggatgttctggagttctacgatctccagatggcgcacctcacccccaatgcggtgatgactttggccatcttcgcgcatctgtgcgagatgttcattggggtgcgcccatctcttcggctgttccggtggttcttcaccgtacagtcg

SEQ ID NO: 20154 - DNA, 660 bp, Oryza sativa
cagctcgcggaccgagtggctcgcaaggaggaggcctggacttggaacccctccggttccggtgtggcagcttcggccgcccttggatccgccgctcagacagggcggcgtgacaggaggaggaagaagaggtcagtccattccgatgacgagggtcatgtcctcgccgtcgagggcgcttcgcgggccacccaaaaggggaggcctgcgagcgacaaaaagaaaaaggccggcgctcccagcagggagcgcccagccggcaagtggtgcaccgtccacaacacctccctccacgacctcgtggactgccgtgcggtcaaaagtttggctgagcgaacgaggaagtgggaggaggagaggaggcaggagcgccgagagggcaagtccccggcggttccttccggcaatcggcgaagtgaggccaagcagaaggcccccgccgaggacatcgatgacggcgatgatggcctaggtttccaagagcctggggccaccattgccactgtcgatgggggagcgtgtgctcacgtttctcgccggagcctcaaggccatgaagcgagagcttctggccgcggcccctactcatgaggcgacgcgccgggcgcgatggtcggaggttgccctcaccttcgaccagaccgaccagggctgcaggaat

SEQ ID NO: 20155 - DNA, 972 bp, Oryza sativa
aaagaaattttgtggtttacattaaattgacaagtacataaggcaatcaacaggcatagtcactagtaaaacaaaataagtatatgttacaaccagcccatgtaatcattggcagccacgaataactatccaaatgcttgtacaaaagttcctcaccatacctccaatcgaagacccaacggtgttttggatggaccaagctcttgttgagcaccatctttacctgtgggcttcacctctgtcttaacttcaaccctcacaggattcctcaaccctgctttcgccagctccttaacagcctccgtctgagttgccgaaaaaagccctgttctcctcagctttggcaacttcgaaataatcgacgtaatctgcttctggaatcctaaatccaacagcctatcagcttcatccaggatcaaaatctgcttcgaaaacacatacacaacaacaatttatgtcagatttgcatttcaagcacaaaagaacaacacatgaattttcaattgcttccaaaaccacctcaagattcttgtagttcagagtgtctaagcgctccattacgtcgaacagcttccccggggtgccgaccagtatgtttgcaccctcttcttccagtttctttagctccgccttgatgtcgaacccaccaaccagtagcatggatgagacgcccttcagcgtcgcgaagaagggctgagccacattgtatatctgcgaagacagctctctcgtcggggagatgatgattccaagaaccttgcaaaattccatacatttttctgatcagaagtgaacaagagatgcaatgcaatccagcaactttgcaagcaacgcatgaacagaacaagagaggatggggtggagccgtgagcactgagcagacctcgtggggcttgggaggcgaggggcggcggctgaggatctcgacgacggggacgacgaaggcgagcgtcttgccggagccggtggcgg

SEQ ID NO: 20156 - DNA, 664 bp, Oryza sativa
ctcacggagccaagttttcagaccttcatagcaaaccggagcaatctgagagagctctaccttgatgagatggacctctctagcagcggggcaacttggtcaagcgatgtagcagcttctgctccacagattcagatacttagcttcatgtcatgtggcttgtctggtttcattgatccctccttctcacgactccgttcactgacaatgatcaacgtcagactcaatgtcatcagtggcatggttcctgagttctttgccaacttctctttcttaacaattctggagctatctggcaatgcttttgagggtcagttccccacaaagatcttccaactaaaaaggctgcagtttattgatttatactggaacaataagctttgtgtgcagttgccagaattcctacctggtagtcgtctggaagtgttggatctcatattgaccaaccgttctaacgccataccagcatcagtggtcaatctcaagtatctaaagcatttgggccttacaacagtagaggcttcaatgaattctgatatccttttgatcagagaactccactggctggaagttctccggctctatggaggatcaggacaagggaagctggtgtcgttctcttggataggcagccttaaacatttgacatacctggagcttggca

SEQ ID NO: 20157 - DNA, 12385 bp, Oryza sativa
agcatctccgcgggggcgggggtgcctcctccctaaggtgaggccgccgctcggccggccagatcgcccgggcagccgcaggcagcggcagatcgggcggagggggaaagcgggagggggttgcttcgagcgccttcgagaaggtgggggaagagagaggagagagagagcagtaaatgccgccgtgttgggaatcgggaatggaaaacggaagagaagctgcagctgctggctgctgcgggacggagagggcaggtgtgcgatatatacggcatcgaggtggaggagacctgcccctgtgcagacggagtggggaaaaaaaggaatttatttttgctcttttcttttttttatctactaaaagattgtccagattcgttgtattagactatattagcttttttttatgccaacatatataaacttttttagattggtacggatattatgaaaatatgtgtgaatgttttaagaaaatgagtgattggttaaaaaaaataagtagataaaagagtatagttacgattggttgagagggtaaggtaggtggagaaataactttattttgggacaagataatatactagaaatagctatattttaaaatagaggtagtagggctacgcggcaccaggaaaatattctttttattttgtgttcttgcagctctgattatcttcttaaacctcatttacttaaatgcaatataatatatactccctatgtttcgaatgtttcgaaatgtttgacaccgttgattttttagcacatgtttgaccgttcgtcttattaaaaacgtttgtgagatatgtaaaattatatgcctacataaaaatatatttaacaatgaatcaaatgatagaaaaataattaataattacttaaattttttgaataagacgaacggtcaaacatgtgataaaaagtcaacagcgtcaaacatttcgaaacggagcgagtataaaagatccgaagcaatttacggcaaaataatttagttaccgttagacaaaaacttcgttgagttgtaaacacgactttttaggctcagtcttgtaggagtataaccgttaggtttaatttactattaaactaaggtttttcttgcggaaaatattaaactaatgtttgataatatatatctccatcctaatataagtgcatcctaatataagtgcacctagtaccaatatgatatttcatggtacaacgaacctacacctacacatacagctatccaaattcattgtactataaaatatcacatccagtttcatgtgtatttatattgggaaggaggagccccatcggttggcctaataaaccaaagcaaaagctaaaatttgatttttgaactgaattttaacaagattttaaaatattttcaatgtaattttgctacaaataaaagtgtaaaagttttacctataaattaattttattccctaataagccaaaccgatggggctagtagtatcctcgcatgattctttcagtacattccaatattacaataacatggttgtaacacatgaaaacagtctagatccaaataatgcaatactttcttctatcataaatatttgatatctttgtataaaatttagaaaaaaaaacttcactcattaattttacattatgacaagatgataaaatttattaagtttatgttgctaggatagtactccaaaacattttgtgtgtatgagaattgggaccatatattaacgatgtagtatataattataagtaactattgtataaatgaactattaaattggttatagatgatttggagctagtagttggctatctctaagcactttcaacaaaatggcattatcataatccactatccaccataataccaagcaaaacatcagcacacagaaccaatattttgtgaccaagcttaaagcataagggagagaaaagtccctcgtttttcatgcgcacgcttcctaaattgtaaaaggtatgttttttaatatatatatatatacatacatatataatgttttttaaaatcgtattaatctaccttttaagtttgaaataattaatactcaattaatcatgcgctaatcactcacttaaatttatgtatctttttaatcttcctattttccctcctctcaaacacacccttagtagttaaggcatactctgtagcaaatcatcacaagaacattgctcgacgtaggaggacaacagtaatgtgacataataatataactaaaatataatatattcatttgttgcgtagagatgttattgttattgacccatatacgtgtaacccgccctcttgccctacctgaacctgccaactactcatccacctcagtttcatactactcgcatgctagtactaaggttggtattcaaggaaaagcgtgaatagtaggtcttcaaacgtaagaatgaggtcgtattagagaatatgtaagccagaagtcattggatgatggtaacccatggtggagacgatgggaggtgagcaggggcttggcctccctcataatttgaggtttgcaatgttaatcactattgcttaagtggttttgcgtaaaattactatctctctttgtcctctttagcagaaaaatgaaaatagaatttaggattcttgttgtgtcattggagccgatgaaggacccgatgaagagaactagggatgagcatagatggtgccttcaaaatggtgctgcaataaatgttcataattgaagtcaacagttgggaaatcaagcttctccaaatttccaaatttgtagtacattttttattttgaattccatcctaaaatataagacacgatccattttttcccgtgtctcataatataaggcgtgcatgtatgcatacattaactatcaccttttaggccgcgttcgttacctcccgttcccaacttcgctccctcgtttttcgcacgcacactttttaaactgctaaacgatgcgttttttgtaaaaaaaaattctatacgaaagttgcttaaaaaatcatattaatccatttttcaaaaaattagcaaatacttaattaatcacccgctaatcattgctccgttttccgtgccagggagtgagggttcccaacccttactcccgaacgcagccttagatctataaatttggtttattttaaatcatgtaccatcaagtattccaatcatattgcttgcatatatggatgtgattcaatcgaggaggtgattaatcttttcttggtttttgtgttagaagtggttgagccttatattttgggatgaagggtgtagtacacttcatattgaaaattcataattggttattccatgttccaccaaaactcagctaaccgctggttgaaaatactactccatccattccattttgatcaccttaaaatttttgaggtcttccgaaaacagtcattatctaacaagggtctctttatttatttgtgcagagagtacatgtgcataattgaatgtattgcatgcatccaaccaaaattaatttctattgatgcaatggcatacagtatttaaaacatgagaaatccgcaggacacaaagcgatgaagcaccttaaccgaggaggattaatttaagaatgataaatatttttgggatccatagtcttggtgtcatttgcttatgggatgatcaaactggtatggagggagtattactaaacactagacacttagggtccgtttgatgcataggagttatcaaaaacatattcacatgaacttcgtaggagtcaattcatattatctagatttcaagtgcctgaaatttcccaaaaaaaaatcatatgccttttctaatccatacttatcaactatcactccccagtagtttgaaatctaacatagaaaatgtcgacgtttgatgtcgtgattccggtatttgcataatatggggatcgttggtactaggatatatgcgagactgaggtaaaagagatggggacgaggatttttatataggttcgggcccctgaattgtcaggtaataaccctactcctgttggccgaaaccagtcgttgctcttattcatcataatcacaccagtacaatatttggggtagcctatctatctgttgtcgacttggcggccataaaaccatcccgtagccgacaacagagtagtcttcctcctcgaatctgtatccggcgagatcaaagacagcgctatgtctctcctgatagtatccgtagacaccgtaggggactagccatgcttatctctgaagtcgatatccggcgtcttgtcttggtgtatgttgacttgtatgttgatcttgtgtattgatctattgttccgtctcccctctcctcctagggggccttgtatttatacccataggtgtccccttgtccaagtagaactaaggaaactaatatggatacaatccgagtagttcttgttgtttccatgtagaactctagtcatcctcccttatgcggaactcctcctatatccgaaggttgtttccatataagacaaggtatgtggtgggtcctgccgagatttagtcaactactattaggtatgtgctatccataaccctgacagaaaaaaattacaaaattagatgaaaacaaacttaattataactcacaaacaatacaaagtcacataaaaatcaaacttagacaaaaaaaagaagtaaaactatctataacaacatatttgcttttgaaatgaataaaagttgcacattgcaacttagggttagtagtgtacaattttaggtgactagaaatttataaaatttcaggcacctaaatctgttatggttatggataccatatacctaatagtagttgactaaatctcggcaggatccaccacataccatgtcttatacggaaactgacctcgagggagttccggataaggaaagacaaccagagttctacatgaaaacgacaaggactactcggattgtatccatattagtttccctagttctacttagacaaggcgacacctataggtataaatacaagccccctaggaggacagcgggacacccaccatggggtgatcaacacagacaatcaacgacctcaatcaacacccaacacgttacacgggacaacatacaagcctacatacgccaagacaagacgccggatattgacttcagggataagcacggctattctcttacggtgtctcaggatactgtcaggagagacgaaggcgctatctctgatcttgccgggcacggattcgaggaggaagattaccctgttgtcgactacgagtcagaccttcagaccgccatgtcgacaacagttagataggctaccccacatattgtactggtattattatggtgaataaagagcaacaccggctccggccaacaggatgtagggctattacctgaccgctcagggacccgaacctgtataaaaatcctcgtctccatctcttttaccttagtctggcgtatatcttagcaccaacgatccccatattgtccaaataccgtagtcgagacatcaaacgtcgacaaaatctagcaattttcattcttgaaacaattgtttagttttatgaaatcatactgttatattcctaggacacgcgaaagttagggtttgattgactcattaccgagggcatgttggaaagagttgtgtggctgttgtgcttattcttgcacatgaaactgaacggatcatcactagcacatgattagttaaatatcagctattataaatttttaaaaatgtatttatttgatctttttttaaaaaaacttctatatagaaaatttttatacaaaacatcacaagtagcagttcggaaaatgtgtaaatgaaaatcgagtaagttgtcgtttggagttgttggaaataacagcctaagagtgtgcgaaggcacaagcctctggaatacatatctaaagttggtcataataattctttgtatataagcaattcttctttatcactgggtataaatcaaccgcggctctgataaacaaacgttttgaataatgtctaaatacaaagatgatatgcatatcttggtgagcaccaaacaatgctcgacatcatgagaaccttatcccttggaaaaaagggtgctgtgctatctttttcttattaagtatgggcgtgaagcatcagaaggggtttcattggttaggcggttgagcaccgcaaccttcttggctcttttccacggagagtgagacacatgcaaatggagaaagcgactgagagtcgatcgatccgttaatatgaacactgctctggctctcgatggagtctcctcgatctcctggagccgacaattcaagagccagcccaactgtgatggaggagggaagaatcatctccgccaggtctagccaaacacaccaattaagtgattaacctgacagattagcttgatcggatccagtgtgcagacgcgtgctgcgcctcctcttgcctaggtctagttcttttctttttaacttcaaacttcacatttctcgtattttattaacacgattttcaaactattaaatagtatattttttaaaaaaaatattagattgtttgaaaaaaattaaataaatcattaattgctacttaattaattatatgctaatgagttttatcttttgcgtgtgctgaaaatctttctctaacttgagagactcagcttagaataattagatatcactgctcgatcaatggtttgggttagcagtaaaattatcatggcaaaatccatactgtaggtgagagtgtgagaccatgcatgaaacctccttgcaaatggaaaagaatatagaaaagaaagtagatattcgatgttcatgtacacatagaccagtggttagtaaaacactgccacataggtgtttaacggttcataggaataacacaatgattttcggtatcgatgtaaatcggaagccttgaaatagcttttatacgaggatctcaattaattagaaatgctcaaatacatgcatatttgttagatcctgcgaaatttatctgaagttatcactcgttctaattaattaaggcctccttgaaacctataaatattccatatatgattcatgtgcaaaacaaagttgcattcttacaaaaccttacaaaattaagccctttgattcaaaggaaaatcatagaaattttagagaattttatttttataggattttctatataaaattatttgaatcaaaggaataaaccctatgaatcctaccaaattcatatggaatgtctcattccaatgtaagttttgaaggaaatttaacaagaggtagaacctcatgaaaagttttatttgagtctttatctctcctcaaatttctatgcttttgtgtgtgtctattgttagaaatttggtcataattcggcatattttaatccaaaatattaagataatacatatgacatttgtaatttgagtagatctagtgaaattgctagatgtgtacaacatgagcatgcttaatatagaataagtatcaacatagacaagagaacgcaataatattgcgacctacagttataggaaacgaagaacgaacggtaatagtgaaacgttatacaccgagaatggccatccgctggagtttgagacagtattgcctccgttggtgttgacgggaggctcctcctccttgtcaccagtgttgttgttgtcgccggttgtcgacatgttggtgaagatgatgcagagcagtcgcgcttgaagcgctacccaaaaacatgatcgcccgcctacccgtgcaggttctcaagcggacggagtttcggaggcacctgctcgttccgatcacctgtgtgcacgggatgaacagaaccggggaaacagagagacatcacaggaacataaggagagtatcaccaagaaacaatagcagaaggaagacacaatctttgagagcctctgttttgctttatatatagagagagatctccattaccatacaaataaatctcatttattgtgaaggttaccacaaaataaatctcatttgttgtgaaggttaccacacaatgaatctttcatttgttgtgaaggttacaacaaataaatctctcatttgttctggatgttacaacacaatgaatctcttatttattgtggaggttacaacacaaataatttcatttgttaatggtgactttattctcgtctgttacaaaacggaagagcagcaggcaggctcggctcggtcggccgcctcgtctcgctacgcccacggccgaggccgactcggcacgcgcgcatgcgtgtggcagtccaaccatcacctcaaccggtcaacaagaaatccccaatatcactctatttaagttgaggttcttccacctaaattttcaatgcagtattattgtctctaacattacttgtgggctattaagattttaatttaattaaattgggcctagcccatttattccaacatccattgctcctaatcaaaaggtcattccggtgttttattatgttttacaatcctatattttatacttatattttgtcaaaattctatatttttgttccttcttttttattcctacaattgaaaggggcatagtgtattctaaattcctctggaaaatactcaggacacttggcaagccaatcgagtcacggttgtccaagttaaaaaaaaaaaaagagccatggttggaagctgccgtagaagatcatttggtggcaaggaaagacaactgccgcgaagactacagacaagcctcgccgtgtcagtcaactccaccacactcatgtctccacgtttattattctgcaaacgattttccctccccaatttatattattccactcaaagagtacattagtaatttcgaacgaattggtctggtctagtttgaagactatatagtgtgaaaaatgtgttaccttaagaaaaaagaacttcactctagctaatcgataatacgatttatgtgtcgcgctcaaaaaaaaaaaaaagcccatcaatgccctcatgtacgcattgcatgcatatgctgttggaaatatggttatatatcggtatattttaatccaaaatattaagacaataattatggcatgaacaatgtggggtgatctagtgataaaatcaaacataaacaggagcacgcttaagatagaataagcatcatcatcatacatagaacgcaattgcattgcgactaacagagatatcaaaaaccgaaataacagtagagagttataccctgtgaatgtccctccgctggattgtgaagcagagctgcctccattggtattgtcgatcggtgcacctggtgcggcagctcttgctctggctcccggcgcgccatctccaggtgcagatgcggcagacatggttgatgcagacgtacggtcgacgacgaacagaggacgaggagcagtcatgcggaagcactccccaaaaacctgatcacccgcctacccggtgcagatctcaggcgaaggcgtggttccggaggccctgctcgttccgatctctcgtgcgcgcaagcgatcagaaccggggatgtagacagaagcagcacaggcagcggcggcggcacgcggaggaggaagaaccagcgtttggaaaataaccgagaggatctgatcgggttcccactttccttatgggcgcaggagagagatccgcccgtggaggaagaaccagcgtttggaaaataaccgagaggatatgattaggttccctctttccttatgggcgcaggagagagatccgcccgttaccgcagtaacgacgcgatcaatgggtattgaatcgggttccctctttccttatgggcgtaggagagagatccgcctgttgccgcagtaacgacgcgatcaatgggtattgaatcgccctctttccttatgggcgcaggagagagatccgtccgttgccgcagtaacgacgcgatcaatgggtattgaatcgcctacccgttgtcgcaacgccacgtctcgccctggccggctcggctcagcgtgcgcgcacgcgtgtggctttccgatccccacctcaaccggtcaacagggagcctccaataactccctatttaagttgagatactcctcgtttaattcccaaggtggtaatattattcttaacatttattatgggccttttgagatttaatagaaaaatcaggcctagcccatttattctaacatatgcctccatccacctgttacacaatgcacacttgaaaatattttttttcctacttatatagtttagccgaaaaacatagctatacataaatacaagagaattttctatttggcctccaaagttgatcgattttctcattttccccacgaaattgattgtccctctaatgccttgcattcgtaacttttgtcctccatggctccatcttttattttgtttgttttccatcaagtaggtgggtaaaaatgacagctttgcctcagcttgttttatgcatgtcagtagtttttatttttcttttgggtgggattatactttgttattatggaccaacggttattgaatatttctcacgaacctaaatgttattttgagtaatgaagcgttatgaaaaaccctttgaatttgataaataacttttgagaacgaagggggagccaatttcgtaaggacaataggggaaccgatcaactttggagcacagataaagaattttctcttcgtactacttgagtgaattgcagtttagaccacccttttatcgttgaagtttcactttagattatcccatatattaatcaatatttcttcactttgagctaggtaattttatttttattgcatatcaataatcttgagtacacctgtccctgtaggttgatgaactctatcacctatgcatgtacctttactaaaggagaggctagacatgattagagaagtgagttggagtggtccataatgcaaaagtataaagttacctaccccaaagtactccctctatccgtgaatataagggatttttttttacaagaatcaaggaagtagtaaaataacatgtgatgagacaaaaggtgatggataaaagaataaagtagtataaagttagtaggtgggagaataaattagtataaaagtaaatgatggagaaataaactagtatataagttggtacatagaaaatatagtactgtcttgggtcttaaaaccccttatgttgtaggacaaacttgatggagaaaattccttatattatagggtgaatagccgaagtggtccttcaagtttcatctgaggctcagtttaatccttgatgtttcaatctttccatattagtcctttaagtttttattttagtttaaacttatccttgaaccaacaactctcttgataaataacacttatacccccatcattcacatatataagagaaaaattgtatgcttgatttttttatagataatgtatagtaaattatgtaaaacgaaaataaattatgtactagcaagtgtatacgatagcaattgcttaagtttcatgtgcacatgtagaaataatgggaagtatatctacaatgttatttattcatcttggttttatcctttttatatatagttgtatataaattaagggcaaaagggacattttctaatagaaatattgactaaaaatagccatatggcatgttaagtgggcccaaggatgatgtcaagccaaaacaaatatttagaggagctatgtggacaaaataaaaagtgaaggaccaaattgagccttcgataaaacttggaggactaaattagctattcaccctatattataggatggatggagtagaaagattagtgtacaatatacaagctgaaaatttgataataaaagttgagtcaaaatggaattcactctagatactttgacgaagagtatctcattactgttgtttcaatgtgccaaattggaatgtgatgcatactccctccgtccaaaaaaagacaaaccctggtttccgtgcccaacgtttgatcgtccgtcttatttgaaaaaattatgaaaaaaattaaaaagacaagtcacgcataaaatattaatcatgttttatcatctaacaataataaaaatacgaattataaaaaaaattatataagacagacagttaaagttggacacggagaccaggttttgtctttttgttaagacggagggagtacatgcgtggccaagagttgttaaacccgctgaccacaattccagaagcatatgaaagctgaaattgtccatgcatgccagccgagctaaccatgcatgggttgacagctatcgcgttttatgtacggaaaggtcgtctcaatttaattggcatacggatcatccaacaaacgggagtcgaaatgaaggccccatacaaatattttataccctctcgtatcgaatg

SEQ ID NO: 20158 - DNA, 2954 bp, Oryza sativa
atttcccgtgtaagttgttttgacaggtatgaaatgagcaactttagtaagcctgtcaactactacccaaatagaatcatgtcctgccgacattctgggtagaccggtgataaagttcattcctatttcctcccatttccactctggaatcttcaacggttgcagcagaccggctggcttctgatgctccgccttgactcgctgacacacatcacatagagccacatattccgctatctctcgtcgcatgctggcccaccagaattgttgcttcaggtcttgatacatcttagtgctcccaggatgaatggaatacaaagtttcatgagcttctttcatgataatatccttcaactacttattatcgggcacgcaaattctttctcctagccacacagttccttgctcatcctctatataaccaatggcttttcctcttctcatgttctttttgatttcttgggtatcgggatcattcacttgagcctctctaacttgatcaaaaagagtaggttgagcttctaaagcggcaacaaaacatttgttgactattcccaatttcaacttttccaattcctggcataactcccaaggtagatgtcgaccttctgacatattacagtagcttttcctgctgagagcatctgctacaacatttgctttacctagatgataatgaatttccatatcataatccttgatcaactctaaccatcttcgctgacgcatgatcagatcaggttgagtgaaaatgtacttcaaacttttgtgatccgtatacatctccatacggttaccaaaaagataatgacgccaaatcttcaatgcatgaaccacagctgccaactctaggtcgaccgaaatgaaaaagttcaacaaacgccaaaacatgatttttggacatattgtagtttattgggtgcgttcatgggaaatactcacttcgtgattcgcgcggcgaacttttgtcaattaatgccaatattggcatatattggcccacgtgagtgcgatgtttttgaccggaatgaaaagttcaaaaagaaccaaaatatgattttttttgacatattggagtgtatgggtgcgttcgtggcaaaaactcacttcgtgattcacgtgtctaacttttgtcaattaatgccattattggcacacgagggtacgatattttcaaccgaaatgaaaaagttcaacaaacgtcaaaatatgatttttggacatattagagtctattgggtgcgtttgtggcaaaaactcacttcgtgattcacgcggcgaacttttgttaattaataccattattggcacacgatggtgagatatttttgaccgaaatgaaaaagttcaaaaaacgcaaaaacaggatttttggacatattggagtgtattggatgcctttgtggtaaaaactcacttcgtgattcgcgcggtggtgttttgtcagttaatgccaatattggcatatattggcccatgtgggtgcgatgtttttgtccggaaagaaaaagatcaaaaagcaccaaaatatgatttttggacatattggagtgtattgggtgcgttcgtagcaaaaattcacttcgcgattcgtgcggcgaacttttgtcaattaatgccaatattggcatatattggcccacgtgggtgcgatgtttttgaccggaatgaaaaagttcaaaaagcaccaaaagatgatttttggacatagtagagcatattgggggcgttcgtggcacaaactcacttcatgattcacgcggcgaacttttatcaattaacgccaatattggcatatattggcacagactggtgcgagctttttgaccggaatgaaaaagttcgaaaagcaccataatatgatctttttgacatattggagtgtattgggtgcgttcgtggcaaaaacttacttcgtgattcacacagtgaacttttgtcaattaatgccaatattagcatatattggccgacgtgggtgcgatgtttttgactgaaaaagttcaaaaagcaccaaaacttgatttttggacatattgaggtgtattggatgcgttcgtggcaaaaactcacttcgtgattcgcacggtgaacttttgtcaattaataccaacattggcatatattgcccacatgggtacgatgtttttgaccggaacgaaaatgttcaaaaagcacaaaaatatgatttttggacatattagagtgtattgggtgcgttcgtagcaaaaacccacttcgtgattcgcgctgcgaacttttgtcaattaatgccattattggcacacgagggtgtgatattttcgaccgaaatgacaaagttcaaaaaacgccaaaacatgatttttggacatattggagtgtattgggtgcgttcgtggccaaaactcacttcgtgattctctcggcaaacttttgtcaattaatgccaatattggcatatattggcacagaggggtgcgatgtttttgaccggattgaaaaagttcaaaaagcaccaaaacaagacttttggacatattggagtgtatttggtgcgtttgtagcaaaaactcacttcgcgattcgtgcggtgaacttttgtcaattaatgccaatattggcatatattggcccacgtgggtgcgatgtttttgaacggaatggaaaatttcaataagcaccaaaacatgtttttcggacatagtggagtgtattgggtgcgttcgtagtaaaaactcacttcgtgatacgcgtggcgaactgttgtcaattaatgccattattggcacacgagggtgcgatattttggaccgaaatgaaaaagttcaaaaagcaccataacatgatttttggacatattggagtgtattgggtgcgttcgtagcaaaaactcacttcgcgattcgtgcggcgaacttttgtcaattaatgccaatatggcatatattggcccacgtgggtgcgatgttttt

SEQ ID NO: 20159 - DNA, 4151 bp, Oryza sativa
tcaattaacgccaatattggcatatattggcacagactggtgcgatgtttttgaccggaatgaaaaagttcaacaaacgccaaaacatgattttcggacatattggagtgtattgggtgggttagtggcgaaaactcactttgtgattcgcgcggcgaacttttgtcaattaatgccaatattggcatatattggcccacgtgggtgcgatgtttttgaacggaatgaaaaagttcaaaaagcaccaaaacatgatttttggacgtattggagtttattgggtgcgttcgtggcaaaaacttacttcgtgattcacgcggcaaacttttgtcaattaatgctaatattggcatatattggcccacgtgggtgcgatgtttttgaccgaaaggaaaaagttcaaaaagcaccaaaatatgatttttggacatattggagtgtattgggtgtttgatgaaccctgagctccactcgagacactcaaggctgttgttggcccgatctttcggggagctgtagataactacgatttaggagaaacgttaacgacccgactacaaccgtactagatgttgttgtgttgcgccttagctatcgatacacctctccgtgggttgttgatcttgccggtgcagatcaaccttattcctgcaagcaaatcgaagaaacaagcaagaacaagattaaagcaatctgaattgcagataggaattgaacataaatgataagtttggggttccgtaacgagcaaacccggcgatctaaccgatcacggcattacccggcaaagtagcaaagctaaactttaatctaaacaaaacccgagaaaccctgaaggggtacctaactatttaaggaggtggttggacgacctaggggtccctagggtcgtgctccagctggttggggcgcaccccacatgggccccacttgggcctgggtcccaaacaaagttacaagcccataggcctattacaggtgacgcagcacattgtttcatcaattgcgcatgactgtgaaggaatttggcgatgaggctggatctgtttgaaagaggactccgagagatttccatcaggtactcatgtttcaaaaacggatgtcgtatgaatatttggcggccgtttgaagtcagcagtgtagcaaatggccgaatcggattccaacacttggaggacttgatcttgctagcatcttgttcatccatgatgtgagcaactgttgtatccatagtagccatggtcacatcatcctccccttcttcacggaaaaccgtcctcggtttttccatatggtgctcgtcgcatggtccatttagaacatgtttcttccaatcaaaacaagacaaactcgagataatatgattagcaataataggtctctctaacttgtatgttttatctacatcaacaggaggttctaaatccaaacatatataaattctatgcaccaaatatatgtctatcattatattcgccagatatgaaaaataacattagttggacatggcaaattagatttatcaaataatttctccttcaaactatcgagctcaaaaaaatcatcacactgaacatagcccaaagtatttaaagatgatgtcaattcacgttcctctacttcattagcaatgtgaagaacatgcttaaaatcagcacacaaagaaacactagagacaacatgttcattcacttgttgtggcatggatataagtgaagcattatcacacaactcttctttatcacaaggaataacaagtaaatcaacttatgacaaaggcatctcagcaattggatccactaacggttgctctactatagcatgaaaagtggacatgtctagctcaccttgagtatgctcaccttcaattatctcagcctcattgaatttaccttgcaaactttcttcagattttacaggtgcttcatgcttctcctcttttttcacaaattcatcgttctcctccttttgtttaatgttctgaacttcctgcaaaatgttagtaataggaggcacaagacattgctcctccaatgtttgcatatcatcattgcacaaagatataggagattcaaaaacatgagataaatcacattgttcatgctttctcacatttgatatgatttcactctcaatgctacgagcaagcatgaataggtgtccaatatgattatatgtcacattagcaagcacaatctgaatataaaaattaagccccttgaaaaatttgcgcattgtgttttcattgcactcttttagatcactgcagatgacacaaactttaaattcatggatgtactccctaacagttctgtcaccttgattcagatgttcgaatttctcacgagtagtagatttgtaataagaactcacaaaatgctttctcatcatgtttttgtattcatcccaagtttcaggtttgttactaacataagtccaccaaaataatgtagaagaggtaaacttattactagtagccttaatcatttgagcatcagaaaaatcataattgtcaaattcattgtctactgctagttcccaatcaatatatgcaacagaatcatgcttaccatcatagaatggtaacttagattcaactcgcacaaaattatagtcatgtacctcgtatgcatcacgtggagaagttgtcatatcttgtagacggtgaagaagccgatgttctcgtattcccttgcgcaatcctgccatggttagtagcaaacaagaaacacacacaagaatatgcacgctcctatcaactactaggtagtggcagctcaaatatcacacacactcaatcctttaaccaagctcttacaagttcttaccaaagcaagtggaatggtgacatacactgactcaaccaagcaccccaatagaggttggatgtatcgatgcctcggcaaacacttgctatacggctgcaatcaaatctgtggagctctgggtaggcttaattatgtagcaaaggaatagaaaatgctcaaatcagagaatgcaaagttgaataattgttcaaagtcaagtaccgtgctagtcctaggctagaacgtactagagacacgagcctagacacaaatgatatcacaagatagcactaggaacaactcatgcacaactctgatatatgaagttcagctcaaacataacaatattttctcttttctttctttcttctttcttttttttctttcctttcgttttcttttctttttttagggtgtggcttttcttttcttctttttattttttttttacaaaaacagattcaaggacctcaatgtaaggttacagggactcaaatgtaaatataaaatttacaaggactaaaatgtaaaagtccaaactcaaaattaaaattatataaaaatggaatgctgaatttatacgggttccctttttgcaaacggatctccaatccgacactccaaaatttttcaccaagatgttttgcaacccacggtgtggattgaaaccgggagggaggaagccggactcggctaagtgggtgacggcaggagatgagcgcgacaaccggccttgacgcatgggaaaggaaacagacttggcccaagtagaaagttttctttagacgaaacaaaccaaccggactgatctaatctgcaaaatatcctccaacaaccgattatcctctcttcttcctcgcgcgacagaaacaagagcacggtgcactagacaactgaaatccaagatgcaactccaccgctccaaaactaaccgatagaaacttctgaaaactacaaaaatagaaccgtggcagtgagccgattccgcttttgtagatcccgacaacaactaacacacggcggtggcgatgacagtggtactaaacgtgaccagaactcgaaactctaaacggactaaacgctaagaccagcaacacgactcgacgatgcaacacaaattcaacagagcaaaaactgaaaagaacaatgcaatagcacaaatatggctaggtgatggatgcaacttttttttagctttttctagttataggtagacaaaaactcaccgagtaacgaaagctctgataccacctgatgaaccctgagctccactcgagacactcaaggctgttgttggcccgatctttcggtgaattgtagataactacgatttgggagaaacgt

SEQ ID NO: 20160 - DNA, 10300 bp, Oryza sativa
gagtgtatagggtgcgttcgtgtcgaaaaatcacttcgtgattcgcgcgtcgaacttttgtcaattaatgtcaatattggcatatattggcccacactggtgcgatgtttttgaccggaattaagaagatcaaaaacaccaaaatatgatttttggacatattggagtgtattgggtgcgttcgtggcaaaagcttgcattgtggatgccctaatttgccgatccaatatattattactttcttttttttccttccttccccccccaaccgaatccaaacagatctgctatattctgccttcttcctccacacacaagcacggcaaaaatacaagcacgctatctgaagatgaaaaaaatcggaaaccaaccgatctaccgattgtagcacaccatccaaaaaccgatctgctatcctcttctttcctcttcctcacacgtaagccagacacggcagagcaccacactacagcaaccttctagatgcaactcaactccaaaccgaccgacagaaacttctgagaactataaaaatggaaccatggcggaaagacgattccgttttcgtaggtctcgatgacaacaaagatacggcggcggtgacgacagtggtagtagacgtgacatgaactcgaaactctaaacagactagaagctaagaccaacagcacgatgtaacgatgcaacacaaaaattcaacaaagcaaaaactgaaaagaacaatgcaatggcacaatatggctagctaaatgatacaattttttgtctagatatgtcgggtcccaaaactaatgattcggaaaccgacatgtttaactgtatcaagccttggatcagtagattgatacaggttaaatgatctagatcttcattgcatgcatttgatcaagctttcaaagaagatattattacaaaatgcaagggtatttacaagcttgtggctaactaacacagcagaagctataggatgacttaaccctaatgtttggctatagacttaaaccatctatctaatctatgtttgagaattaagttaaaataaaactaacttatgtgattgaactcccagcttcagaaaaactcctaatagacaatgaaaaagaggggttgaagcaagggtgagtacaacgtactcagcacgctattatattcaattatgaaggcatgatatagtaatatttgactagggctatgattacttgtagaaagctgaaaataaagagggagaaagcctggaatgtttttgatgcaacaatattaataaaatctggaattatgtttctaaccaaatatcatatgtcccgatactcaagtccgtgagcacggctattcgaatagttttaagaatattcatactgcagtagatgtacgctttacccgcagtccataacttgtcaataatcgttagcttagtcatggcccagtattaggttactaacaatagtggcacctgttccatgaactctagtcctcatgcgctctgaacgtaacgttatcagcagcgagaggagttctggcgttcccgaggtttttagagagaactggttgagagacccccgtcatctcaaacaggttttcacaattcatacacacagctcgcgagacaatcaagatatttacgtgcgcctcggtaaatattacaatcgccctgctcggcataagtttgcctcctgcgtgaggacataaataagaaccactacacacaggtaccacattgttaattaacataataactaggtctatccccattctagaagctacggtcgtactcgttcgtttgacataagtatttagtggcaattatatcgaccgggacagtactagccaccgggaaatcaaccaaatcttacgtactgtcccaatctaagttcattatatttttgtgcagtctaactaggcagggctaagcaaaagctagcatatctggtttgctatatgttcaggttatgcattcaaaatcatttaatggctaatgcatagaatagaaatgtagaatatagggtaattatgctcaagggcaggaataataacttgccttgctccaacgcaaataaatctcagataggcaacctgattattcagtcctcgaaataccacaggttgccatccaaaagacaatagactctactaaagaagaggaagaaccaaattcaataaaattcattgaataataagaaaaaacaaaaaaatggcgagaagggcaaggtttagggtgtaaatatctcctttattggatatagggattattgggctaatatttcatgtgtaagttctatagggttggaggctagaggggattaagcaaccatggtcgcttatattttatgtgtgggcttggtcgctgaaaggataggatgtatattaggtaattgaactggttcaactggtatatggctagttttggctggtggtagggttaggtaatattatacctaaggtttagttgtatttgagctgattatggagtagggcagtatctcggctagggtttggttatttactagtcgttgctagagttgggtagcatgacgactaggttttgtttcgtttctagccggtgtcgatagacaacatatcggctggaagaataggaggtgggtgcaggtttagtggggtggaagtgttattttgacaaccgtgagtggcggcggagcggctaggatcgcacagagctcgagaactaaatgtgtggtgtgctgtggaggtcgagaaaatagtaaagctccaaccactatacgcatcaaggtgtgggggtgccaggagcagcacttcgaccttaggtttggttttgccaggctttacaaccaacggttcgacgtcggggcgagtagacgcgaacggacgtcaccatggaaggcgtaaagtttcaaccggtggcttttagtgggtaaaaggtattttggagtaaaaggagatatttgaaaagcaaatgacatttaaataaattaagaaaattcaaatgaaattataaaattgcaaattgggtatcaaaatgtagcttttgaatttggatgaatttaggtccaagtttcatcagaattggatctacggtttaggagatatgggcttctaaagtttggattttgaatcaaatctagaaaatgtgaaatagtactgtaggggcccacctgtcagtagctgtcctttttctttttctttttctctcttctttttcttcttcctcccgattcctttcttctgttccttcttcccgtgtaatagcagagagagagagagaaggggcgccggtgctccgatggtggaacggcctcgacggcggcggccaagtgtgttcccgagcgatgcgcccccggggaagtggtcgcccagcgaaggagttagggaggaggccggaacggcgagcgtaaaagcttgcttcggccggttagaggaggtggcgttggcggcttattttggcgggggaaaggaagaggaagtgagggaatggattcgtctcgatgagacgaagctagtggcgcgagagcttggccgacaacgctccggtaagggagatcggtggacggccggccatggctagagagagaaaagtagagctcggagctcagatgaccttgccgactatttatatgtcgtggagaggcggttgccgaaggtggttgtaaaggcggtcgtcgatttggtcacggcgacggtaacttggaggaggagaagacggcgccggcctcgtcttccgattggtcgacgacggcgtcgcgtgcacgtggcggccgcggcagggctgggcggtggcagtggacaggcacggaactgctacagtggcggcgcgacttggtgcacaacagtagacaacggcgtccgacagcatcgtctgtgggcggcgacggcggcagtgatgcgtgcatgcatcacgcacgcccacaggaaggtggagggaggcggttgcgtcctgggccggctgggccacaagagagagggggtcaaaagagagaaaagaaaatctcggcccataaagaattatttatgaatttctaatggaataggatttgtatttggagggaatttttttttaaattacatagtacagcgcagacactcacaacgcacgcgcacaaaccctatacgtcgctcccatgaggagtcaaacccaggacctcaggtgctactaaggctcttgtaaccactaggctactggccctttcgcgtatttggagggaattttaatacgaaggttgtacaaaggaacttggacaaaatttatatttgaatggaatttgctcagcaattcttggaaggaatttgaatattggaagaaagttaaggataggtttagaatcaaaggatgggtcgacaattaaatccaataaaattggaatcgtttggtttaggttttacgacaatagtggagaatttattggaccataattcataaaaatagaaagggatttcaaactaaatttgaataaaataatttttgtcaaaagaagattttaaaccaaatcaagaaatacctcaatttaaccaaatatatatttttaaatgaaaaacacaaaagagattaaatactggagagattttgtgcgagttagttttgtgaggtccctctaattataggacgcctaggtttaggaagttattaagaacataagaagcgacatgatgcaggattagaaaatgatacattttcaggatgttacaggtatttcttggttatgggtagataaaaactcaccgagcaacgaaagatctgataccacctgatgaaccctgagttccactcgacactcaaggctgttgttggcccgttctttcggtgagttgagataactacgacttgggagaaacgttgacgacccgactacaaccgtacaagacgttgcattgcgccttagcgatcgatactcctctctgtgggctgttgatcttgccgatgcaaatcaaccttattcctgcaagcaaatcgaagaaacaagcaagaacaagataaaagcaatctgaattacaaataggaatgaatacaaatgataagttggggttccgaagaacaatcagacgggcgatctagccgacacgcgctgcaagcaagtagcaatagctaaactttaatctaacaaaacccgagaaaactctgaaggggtacctaacaatttaaggaggtgggaggacgacctaggggtccctagggtcgtggtccacctggttggggtgcagcccctatgggccggggtcgcagagaatgttacatgcccataggcccactattggtgatgcaacaccttgtttctttgattgcggccaactgagatggagtttggtggtgaggctggatccgttggcaagaggactccgagagctttccatcaagtactcatgggccaaaaacggaggtcgtatgcagattcggtggccctttgaagtaagcagagtagtaggtggtcgaatcggattccagcacttggagatgttaacaaccaaatttggtaatttaagtatcggagataaagaagaaatcgaaacggagttcgcgatggagattgtcctggaaacagagtaaggattggctggagtccgaatcggctgtgatcaggatcggcatagtctgagttggagagggttagccgattgagttgaatccgacaatgtgacacggtatacgttgtcgggttaggttaatgagcttcatgaggattgccacgcatggatagagtcgtgaggaggcaattgtatctattaattaggatattttatgtaatttcgttaaagatatttttgggcgaaagtctgccgcaaagacttatgttatcttagagtttgttagagataagagtcgtgtccgatatgaacatattttgtaatctcgggtataaatagaccccaagccccatgtaatcaaactaacacatgttcaatacaatctcggtgcatcgccatcctttttactttcttttgtttcgacgagttcttgctttcgggttgagctgcatcggtttcgatcttcaacaagtggtaaaacttgttatggtggattgcgttctcgggattagtgcttccatttttatgatactctaatcttgtttatgtaatttgtcgagttatcatatatctcatataatctccggcaatatcgctatctaacctccaatcggctaacgtctgctactagaaggcagccgatctggttaaataccgattttgacttagattatataggatatctaccactctatgaaacatccaacggcttgattgtctagatattgtttttcttttcaaacttatagctgcatcagttgagtttgatcttatgagtcatgattagaatcttaatctctagcctgcttttggttgccgataagggtagcatcggggtttcagccgattttacctgatttaactacatttatcttatatgctttattgacatgttaaatctgccttttatgttaagatcttgttgcatttaagtatattaggctttttgtttggtatattctacttgctttaatatcttaatatagagtggtatcggagtattagccgatacatgctagatctatctgatcggctatgctatgaacatatatagtattgttgttaatatatatttcagcctaagtgatttatactgtctcggcatggcgaccgatctatcctaatcacttgatttaagtatatatcgacataaggattatatatcgttaatatgtacagccgatcgagtagatttagttctttcttacttatttatgactgccgatcgatctacatgtgacatcggctcaaagataaatgatatgtcatcggcaactagccgatcgggtatcgtttatggatttaaccgcggtttctttgtctttgtttcttgttgattgcaggatcaaatcaactagcacgcttatacacctaaaggcaagcttttgggcccgcactggtgatgaaccctgagttcctctcgacactcaaggctgttgttggcccgatctttcggtgagttgatgaaaactacgatttggaagaaacgttgacgacccgactacaaccgtacaagacgttgcgttgcgccttagcgatcgatacacctctccgtgggttgttgatcttgccggtgcaaatcaaccttattcctgcaagcaaatcgaagaaacaagcaagaacaagataaaagcaatctgaattgcaaataggagttaaatacgaatgataagttggggttccgaagaacaagcagacggacggtctagccgacacgcgcgctgcaagcaagtagcaatggctaaacattaatctaacaaaacccaagaaaccctgaaggggtaactagctatatataggggtgggaggacgacctaggggtgcctagggtcgtgctccaccagcttggggcgcaccccacatgggccccacctgggccggggtcccaaatgaggttacaagcccataggcccattacaggtgtcacagcaccttgtttcttcagttgctgccgactgagatggaatttggcaatgaggcttgatgcattggaaagaggactccgagagctttccatcaagtactcacgggctgaaaacggaggtcgtatggagcttcggcggccgtttgaagtcagcagtgtagcaggtggccgaattggattttggcacttggaggactcgaacttgatatcttgttgttcatccatgatgtgagcaacggatgtatccgtagtagccatggtcacatcatcctccccttcttcacggaaaaccgtcctcggtttttccatatggtgttcttcatatagtccattcaaaataacctgtttcatccaatcaaaactagagaaactcgaaatagtgtgattagcaataacatgtttctctaaatccaaacaaatgaaaactctatgcaccaaatatattcctctatcattatatttgccaaagatatgaaaaatagcattagttagacatggcaaatcagacttagcaaataatttctccttcaaattatcgagctcacaaaaatcatcaaactgaacatagcccaaagtatttaaagaagatagcaatttacgttcctcaacttcattaacaatatgaacagcatgcttaaaatcagcacacaaagaaacactaggaatagcatgttcattcactagttgtggcatggatataagtgaagcattatcacacaactcttctttatcacaaggaacagcgagtaaatcaacttgtgacaaaggaattccagcatttggttccactaacggttgctctacttttgcatgaaaagtggacaaatttacttcgttaacaatgcactcaccttgattaatttcagtaccatttactttaccttggatgtcctctttagatgatggaggtgtctcgaacttgagtgtgaacaatggaattggtggctctttcatgtctctctcctccttttcgtgattacgcacttcctgcaaatagttagtaattggaggcaaagacatagcgtgtttctttttcatatcctcctctattttactttcagcattgcaagcaagttgtaacaaatgagaaagagatgtatatctttgacaatcaagcatgtcctgaatttctttgttaagcccacataaaaacctcaattctttagcttcttcgcattcatctaaaccacaacgtaataaacaagcttgcatatcatgatagtatgaagtaacagttctggtatcttgttttaaacattgtagtttgttgaacaaaatgtcagcataatacatgggaacataaacatctctgaaatatcgtttcaggtctttccaagattgtggtattttgttatgcctacaaagatgtttccaatcattagaagcatgtttaattaaaacactagaggcacacataaccttttgtttctccgacaagacatgcttttgaaattcactatcaaccgctagctcccaattaatgtaagcacgaggatcatagtttccctcgaaataaggcagtgcagatttgatcttacctagaacatcatcacttacctcataatggtcatgttgatccctcctcatgtctcgacgaagatgtcgatgttgagcacagctatccccaattatcttgcatatccctgccattgttagtagaaaacaagaaacatacacaaaaatatgcgcgttcctattaactactaggtagtggcagctcaaaaatcgcacacactcaagcttttaaccaagctcttacaagatcttaccaatgcaagtggaatggtgacatacaccgactcaaccaagcaccccaatgaaggttggatgtatcgatgccttggcaaacacttgcggtacggctgtaatcaaatatgtggagctctgggtaggcttaaatatgtagcaaaggaatagcaaatgctcaaatcagataatgcaaagttgaataattgttcaaagtcaagtaccgtgctggtcctaggctagaacgtactagagacgcgagcctagacacaaacgataccacaagatagcactaggaacaactcatgcacaactctaatatatgaagttcagctcaaacataacagtattttctcttttctttctttcttctttcttcttttctttttttttctttccttttcttttctgtttttttttggtgcggcttttttttttttgcacctttctgcctttttttttcacttttttcttgattttttttaacaaaaattgactcaaggaccttaatgtaagattacagggactcaaacataaatataaaatttacagggactcaaatctaaaagtctaaacccaaaattaaaattatacaaaaaatggaatgctgaatttatgccggttccgtttttccaaacagatctcgaaaccgacaccaaacaaaaattcgccaaggtgtttgacacaactcggaaccgtggaagagagggagggagtcggactcggccaaaggggcgagtgggactcggccaggaggtggagtggatggcagccgaatttggtgtatgggataaaaaggaaactaatttttaaccaatccaatctactatatctttccaaaacaatcttgactacttccaaaatcagatatggtaattcaccttcctcctctcgtgcacgacacaggcacggccaaaacaaacacacacaaggatcggcaaactctagatgcaactcaagaactccaaaactaaccgacagaaacttctgaaaactacaaaaatagaaccttggcagcgagccgattccgttttcgtaggtcccgacaacaacagagacacgggggcagcaacgactgtggtacaaaacgtgaccagaactcgaaactctaaacgaactagacgctaagtccagcaacac

SEQ ID NO: 20161 - DNA, 1636 bp, Oryza sativa
aatgaggcttgatgcattggaaagaggactccgagagctttccatcaagtactcacgggctgaaaacggaggtcgtatggagcttcggcggccgtttgaagtcagcagtgtagcaggtggccgaattggattttggcacttggaggactcgaacttgatatcttgttgttcatccatgatgtgagcaacggatgtatccgtagtagccatggtcacatcaactggagttaagcagatctcccaggcctcgtgtttttacatcaataggaggacacgatcttgatatctccttgttcatccatggtgtgagcaatggttgtatccgtagtagccatggtcacatcaagttcgccgcacgaatcatgttgtgatattttgccacgaacacacccaatacactccaatatgtccaaaaatcatgttttggtgctttttgaactttttcatgccggtcaaaaacatcgcacccacgtgtgccaataatgtcatttattcacaaaagttcgccgggcgaatcacggagtgatttttttgccacgaacacacccaatacattccaatatgtccaaaaatcatgttttggtgctttttgaactttttcattctggtcaaaaacatcgcacctaggtgtgccaatactggcattaattgaataatgttccccacgcgaattacgaagtgattttttttgccactaatgcacccaatatactccaacatgtccaaaaatcatgttttggtgctttttaaactttttcatgccggtcaaaatcatcgcacccacgtatgccaataatggcattaattgacaaaagttcgccgtgcgaatcacggagtgattttttgccacgaacacacctaatacactccaatatgtccaaaaatcatgttttggtgctttttaaattttttcatggcggtcaaaaacatcgcacccacgtgtgctaataatggcatttattgacaaaagttcaccaaaaacatcgcaccaatagtgggttgggtgtgtatagggatagatgcttaatctcagatattccacaagtgttggtttgtatttgtatgcaggtgataaaccctaaagttgggaggaaatctagactaaagtggggagaaatatgtatccatacaaggatgggatctaaacttcatcaaaattcccgagaatcatcccaaaatcctgaggaatagatagaggtggaccaggggagaagatgggtcaagagccaggcctgggggcccagcccaggttttgccgaaccccctggttcggccgaaccaccatctccaccgttggatgtggggtttggcgtggacgtcccagatgcatccctgatgacggttggagggcacttcagacatttccccttcgctaactgtcatacctacccctatataaagacatcactccctcacttcacatacacactttcaagcttgagctgaattataagaggctctattgtactatattgtatactagaataggaagagagtagagtagaagaagtcggaagaatttcggagttgtcggtaatcttctctcatttcttttattatgtttattactctgaattcaatataatattatttctgagtaatttagatttatcttgtgagaattatctcttcgtta

SEQ ID NO: 20162 - DNA, 698 bp, Oryza sativa
gtccaaaaatcatgttttggtgctttttaaactttttcattccggtcaaaaacatcgcacccgtgtatgccaatatatgccaatattggcattaattcacaaaagttcgccgcgcgaatcgcgaagtgagtttttgccccacgaacgcactgatgtgaccatggctactacggatacaaccgttgctcacatcatggatgaacaagatgctatcaagatcaagtcctccattcactggaatccaatttggcctgttgctacactgctgacttcaaacgtccgccgaatattcatacgacatccgtttttgacccgtgagtacttgatggaaagctctcggagtcctctttcaaacggatccagcctcatcaccaaatgccttcacagtcgtgcgcaattgatggaacaagttgctgcatcacctgtaataggcctatgggcttgtaacttcgtttgggaaccaggcccaagtggggcccatgtggggtgcgccctaactaggtggagcacgaccctaggaacccctaggtcatcctcccacctccttaaatagttaggtaccccttcagggttcctcgagttttgtttagattaaagtttagctttgctactttgccgggtaatcccgtgatcggttagatcgccggtttgctcgtctatggaacccaaacttatcatttgtgttcaattcctatctg

SEQ ID NO: 20163 - DNA, 2467 bp, Oryza sativa
cggtgtgaaaggaaagatcttgaagcaatcatccaagctaaccgggcttccatcaatgaagaaaaagcaaaacttgatgaattggaggctggtccaagctccacacaagccaacatagatcggctgaatgctcggaagatagaactcctagccgagttggagcaatgcgatgctcaaattgcaattgaagaacagaatcttgccgatctgcccaaagctactgaagatcagagatcaaggctaaaatcctctatcaaacacttagccgaactgacgaaatctctgaaagtaatccctgaaccgatgcagctgatgccccagatcattgacaaagtagaacaaattaggcaaagagctatatcggtatccaaaaatatgtatctggatgaactgaatatgtaacttttgagttgacaaacttttgggctgtaatgaacttcaaggttttgaaatcttaattccacatttttgcccttactctatttgcttctgaagtccacatttttgcttttgaagttcacatttcacatttatcatatatatttgcccccttaattttgcaatgctgaaaacattgattaaattataattgtactaagggcgatatgatacatatcggccatcatacatcggtaagcacaaccgattatgatcacaataaaatgctaagggcgatataacctatatcggccatcatacatcggtagagcacaaccgattatgataaaaataaaaacactaaggacgatacaacttatattggccatctaaaggcgatgtcaacacattggctaacatatatcggcaaaagtcagccgatcatgaattaatccaaacacttggataatatttcttcaagtacttctcgtttagtgctcgtccaaaaacttcaccataaagccattccaacatctaagctcctttggatacaattttgtatatttgaaatggttcttcccaatttggcgacctcttgccgaatttattatcatgagttcctatcggcaaaatcaacttccaaaccaactttccctctgaaaaggatttaggtacaaccttcttgctataatgaccagcaactcgttccttatctcttgtcaccttttccaaagcacgtaatctggactgaattaaatcttctgtttcatccaccagaagagtttaatactcatcgactgtcaatttatcctgtaaatctattctccttgagccgatggcattttcccatggtagaactgcttcatgtccatatacatgcttgtaaggaggaacctgaatcgacccatgacactccatctgataataccacaatgcttcggctaatcttatatgccattgccgaggaaatcacatatttttttattaaccaactgtataaaactcttgttatatgcctaagcctgtccattaacttgcgcagtaagtatggcagataatctaacaacttgatgcccatgctggcagtaaactgaacacactcatccaacacaaagattgaaacctgatcgggggcgatggtttgaggaacaccaattcggtccaccatctattctataacaaactggatagcatctctagaatcaaccttctacacaggaaccgcttgcgcccattcggggaaataatcggtgctactaatgtaaacttatgtcccttgcttgaatgtggattattctgaccgatcatataatgccccatcctacgaacggccatggcttaataatcggattcataggtgatgctcctgctcgctgagtcgctccaaatgtgtggcgatcttgacaaccttgagcctatcataagcaatcctctaacatcgtcggccaaaaatacccagtacacctcattttataagccgattgatgagtgccacagataccttcatgcacttctccatcacaaccttggcttgatcggtactcaaacatcgaagcaataccccatcaatcgtccgataatataactcaccatctaacaaggcatatttcaaagctttatacctcaatttccgtgaagccgattgagaaggatcatttaaatactggaacacatcgtatctccaatcatcggctgtaattgcagcaacttcaacttcaatgtcttgtaccatcggcttgtatcctgatgccccctgagccaaatcattagcttcaacgttctgctcccgagagacatgcttcaaatttaccaaccgaaaactattcatcagttcttggcacttctcattgtacatcagtagcacatcatttttgaattcatattcccctgccaactgattgatcaccaacaatgaatcacccattatctcaatagcatcggcttcaacttccttcaataattgcaaccccttgagaactgcttcatattcagcctaattattggtcgcgtagggtttaatagtataagcaaactcaaaacttgcccctcgaggagaaattataactaagatgatgccgcagccatgagt

SEQ ID NO: 20164 - DNA, 4789 bp, Oryza sativa
tgggcgataaatacctaagatcaaactctgtcaaagcatatatccacttcccaactcttcctttcagaactggagccgatagttgaccacatcggctttgcacactatagtgcactcgttggacaacaaataatgacttaactttgtgcaagaaaaatataaacataaacacaacttctccattggataataccttgtttctgcatccaaaagtctgcgacttaaataaaaaatagctctttccttgccttctaactcctggattaaaactgagccgatcgacttcacatcggctgataagtacaaccttaaaggcactcctttctgtggaggaattagaactggaggggaacttagatactccttaatattatccaaagccttctactgctctgccccccaagtgaattcttgatcggccttcaatctgagcaaaggtgtaaaaggttctaatcatccggacaaattagatataaaccttctaacaaaattaatcttgccgatcaacgactgtagttgtttcttgtcctccggaggttgaatcttattgattgcattaatactcctctgagttacctcaattcccctctcatgaacaagaaagcctaagaactgttcagccgatacgccaaaagcacacattgttggattaatcttcaagccatatttccttattctttcaaaatttttcctcaaatcggctatatgatcatctacctactttgacttcacaactacatcatcaatatagacttcaatcaacaagccgatcagatcatggaatatataattcataactctctaatatgtagccccagcactctttaaaccaaaattcatcacaacccactcatacaagccgattgcaccaagacatctgaaagcagtcttatgaatgtcttcttctgccataaaaatctgattgtaaccagcattaccatccataaaacttataatgttatgccctgaagcagcatcaactaattgatcggcaatcggcattgggtacttgtaacatactcaaaaatcttgaatttttggagaaaatttttcgcgacgagttttacttttggttcttattgcatttgactaaattggagcatttcctatttttatccttttcaaatttatatctctaattaattaggttgtgtttctatttcaaaaattttcaaatccttttggtaacctaaaagctttattttaattttccttgtcaagttcaaaaagtcctcaaatttatcccctctttcatttcctttgaatcctatttcaaatctatccgcaaattgccaaaggctcctatttattttgggccaaagtcccttcattcggcccaattagcacaagtctatgttatctccctccccttctcttcctgtgggcatgtcgccgccgctgacatgccgaaaccagcgcgccgccgcccagccaatccgccgccgccaccttgccgcgccaatccgccgccgccaccttgccgcgccaatccgtcgccgccaccttgccttcgcccactatcctctccaccgccgtcccgcgagcgtcatctcgagcagttaccgacatcgagccgcccattcgctgtccaatcacaagctgacacccaacgccgccacctccatttcctctcgacgccgagccgtgccatcgtcgaccatctctccctcgaccgcctttgcctcctatataaaccggcgaacccctccatttccatcacaaaaatcggagctctctctctctctctctctctctctctctctctctctctccaatccaccgccaccggccgtcgctttcctttgctccccacacctggccgccaccctagccctgccggccgccaccagccgccgccgctgtcgccgttgtcgacgagcgccagccgctagagccgctcttcccccccacgtcctcctctgctcggctctctctccctttcatctgtgtcgcaaggagaaggggaagaaaagaaatagggaaggaagaaagagctgacaagcgggccccacctatacggtaactcttctacttttatttgatttatttcaaattccattctttagagatccatatctctccaaccattgatccaattccaaaaattctttaaccatctaatttcaaaccctttattagataccaaatttcctaatttttaaaattttatttaaatttctttatttaagtaccccttttccttatttatttactttctaattctaaattattttaattaacctataaaaattattttaaatttattttttttactttatatccctttaattttaaatttcttgttttattttaaaaacctttttaaaattaaattatcctttagtttctttaaatgcccttttctttattttaaaataccatttttaaattttatttctttaatatatttaaaaccccttcttgaattaaaattcccttgatttacttgaattccatttttatttccaacctatagaaaccgacaccgttttctttcaaaattcaaatatctttggaccttttgcctttgcctctcttcatgctccaattttgttattttcttttattttatcgtttatttgtagtactttttcttataggctttgtttgctatacgtacgttagacaatacagaagatctcgtcgacatcacaggagctgacatggatccagccgactacgcagaagcccatgaaagtttcaaggcgcaaggcaagacagaatttaagcatgaaataatcaacccccgtatttactttatgcataagttaatcatattatgctttactagcaacttatttaccatcttatggttgctccttcagcatctcatgggtatatgctatagtttagaataacattgcagtgggttaaaataatatttaatgcttttaatcattgttacatgagattatggaaagatacattagacatcattttatgtggtttattattcaaatatctttacaaacgtaggaatccggttaaaatgggcatttttatgttgtaattatgaatgttgatgaatgatgaagtttgtgatgttggtgtggggagtttggaaagttttgtgtggtttaaccagattataattacccccttataccatgggaaatgacatagtagtgtccatccacacgaccaagtaattggacttagcatagtacattgtcccactatatgaaagactgttgagtggctctatgaacggttttggggtgaacatgcgtaatgagttagggggcagtgtttcacaataatggatctcatgaaagtgtgacaatatagtaaccttgccctaggtgttggtatttcttataatcacagataaaatccgcaagcgcacggatataccgatgtagcacttcccctacggagtattctaagggtatcgaatccaagggaacgtgtgtgatcagatcttcctccagtttatccaaggacaccaagcaaatgataggccaggatagagaggattcactagtgagaaacagtgtctagggaaagcttaactttaatcataatgcaatactgcaggcactaacaacccgctgttcctagatggcgctctactacgtacccggacaggcaggacttaagtcatctcgagggctgtcacctcctctacacccacctctaacgtactgtgggatacacatcaattacaggataataattacctaaacaccatgtctaagcaattactatctactttagtgtttataactcaccaagcaatcactatattttagttgattatagtgaacaataatcctgtatgctacttaggaactaaccaagagttaattctcacaagataaatctaaattactcaagaagaatattgtattgaattcagagtaataaacagaataaaagaaataggagaagattaccgacaactccggaattcttccgactcctactctactctcttcctattctagtatacaatatagtacaatagagcctcttataatttgtcacgcccaaaaactcccgaatagaattccaagcaaaatgtgcattaaaacccccgtccaggaccggtcggggtacacaaacgacaaagttgacatacagatcgacgtcttacaaacattatcaaagtcttacatgaatgcagcggaaaattaaaagacaactggagctaagccttgacttggactgcagcgggaacaccactccacaggcatcctcgacggcacggacgaagcctactccttagaaaagccaccatctgacgcatactcaaactctggggtttggggaagatagagcaagactgagtactacccactgtactcagcaagtcataccggaataggggtatgatgcagggtataaccaaaggatagttagagcggttcatttgcataaagcgagcatttatcgacagcagttgaaagcggtaaaaccgttgtaataattaatcaatattaaccatccactgtccaacgctacaccacgatgcaacaggcccaaccatccacctgaactaatcaattccattagactaaactagggtgaggctaatcacggtgaatctggttgaccgcccataaccgcgggcatggctattcgaataattttactctgatcagaggtgtacaactgtacccacaagacacagccccacgacacgttttcgtgcgccgacatgccaccacgacattctagaaagaggccgtgacaggacccttcgcataacccgctctaaccaaacacaccacacctcaggtttcaaccccactcctcgcaaggcagcgggcagtcccctctcgtgcct

SEQ ID NO: 20165 - DNA, 9730 bp, Oryza sativa
taggtatgacggttggcgaaggggaaatgtccgaagtgcgctccaaccgccatcagggagtgatctagagcgttcacgccaaaccctagcctgaatgtctgagattttggttcggccgaacctgggctgggcccatctggcctggtctttggcccatctcctcccctcattctcctttatccatttatcagtattttgggctgatttgctgacattttgatgaagttcacaacctattcttgtatggatacagaattctcctcactttagtctagatttcctcccaacatcagggtttatcacctgcatacaaatatacaccaacattgtggaatatgtaagatttaagcacctaccactatgttggatgttatattatctgaactctatgcagatgttggcggtacagaattggcatttaacagctgccaacaaaaccccccacacttagccctttgctcatccctgagtaaaggttagtgtagaattaatttcttcaagatataaatcaagcatataaatcattcacaaccatacctgcacctgtgaactttatcagtggctatcttatcatcttgtgtaattgacaaatggaatgatcttgattccagtccttcttgcttctctgccagactcatgggatttttatagattttcacaaatcagcatttctcctcctattgactttctctcatgtctctcaaggatgtatattttctttttggatccttaccaaggcaaaatttgccagaattcatccctattataaggctaatatgtggagcttggtagggataaattgtgacatacctgcatcatatatattgcaagtccaaaaatatggactcaagaagatcatcaatcatactcttagatcaagggtctttatttgtggtggaaaatggaaaagtaatatatttttgtggaatggtggaataaagaaatgattcttccttcttcctataccttctctccatttggttctcttagcatgatcatggaaggggcatggctatatattttttcaactttgctcaatattttgggagcaagatttctttctttctttctttctcccttttttttaatacataccatgccttgcctccccttttctcattttccttttttttaacaaagaacttttctaagagaagaaagcatagtctgaagcaggagtttatttgaatggaatttttgtggaaagccatcttccaatgtagaagcttagcttaattatatatgtggaaaaataggaatggaaatgataatgaccccttgattatgagagtatgaaagatgactagcacaagtcacataaattcatcaaagctcaatataatgttaggcagtcatatgcataagatggtttatcattgacatacttgcatatggcctcggtgggtataaaatgaagtcaattgaggattgagcctttaaaacaattttattttgaaaacaaattcccaagtgtcaaaacaggagttgcaagaattcttttcatctcgaatcatctctcatataacaattacttggatgcagaaggttccctaaacatggaaggttgttcacaagcacaagttcagttgagaataatgaatatacaagatcaattatatgaagaatttcattagctggaaattttatctttcaattatgcttgaaccaagtatattctgaatttccagctctagtactatacaatggtggagatatacagataatggatgtgctcacctgcttacctatgaaaattgagaggaattggggccagctttggttcgcccgaacctggtggttcggccgaaccactctggtgtccaatccctctgcaattttctgtagagttcagtgccttccaggtgttcagatattcagcatttttcagagtttatgcacgtcagaatctggaatatctcccccacacttattcaaaacctgaacattattaaacataaaacaaaaacaaactttggcaaacatgggagttaataccaatgagccacattattcatagcaagtgcttacatgattggaaaaataaaaaccaagcaccaactactattttattcatgggaaaggaaacatctaattagcataatacttattttcctttccatttctacgaatgcgcgctttatcttagcgcacaaaccgcgactaagggtatcgaaattatttctaatttcaacaagctctacccctagctccgcgttgcgatccctaagctctatgttctccttgcggagtttcttaacttgtacggcgagcttatgaatcgagggctccggcgacttcacttcgtcttcttggaattagccgggagccctcacaattggaggggacgtcaagtgacgcttcaccttcataggtggagggctacgggattccgctgccccctccttctccgatgccgtcaaaggccggagtaaacccttgccatacccacctccgggagttcgcactccctaaatgcggaatcgcttctccttttgagtggatggagtagcggtgggtgtgacatacttatggagcacctcatcccccgccttggtgaacagggtgtccacatagagctcggtgggaggcggagtggccttctcatcgtcttgaaaaaggcgtcgcgccttcaaaagaccgagctctcccgttgttggccgtcgagcaggcgaatccccccgaatttttatcttcatgacatcgcgaggggagagggatcgcactgccgaacggggggccgaacggggctgagaggggttcagccgaaccagggagctcgccgacgggctccagattcacaagggagcccggcaatgttgcgaggggctgtgcccacggtgcatttaccccttccatggtataatgttccactgggatcaattgatttgccggtgtcggctctctgtcgaggttgtatgtggaattggaggaggagccaataaatgggatcaatgattttccagccattggtgaattgagggtgatggagcaaaggaattgagatgatatggagaagggtttgcacaagtagacgagaggaggaagaacaagtgctttgagctttgatccgatcgatctacctctgaaagcgcatatcaacggactaagaacgagcgggggaaactgatatacaaaattggtgctggttgggcgccaccctggttcggccgtaccataaccctggtgggtccagctggctgccaatgtttccctaggcctataaaatcctaaactaagcataaaaataacaactttaagggttttaagcataccttagatgagatcatcatggttcataatcgattagttcaataacatccacttcttcatctaaagtttcatttggctcaaggaaaatctttaagcattgaccgtttaccttaaacatgttacctgagtcgtcgcggattgtgattgccccgtgcaaagaggtgtcgatgacattgaatggtccttcccatttgctgtgttgttttccatgaccaaaatgcttaaccctggagttgaacattagcactttgtctcctggcttgaatttcttgatttttattcttttgtcatgctagcgcttcgtcctttctttgtatatcctcacgttgtggtaagccctctctctccattcttcaagttctgcaatttgcatttttctcctttctcctgctccctcaaaatccatgttccaatttctgatggcccagtatgctctgtgctcgagttctacgggtagtcgacatgacttcccgtagactatctgatatggggacattccaatgggtgtcttgtatgctgtccgatatgcccacagtgcgtccggcaatctatcattccgtcatgttcccattttgttgaccatcttctgcagaatattcttgatttgtttgtttgatgtctctgcttgaccactggtctgtggctggtaaggagtggccacgttgtgtttggctcccatctatcgtaggaggtctcggaaggttttgtcaatgaagtgagaaccttcgtcacttatgacaatcctgggggtaccaaatcttgggaagatttctgtgaacatcttcttggcatgcctcgcatccgtggcgctgcacggcatagcctcaacccacttggagacatagtcgactgccaccagaatgtactcgcagttgcgagacttagggaaaggccccataaagtctataccccaaaaatcgaatatcttgacttacaaattgtatgtgaggggcattgcatcgcgagcagtgattcatccttgcctctggcagcttgtgcatcttctgacgaattcttttgagtcttcgtacattgtgggccagaagaggccacttttccaaatcttggcctgagtgtggaatgcaccgtaatggccatcatagggtgaggcatggcatttctctatgatcctaagtccttcatcaattggcacacatcttcgtagtaagccatcggagtagacccgatataggtatggctcatcccatatacgacggcgactttcatactttagttttcattgattttcccctagtggtatgtacttggataccatgtagtttactatgttggcataccacgggttggagtcgcgaactgtcatcaacatgtcgtctctcaagaaatcatttatcggctgttcctgcatgtcagtgatctgcagcctagacaagtgatctgttacggaattttctactccctttttatctttaatttctaagtcaaattcttggagcagcaaaatccatcttaagagacgtggtttagcatctttcttagtgagcaggtatttcaaagcagcattatcagtataaattatcaccttggctcccactaagtaagacctaaacttattgatagcaaaaacaaccacgagtagctctttttcggtagttgcataattcaactgagccccggttagagttttgctagcatagcagattgcttgatgctttttatccttggtttggctcaaaaccgcaccgacaacgaaatcgcttgcatcacacgtgatctcgaagggcagagtccaatccggaggttgaatcattagagcggagacaagtgcctttttgagaatttcaaaagattttaggcacgcgccatagaactcaaagggcgcatccttggccagcagattggtcagaggtcgggcgattgtagaaaagtcataaaaagctggcgtgtcctaaaaagctgcggatttctttgatgttcacaggaggaggaagctgatctataacgtcgattttagcacgatcaacttcgattcctctttcggacactcgatgcccaagatctatcccttcacggaccatgaaatggcatttttcccaattaagcaccacatccttttcttggcattgttgtaagactttgtctaaattctacagacaatgaccgaaagtctttcataaactgagaagtcatccatgaagacttccatgatgtcttcgatcatgtccgagaaaatagacatcatacatctttggaaggatgcaggagcgttgcatagtccgaaagacatcctacggtatgcataggtgccatacggacatatgaacgtagtcttactttggtcctccggatggataggaatttgatgatacccggaatacccatcaaggaaacagaaaaaggaatgatttgccagccgttccaacatttcatcaatgaagggtagcgggaaatgatcctttttgtagccttgttgagcttcctgtagtcgatgcacatcctccatccggttatggttcgttgcggattaagttcgtttcgagcatttgcaatgaccgtcattcctccctattttggcacaacctggactgggctaacccactcactatatggtacaggataaataatcccggcatgcaggactttcaagacctctttctttacaacctctcgcattgcattattgagctgtcgttgaagttccctggagggagtactctcgtggtcaatatgaatacgatgggtgcaaagcgcaggattaatccccctgaggtcttgaagcgagtagccaagaacagaacgatgcttttccaacacgatgagaagacgttgagtctcgtcttcagagagcttgtcattgattatgacaggggcctctttgtcattgtgtaggaaaacataacgtaggcctggaggtagaggttttagctcaagcggaggtcgaggtggtggttcctgatccgcttcctctttgatgaaatcggggacctcatcttccagaagggcctcaggagactcatgagggggaactgcagtaacctcttccgctgactcaatttctgggagagggtcggtcaaggcaatccttgcccgtgagaatggaattgaaaattcattctctcccagtgttattttgaggctatctaatcggggtgtgttgatgagaagttgctcaatgggcagcccaatgaagatgtcaaaatcttggatttcaaacacgtggaaattcaagatcgcctccctgtcttcaaagcagacaggcacatcttgtacaatcctgaatccttcaatgatatttccgttcggatgtttgaagaatttgtttgtcggggtcatgtcacaccctaaaaatcctaaatatataaattgttgtttaattggaattattagaattgattttaaaagcctagaagagaagatctaatttttaaataataaattccaatataaaattgggccagataaaattttattaaatactttacttgattctatagttcctagatttttctgggatttatttgagccaaggaagaatttttaataaatggaattgcatttcatgaataatttaaattgaaaaaggttttaaaagttctcttttggctttgggccgaaagtcggcccaaaacctctgtctctctccctcggcccagtcggcccagtcagctcgcagcctcccgtgcgcgcgccctcggccgctgacaggtgggtcccacctgtcggactcgtcgtccacttgcagccgccgcgccgaaaccctagccgccgccgccgcctttccaaattcgctcgcccctttctcgatccggtgaaatcaattgaggggaaatgtttcccgagatcttctctacctttttccttttggaatcgatcgctaaatcggtttggaaaccgtcggattcgagctcgaatcggattcgtttctttccctttaacactaacctttccttcgcgccgccggtcgcggtgggccttcgccgccgccccctagccgctttaaaaggacccccaggccctccgctacccgccgccaccctcgccttcgcctctcgtcgcctgtagagccctagcgccgtgccgcttagcgccgccgttcgtccagccgtacgccgccgtcgctctggttgtcgtcgccgcttgggaaggtcgccatcgtgatcgccaagccgtcgccgtcctcgtcctgtcctccgtttttgccgaagaccgccggagcaccgccgtcgtcgtcaagccgaaggtcgccgccgcttcttcctcgtcgccgtcgccgtccgttgatcttccgccgctgttttggtcaccggtgagttcgccgcgtcgccctctacgtgctggtgtcctccattcgcgccgccgcgccgtcgttcgccggcgagcttgcgcgcccgagccgccgctggtgatgacgtcatcgctgacgtcatcgttgccgtccgtcgtagaccggtcgtagaccgttagatcttggccgtccgttgtggataggatagatctcggccgttcgtttccgtgagccgccgccgtgcacccggtccaccgtgaaccctagccactgacgcaatatccccttttccttttcaaaaataattcattattgcgtcataattcaattaaaatccatataaatgatttaatccgatttaatctttgaaaattcataactaattcatcttagctcggatttagttggttcaagtctttaaatttttctaaaattgagatctacatgttaaaaatatccacatgtattgttcatgcttgtttatgtgctgttttagtgatttttttcttttctctttagattccgacgttcccggaaagtccgattttgcaggagaagattttgaggaattccaaggccagcaaggcaagtcacacagatcccaaaacaaccctttgagcatgttgatcccgtttaaagctattgtttctattcaactattgcatttattttcgaatgtcattgggtggaattaacctattgtttgttatagcccttttgttcttgattactttattccttgataccttgggttattataacttgactagttgagctttatatattggttcagctagatattagatatgattgctcagccatgcttagaaacactatttcatataaatgggatacttatgactcactattatttaatgatggcttaatgatagctcacgatggtcaatcgtgattggttaattaattaaattgccaactaaaacctgataatggtgggttgtgagtacatggttttgatggtcgtgctcatgacaattaaggaccggttcacgattttcggttgtgaaacatttaccgtgccaaccacaagccagcgtgggcaacggctttactttctgtatagtatggttcatagcagagcaccagactgtgaagtggcagagataagcccacgggggtcgctgaggagtccatgccttgtttataagggggtgattatgatctgggaatggtgcaccgctttgaattgtattatatagagggtattgtcacaatctctattcgggaacttgttaagtatcgcgacgcatggttgacatgatgttgaggttgtgtcttgtgggtacagtggtacacctctggccagagtttaaactattcgaatagccgtgcccgcggtaatgggcgggtctaacaatgtctttcgtgattagtctcatatttcacaccataataattgatgatgttaataatttgtttagctcctggtttggaatggtacattcctggtttggagatagaactgtgcagccgagattggttgtttagaatggttgggcctatgcaacagggtatgttgtatagcattggattaatactgtttaattaaatactttactgttttattaaattctgaaatatttattaaatgctatttatgcaaatgagactatactatgccaccctttgttatcctgtgcacttgcatatttgctgcgtggcttgctgagtatgtcatatactcaccttgtaatcattcatcagagaaggagatctacagtgatgctgatggtgtggaggattaggtgtacccctggtcaagctgcctgtggagtgtagtcgtctgcgccgtttatcttatttttccgctgcttagatctttattggttgagaggaactatctacctctgtaatgacattttattcgcttattaattagagtaataattgtactctattatcaatttgttattgtgtgcctcggctgattcctagacgagggtttacacacatgtaagcgtttggaattttggatagaaattccgggtgtgacaggtcactaccttatcgcttaaataagcgaatgcaaaagactcggaaatgagattgaccccgacagttggactatagaggataccgacatcgttcccttccatatggcaaggaatgattcggggagcggtatttatccaaattacttcggattaaagctctgcctcccttagtcattcatcgctcattatggatgttaac

SEQ ID NO: 20166 - DNA, 17327 bp, Oryza sativa
tatcaagacaagaaattttgaaacatgagttctcatactccaaaactggggggcatgtgttaacagtgaaatttggtaagcccaaagttaccattggcttagagtcagtatcgacttcaaagttctagaattagccgatgggagtcaagtcgccatgatgtcgtgttcttggtggagttggatcaatcagagttggggtcatcggcccttggttgaacaggaaggagttgatggtgttggaccagaaataggtggcagcggccatcaagtgttcatctttggccgaattagctatggtgagagcgagggcttggccaattccaattttgtcccaatgggtgtcacgcccagaaattcccgaatagaattccaagcagaatgtgcattaaaatccccgtccaggaccggccggggtacacaaacgacaatgttgacattcagatccacgtcttacaaacatcataaaagtcttacataaatgcagcggaaaaacgaaacataacaggagctaagccttgacttgaactgcagcgggaacaccactccacaggcatcctcgatggcacggacgaagcctactccccggagaaaccaccatctgacacatactcatactctggggttggggaaaatagagcaagactgagtactacccactgtactcagcaagtcataccggaataggggtatgatgcagggaattatcaaaggagagatagagcggtgaaactaatcacggtgaatctggttgaccgcccataaccgcgggcacggctattcgaatagttttactctgatcagaggtgtacaactgtacccacaagacacagccccacgacacgtttccgtgcgccgacatgccaccacggcataccggaaagaggccgtgataggacccttcgcataacctcctctaaccaagcacaccacacttcaggtttcacccccactcctcgcaaggcagcgggcagtcccctctcgtgcctaggtgaatccggaagcgacagaggccgtcgcagggcccgccccgttccatcacacccacccttgcctggatgcgtcagctagaggaaagctacactacaagcccagccgttgcccacgctggcttgtggtaagtacgataagttcttccagggcatccggcgaaccggtccttaactgccatgggtgcggccaacaaaacaatgcacccatagcccaccatgtgattcattttaattattcaacaccaaagaggtggtactaatccaacattaccattagaacctgcagtctatactttaataggatttttccccaatgtgtgctagttgaactaagcatggctaagcaattcctagtccaaagtctattcatgttataacccaagctaacaaaggaacatggtaccaaaatagcatggctgtaacaataggtaaacatcccatagtaacattataaaacaatgcagtatttgaagaaaaacaataaagcatttgcaatataggatcaacatgttcaagtgacaggcatgacttgccttgctctgctgctggaggaacctcggcgactatctcgaagtacaccggagcggggatgaaggtggtggcgacgacccggcaacgaggaggggcggacgggtggcggcggcacctaaggagggagaggagaggggttaggggattggaggaaacccgcggcgacaaaaatggccggccggagttgaagggaatggaggggctcaccgacgtgcgaggaaaccggagctcccgaggggttcgggcgatgtgaggcggtgaccgaggtgctccaagcggcggcgaagctaacggcggcggcggcttggcgcggtggcggctctagcggcggcggcgcgcagttggaggcggcagcgaacggcggtgcggcggcgagcggcgcgagctcggtagcagtcacgggatggagcggcgagagcgtaaaggggaataggagggcacggggaacgttttataggcggagggggaggcggacgtggccggcaggacctccgattttgccggcgacatggggaggagagagaggaaatgggggggattcaaattgcgaatcccgccccttttcaggcgcacgcgcgggccgggagacgcggggagagggcggcgtcacggggaagacgcgtgggcgacgcggcgtgggcacgggatgagcggcggaggtgggcgcggtggtttcggcggcggttgccgacgtggggcgggcggccggaggaaggggacgacaccgacaggtggggcccacctgtcggcgtcccgaggagagagggaggggcggcttgtgccggcccacaaggaggagggtgcgcgcggcggtagggtggactgggccgacggcccaagaagaggaaaaggagggaaaataaaaagaaaaggaggaaaagattttccctggtatttaaagattgcactttgcttattttaattggttaaaattatttcgagagctctgaaaattccactaaaaatcttgttaatgtattggagcatggggaactcaagaaaaattccaccatgccgaatttggttattaaaagcatttattaattaaggattcaactctaggttaattcaacaatttctttaggagatttattaaacaaattttaaagctggaaaggggaacttcagggcgtgacaaacctaccccccttaaacggaatctcgaccccgagatttggaagagctggcgaagaggtgcggatgggcggcctttaactcatcttctctttcccaggtggcctcttcttctgagtgatgactccactgaaccttgcaaaatctgattactttgtttctggtccttctctcgctggtttcgaggatacgagtcggcttctccacatacgtcaagtcttcttggatttcgatttgatccggacttgcctgttcctcaggaactctcaaacatttcttcaactgagagacgtggaacacactgtggatgccaagcatgttggagggaagctcaagctggtaagcaacttcacctcttcgttccaagattttgtatggtcccacgaagcgtggtgtcaacttgcctttcgtctgaaaacggtgcactccccggagcggagtaacacgaaggtacacatagtcccctgcttcaaacgtgagctctcgtcggtggttgtccgcgtagcttttctgtcgagactgggcaatcctcagcctttctctgacagttctgactttttcctctgcctcggttagcacctctgtcccgaacagttggcgttctccagtttgatcccagaagagcggagtgcggcacttccgtccatacaatgcttcaaacggtgccatttgcaaactggcctgatagctgttattgtaagagaattcagcatacggtagacttttatcccaagctccgccaaagtcaagtgcataggctcgcaacatatcttccaatatttgattgactcgctcagtctgaccatcagtttgcggatgataggctgtgctgaaattcaaacgagtccccaattcttcttgcaacttctgccaaaattttgaagtgaactgactccctcgatcagatactatcttcttaggtaccccaagcaaacacatgattcttgaaaggtaaagctctgccaaccttttcctagtataggtagtgtgcactggaatgaaatgagcaactttggtgagtcgatccacgactacccagattgaatcgtggccagatgatgtcctgggcagaccggttatgaagtccattctaatctcttcccatttccattccgggatctgaagaggttgtagcaaacctgctggcctctgatgttctgccttaactcgctagcaaacatcgcagagtgtgaaaaattcagctatttctctcctcatgctgacccaccagaatttttctttgaggtcttggtacattttggtgctgcctggatgaatggagtactaagtctgatgagcctcggtgagtatcagatcctttagttccttgtcgtcaggtacgcacaatctttctcccaaccagattgtgccatgctcatcctcatgaaaatctcgggcttttccaaccctcatattcttcttgagctcagctatttcaggatcatttacttgagccgctctgacttgatccacaagcgtaggccgtgcttccagagcggctacgaactcgtgttcaatgactcccacattgagatgttcaagctcctgctgcaattcttcacacatgccctcgatgcatagggcattgcagtagcttttcttgcttagcgcatctgccaccacattggctttacccgggtggtagtgaatgctcatgtcatagtctttgattagttccaaccatcttcgttgtcggagatttaggtccggttgggtgaagatgtatttcagactcttgtggtccgtatatacttcgcagcggttgctaatcagatagtgcctccagatcttcaaagcatgaaccactgctgccaattccaggtcatgagttggataattcccttcatgtggacgcaactgccgcgaggcatatgcgaccactctaccttcctgcattagaacacatccaagcccgtggcgggatgcatcgcaatagacctggaagtctttcatctggtcgtgcagaatcaaaactggtgtggatactaatttctttttgagctcctcaaaactcttgtcgcactcagctgtccatttaaacttctcatctttcttaagcaactgactgagtcatgggtcgggcgatcctggagaagttttcaatgaatcggcggtaataacccgcaagtccaagaaagctccgaatctgcgacacggtcttcggtggggtccatttggtaactgactccacgttcgatgggtcaactgccacgccctgagctgtaataacgtgacccagaaatttaacttccaacaaccagaagtcacacttgctgaacttggcatataactggtgctccctcaacttctcgagtaccagacggagatgttgttcatgttcttcttcggactttgaatagataagtatgtcgtcgatgaacaccacaacaaacttgtcgagaaattccatgaacactttgttcatcagattcatgaagaacgcgggtgcgttggtaagtccgaaagacataaccgtgcactcatatagcccttaccgagtggtgaaggccgtctttggaatatcctcttcccgaattctcaactggtagtagcctgatcgcaggtctatcttagaaaacactttagctcctttcagctgatcaaacaaatcgtctatccgaggtaagggatatttgtttttgattgtgacctcattgagtgcgcgatagtcgacacacattctcttcgtcttgtctttcttctccacaaaaatgaccggagcaccctaaggtgaagtacttggtcgaatgtaccctttctgcagctgctcatcaacttgcttcttgacctctgctagctcgttggccgccattctgtacggtctcttgtaaataggggcagttcctggtgccaaatcaatctggaattcaatttctctcttgggtgacatggtagtgaggtcttcggggaacacttctgggtactcgcagactatggggatatcctccaatttccgcgaattcttctcctcgatgaccactgggatttccacctcaatctgattcaaagagaccccttgctttggtgagactagtgatttgtacactactgtttctcccttctcgttggtcaaggtgactgtgcggttcgcacaatcaatgactcccttgaacttggtcagccaatccatcccaagtatgacatctaggtccttggattccagaagaatgaggttggctagaaatggtgatctttggatttctattgttatagaagggctgaattgtaccgaagtggagctattccctggggtatgaacccgcattggtgtgctaagttcctctcttattaacccatgcatcccgacaaacttctttgaaatgaacgaatgtgttgcaccagaatcaaaaagtactgttgcagggattgacttaacaggaaacgtaccccgtacgacctcttgtgctgcttgcgcctcctctgtggacgcgtggttgacatgggcctggacaaaccttggcccggcacgcctaggcttcgggcatttgtcagcgaagtggccaagctcgccacagttgaagcagggtcccggctttcctccggactccttcttgagctgttctaactgagccagcatagctggtagatctgactgggctggtgccattaatgggggtggagtcgagttgtggttgtgctgcttactgttgttgtgactgccaccgttgtagtcattgttgaagttactcgggtgatagggatggtgctgacagacgatcagggtggaaggcccacctagctgtcccaccatgaagcgaggctagaaattcataatcgccatgggcacaactagcaaaaccgtgcacccacagcccaccatgtagtgtgttttaattaactaacaccattacggtggcattaatccaaagctataccaataatcaaagtctatgtattaatgtggttccccatttgtgtaccctggctggtcctggacaggggtttaatacacattcaccttagaaattctggttcgtgaatttctgggcgtgacaatgggtctgcttgctagccgatatgcgcttgtaccacgtggtccagcttttctctggggaggttttctcaagggatggccaagacttgaaggtgtttttccaatgacctaaattagggttggctagtctgaaagggattctgttggtttcaccaatgatgaactcagtgggatcaggattgccgattggaccaagaaagtaatggttctcgtgagataggcttgggactgcaatcagattggaaaggtgctacgaatccaaaagaacagagaagcggagatcttgctagagtaggagtcgcttgggaatcgcttcatgcaccgaggggatcgacggagagagagaggacggagtttgctttggcggtgaaaacggaggaaacggtgtgaggtttctcggggacaatggttagtatttaaagcgctggaataacagtcggaaaacggcaagtgcgatattctctcggaatcgatgtatggaaaatccgaaacattatccaatattccagacttggggggcatgtgttaacgaccaaatttggtaattcaagggtcggatgtgaagaaggaatcgaaatggaggtcgagatagagattgtcccggaaacagagtaaggatcggctgaggtccgaatcggctatgactaagatcgacagagtttgagtcggacaaggttagccgattgagccgagcccgacagtatgacacggcgtatgttgtcggtttaggttgacgtgcttcatgatgattgccacgcatggataaagtcctgagaaggcaattgtatctattaattaggatattttatgtaatttccttagagatatgtttgggcaaaagtctgccgcaaagacttatggtatctcagagtttgttagagataagagtcgtgtccgagatagacatatcttgtaattctcgggtataaatagacccgagcctcatgtaataaaaaaaacaaacgttcaacacaatctcggcgcatcgccaccctttttactttcgttttgtttcgacgagttcttgctttcgggttaagctacatcggtttcgatcttcaacaagaggtaaaacatgttatggcggcttgtgttctcgggattagtgcttccatcttcatgatactttaatcttgtttatgtaattcatcgaattatcatatatcttatataatctccggcaatatcattatttaatctacaatcggctaccatctgttagtagaaagcagccgattaggttaaatcccgatgttggcttagattatatagggtatctaccactctatgacgcatccaacggcttgattgtctagatattgttcttcttttcatatttatagctgtatcagttgagtttgatcttatgagtcgtgattagaatctcaatctctagcctgtttttggttgccaattagagtagtatcggagtttcagccgatcttacctgatttagctacatttatcttatatgcttgattgacatgttaaatctgccctttatatcaagatcttgccgcttttaagtatattagacttttgtttggtatttttatttgctttgacgtcttagagtagtatcagagtattagccgatacatgctagatctatttgatcggctacgctatggacatatatagtctcattgttaatatatatttcgatctaagtgatttatactgtctcggcatgggaaccgatctatcccaatcacttgatttaagtatatgtcgacatcaggattatatattgttaatatctacaaccgatcgagtagatttagttcgttcttacttattcatgattgccgatcgattcacatatgacatcggcccaaagataaatgatatgtcatcggcacctagccgatgactatcgtttatagatttaactgcggtttctttgtttttgcttcttgttgattccaggatcaaatcaactggcacactcatacacccaaaggcaagttttggacctgcactggagttaagcagatctcccaggcctcgtgtttttacatcaagcttatgcctatgaagtttactagctttgggtttttctttgcactttcaaataaggttgtaatagtttggatctttaaagcattaatagttgtataattagtttgtatgaacaaatttgtataattaatcgaaagttgttctgtatatcaatctgtgcgtgatcgaaatcctggacgatcacgagtggatttttggggcaccaaacctaaattgggtgtcccaacagtactcatccataggggtagccttgcttaaattccgaaagtcaatacaaaccctaagcttgccattctttcttgatgactagaactatattggaaaccaactcagcatatcggcatggccgaataaagccagcatcatacaaacgagtaatttcagctttgatagcatcatatatatcggctttgcatctcctgggtggttgttggtatggccaatatcctggttgataggaagccgatgttcaataatcgatcggctgtgcccgggcatttcaaaatattccccagcaaagcaatctctatattctttcaaaagctctattaacttggttttgaattccgcggataaattcttactgataaatgtcgaccttggtctatcccctagacctatatcaacttcttccaaatcatcagccgacatgaaaccctgtcctaacttgccatcgagatcatctaatgtgcctttggtgtagaaatttgaaccctccacgacaccctcaaagtaacaatttaggctctccatcttcaattggttgtatatcacaatcaaacacttttaaataacctccttcccaaacttttccagacagtcagtcaaatccatccatcccccaaatagctaaatcggcactagcaacattaactgacctgtcggctggtgcgatctgtatcttgtcaccttgccattgaattaaacaatggtgcatggtagaagaaatacaacaattcacatgaatccaatcccttccaagcaacagactataggaacccttcccatcgatgacaaaaaacgtagtaggaatagttttgctgccgattgtcaactccacgtttaatactcctttccgaaggattgccaccaaaatctttaagaaccatattagtcgtgatgaggtcatctgcattcttacccaatttcctgaatgtagcatatggcatcagattcatagcagccccaccatcaaccattatctttggacatcggcatcccattgacaaatccataaacgtacaatggcttgatatgccgattttctgtcccctctggtttctcaaaaattgcttgttctcgtgacaaaatcaacttagcagaagcttcttccatatcatcagcatcggcttgattagtgtcgcgaccgagaaaatttgcattttcccgaacgctagtgtattaatccccttcccaggaaaagccagggtacaccacacaaacatgatacaaaaggcacatctttattatatcgataatatttatattattacaaaggcacttaaggcctgacaatcaaaaataaacagcagcggactagcgggcctacggctccatcttcacaggcgctcaactggggtataagccaggactccacctaagacttcttctccaaagcttctcttactgaagggggagaaagatagagcaagaatgagtacaaccacagtactcagcaagccacaccagcagatgcatgattaatgcaagggggtacaaagggtaataatataggggttaagttttgcagtaaacagcatttaaaagacacttagttggccaaagtcattttataaagacgatcctagagctacacagtgttattaatcaaggccgtgaaccctcacgaacctgccttaacccaaggcctacgatgattcagaccgaactggcaacccgaccctgggtcccagctcgtcccaagccaacccaggccaaccattccacatttcagttgttaagcaggttttaagaattaaaacactaacttgggtacattgctaggcttgcccataaccgagggcgcggctattcgaataggttatactctgatcagaggtgtacagctttacccacaagacacatcttcctcacgtgtaaccacgtgccacataccaccacggcatacggacgaaagacgtgacatagttcccaacccatcctagccataaacaagagtatcgacccaaccccacctacggccggaacctccgggacaggcaggcaggattgagaccctagcagcaggacaccagccctgtgccatgacatctcgactaccgagccgcagctcgtgtagccttcatttgtcctagagatgtccatcgacccctgacttcgtccatctccatccgtgtacttttgtttataaccagactgagccacaaactaagccttacccactagacatgtggaagtacggtagtgctttgcaacagaggcccgagcttaatccttatagtgcccgaggtacgacaaacaaaacccaaccacgcacctcgagcccagcctaaaaccattttgggggttttgaatagaggtggaggtgtgaatccaatttccacaataatccaaccattccatagtgtccaagtgatgagaatattcccaatgtctagagttgtagaaccacctaatgttgcctaattaaccagcgaagcatctacctaaattcatactaggggaaccttgagtagagtgcccactagttggggtttggtttattctagggtgaacaaggtaataataacaatagcaataataatatggtcataacaaaggtaaataggcatggctaaataaaacagtgataacgcgggaatttaagtaaagcgataatgcaataatttaaatcaaagtaatttcataaattgggattcaatatgttcaaggatgatgtgccttgccttgctcgctttcccaaacgtcggcttcaacatccacgaagagcggatcttccgaagctgcagcgtctacacgaccaacggaaaagaaaaaggcttttactctaataaactccatataatgagcaggaacaaagcacaaatatgggttcttgacttcttaaggaaaaattagagacttgaacggtccaattccgagttcaaatgaccaggttatggccatttgaagtttatatgctctttaaatgaatatttgcgaatttcttcatttaaattttaatttaaaaagggtttattgcgtcagcccagggggagggggcgcgcggaccgggtccacgggagtggggcccacgcggcagcctcacggtccacggtggaccgggtgcacccgggctcacaccggccggcgccatgagccacacacgtcagccgcacccgagggcgcaggcggctgacggccgggccccacgcggcagccactcggcacgcccgagggcggccatgccggcgcggttggcgggaggcggcgcgcccgagccccgatggtcgccgccggcaaccaccggcgcggcggagcggcggccgagagatgggagggaagggggaaacgaggcggcggtccacggctcaccccagggcgacggcggcgacggaggaggtggtcggagcggagggaggcggtggcgcggctcgggtcaacggggacggcggcgctccggtggtcggcgaccgaaacggagaggcggacgaggtcggcgaggatgcggcgaagccgaaggaggcggcgccgaggtgggaggcggtccagggcgacgacggcggcggaccggagctcggcggcgacggccgagacagagagcgacgtcgcgagctcgaatccgacgaggaggaagggcggctgtcacagccagattttcgttttaggatttataaattatctaataaattattaatagaatttatattaaatgttcattaatttacaagtgaagttaaatgtgggaaataaaatttcctaaatttaaagcattgatggatttaatttttattaaattctccatgattaattatactctctgaaattttgttggatttttcagagctcaattcctaaatgatacaaagaagagttcagtaattatttaatcattaatgatctaattataattatgttaagtgcttttcttgtttaaaaatccttaatttataatttgttgtctaaaagggaattattagaaatgatcttaaaagcctagaagacaagatctaattttaatttgttaaatctcaatataaaagtgggctagataaaattttgttaaatacttctcttgtttctatagttcctagatttttctgggatttatttgagccaaggaagtatttttaataaatggaaatgcatttcatgaataatttaaatggaaaaatgtttttaaaagtcccttttggttttgggccgaaagccggcccaaaccgctctctctctctctctacctcggcccaagtcggcccaagccgagccgcccacgcgcgcgtgcgaccgccgctgacaggtgggtcccacccgtcagtcgtcgtcttcctctcgccgaaaccctagccgagctgcgccgccgccgccattccaaattcggccgcgcctttccttctccgatgaaatcgtttgaggggaaatgtttcccgagatcttctctaccttttcctttttggaaacatcgtctaaatcgctttggaaatcgccggatttgagttcgattcggatcgatttctctcctccgaaccctaaaccttccttcccgtcgccggtcgccgtgggccttcgccgccgctccctagcccctataaattgacccccgagctcccctctaaccgccaccaccctcgccttagtctctcgtcgccggtagagccctagcgccgtgccgctttgcgccgccgtcgccgccgtcgctccagcagtgcgccaccgtcgcttgggtcgtcgtcactgctcggggaggccgccgtcgtgatcaccgtctcgttgccgtcctagtccgccccttcgccgtcgctatcgaccgccggagcaccgtcgacgtcgtcaagccgaagaccgccgccgcttcaacctcgccgccgtcgtcgtcagtcgtcatttgccgtcgtccaagtgctcggtgagttcgccgcgtcatcctctacgcgtaggtgtcctctgtttgcgccgccgcgccgtcgttcgccggcgagcacgcgaggccgagccgtcaccggtgatgacgtcatcgccgacgtcatcgttgccgtccgccgtggtccggtcgtggaccgatggatcttggccgtccgttttggatggatgaatctcggccgtctaatcttatgaaccgccgccgtgcaaccggtccaccgcgaaccctagctgatgacgcaataattcccttttccttttcaaaaataattcattattgcgtcataattcaattaaaatccatataaatgctttaatccggtttaatctttaaaaattcataactaattctttgtaactcagtttaatgtggttcaagttgcaaaagttgtataaaataaagacctacatattaaaattatccataaattgaattaaatttatttaatcctttttaaatgggctttaattagatttaatcttgtaaaattcgtaataaattcatttgaagtcagaatgaggccgttcaagtctcataattcatctaaaattattatctacatgtttgtttactttttatgtattgtttatttggtttttattagtctttttcctcgttttgcgtgttagcttgtcgtttccgtcgtttcgaaagttcacgagtgcgccggaagtgttcaagaagattaattgaagaccctttattgcaaggcaagtcacacagatcccaaacaccgttcctttgagcatgttgatcctatatttaaattctctatttatttcaactgtgcatttattttcgaatgtcactgggtggtgtgaatctattcctttgttgtggcctatttgcattggttactctattctttgataccttgggatattataatttgactagttgagctttatatatattggttcagctagatgttagacataattgcttagccatgcttagaaacattagcacaccattaggataactaatgtttcactattacttaatgatggatatttaattgtagctcacgatggtcaatcgtgattggttaattaattaatgtgccaactaaaacttgataatggtgggttgtgagcacatggttttgatggtcgtgctcatgacaattaaggaccggttcacgattttcggttgtgaaacattaaccgtgccaaccacaagccagaatgggcaacggctggacactttgtataacaaggctcattgcggagcaccagactgagaagtggcggagataagcccacgggggtcgctagggagtccatgccttgtttataagggggtgactatgatccgggaacggtgcactgctttgagttgagttatgcgaggggtcttgtcacaatcactcaacatggtgacgtgtctgcgcggacacgataacatgctggtgggttgtgtcttgtgggtacagtggtacacctgtggccagagcaaaactattcgaatagccgtgccctcagtcatgggcgggtctaacaatgtctttcgtgattagtctcacacttctcaccataataaatgatgctataactggtaatattttgattagctcctggtttggaatggtatattcctggtttggagatagatctgtgcagccgggtatggttgcttcagaatggttgggcctgtgcagcatgggtgtgctgttcagtgttgattaatattgatgattaattactctattgttttacaattctcaactgtttgctaaatgctgcttttgcaaatgagccctatattatgccatcctttggtatccttgtgcacttgcatatttgctgtgtggcttgctgagtatgtcatatgctcaccttgcaataatcaatcaaacctcagttgaagacaagttgcgaaggagaagacgtttggcttataccccagttgagctgcctgtgggagtggagctgaagccatcgctagaccgttattccgctgctgttttcttttcttttgtaagtatgtaacgttattattatgatggatttttatattaaattgtcagtttgtgtacctaggctgattcctggacgaggattttatgcacaaataagttcggaaattactagtgaatttctgggcgtgacagcggcgagaggcggaaacggacgggggaggcacggggagggtttaaatagggttggaagggggagagggcggccagaggggaaggaaaccggcgcgggaggtccggccgccatcaatggcgccggcgggattaggggaggggtttccaaacgaatccaagggagagagggagggaaaatttggggaaagggagagggaatcacggggaataattcccccctattgattgcacgcggggacgacgggatgcggcggattcggcggcggcggcggcgcttggcgcgggcggagcggagggagcggcgggaggtcggggatgacgggtgggccccacacgtcagcaagggtggcgggcgggcccaaagggaggagggggattatttttagctttttctttttaataaactttgataattgttgttgttgcttaataaatatttttggtactctgaaaattcaagtaaaatttgagggctccttttagaccaaggagaatttaacaaaaattctccgggctacattcgaaattttcttgtacgtattttagtgtttgccaatttcttttcgaattttaattaattctattattccttttagggaatgttttttatttcgggatgaatttatcagaacgtgacaaatccacccctcttacaggaatctcatccccgagattcgaggctagcaagaagataggttgggcggtcttctcttcttgtctgacttcatccgtcgcgtcttctataacaaacttgcctagcaaaacttctccactctggactgcttggcttgatctcctgttgcagatggaatcttctcttcacctgacttgtccctagttgaacctttagctgacttcaactgggtgcggcacttgaagatggggcttcagttccagaacttcttataattcatatctttggcgtcaacctcatacaagttacccacttcacgttatgcgtcgatatcagcttgtcattactaggataccatgcttgtcatcatgagaatatcatgtttgtcatttacttctaacttgccaccaactgcctcatattagctttcctgctctccaggtgctagatactactgctattcgatgcgagggtcgataacttttgcctttgaattatgtttctcaacagaaccaacttatcccacttgacatgctttgacgtcttcccaaatggctttactgctggacttcttattgtctgatcgttatcctgccaaatctgaagcttcgttgttagatgtgattttattctgacctctgtagactatcttcgaacatatcacttggttcataactgggaatagctcccacgaacaagcagctcggattcactttctttacatttagtttacttcccactattatcttcaggttgtcattatttagcattcaacgtattcctttacacctttgaccttgatgagttccttcccattggatcatctccca

SEQ ID NO: 20167 - DNA, 2721 bp, Oryza sativa
aagatgcttatcatcggtacattgtttctactatgggttctaattaacacgaggcctcacgggtacggcgtttgctccagtgaccacaatacgattgggatgtctgcttcgtgtaaattggcggtaatgtggaggtcgactttgccttggttgcaggcagtcccttgagtaatgcccgggttctttgcaattatagcaaatcaacgtcttctttgctgagctatccgtctggggacgatcattctgacttggagttggaattggtggttggaaatccttgctaacattggcatcagtggtaccatagttgctatcaccattggagtctttctcagagtcacaattgctagggttgtcattctgggtgccatcattgatactatcgtcgacaccttggtgaatgatgttgacattgcacgcttgattcgagtggtcactaatggggcaagaagcatggttgttggtggtatcatcatcattagtattgctaatgttgttgtctgcattgtgtccatcttcttggggcagaaactcttgatgcgcaacagaagatccggtgatctgaagtggctcggtgcgctgtctttggttaccacatggaaatactgggatgctaacaatccttctcttgcagttcttcatccgattatgctcactttcgagttgtatggctttgtccacaagtttctcaaaatcttcatattcctctagtagtagttgcactgcgatctcatcctttaacccgtggagaaacttctcttgtttgtcttcatccgtttccacatcttctggtgcatagtgagccaaacaatagaactcgtgcaggtactctgtgacggtcaaatcttcttgcttcaggtagcggaactctcgttttctctgtgtgatcattcctacgggaacatgtgatctcttgaacacggctgaaaactcatcccaggtgatggtatgtccttctggccgtgatgcttcatagctatcccaccattctgaagctggtcgaaccaactgatgagttgcgaagacaacccgctcctggtctgtgcactgaatcaaccctagcttcttctcgactgtgcgcaaccaatcacaagcttccataggatcgacggcaatggcaaaggttggaggatcagttttgaggaattctgataacttgcactgtcgctggactgtaggtacttgaacgttggttgcccctgctgggttcttccgattttgtaatagttgaaatgctgttgccaacatgttggtttggttaaccacaatttggattagctctggtgaggtttcgttgatgcttttctcattcccattggcttgggttcttgagtcatcagatccatcattcccatagcctttgttaccagtgttatccatctgtcacaaggtagaggttgagagaggaagcatacaaggaaagaatagaccggaactagggacaggaccttaaaggaactaactctttttgttgatgtgttgtttgttttgcttattctgcaagttgattaagcaaacaacctagcatggttacatcacaacccaccgatgcaaaccacgcgctacacacacaagcaaggaaacacacgactaacaacactaccctagaggacggcctaggttctgcgactggttcccaagatcttcactgcttcttccacttcgctagcggatcctgcggtcttccggagctttggcaaacaattggcgacatctttttcttcgcaaagctgaccatctagtactagtcgaaaatccgaaggaggaagaagagaataaacattttgcaaatagcattagggaaaggaggaaaaaggaactttcgcaaatagtttcatttataaaatatgtccttaggttttatccacttggcttatcgtacagtcgagatggctctgataccagcttgtcgcgaccgagaaaatttgcattttcccgaacgctagtgtattaattcccgtcccaggaaaagccggggtacactacacaaacatgatacaaaaggcacatctttattatatcgataatatttatattactacaaaggcacttaaggcctgacaatcaaaaataaacagcagcggactagcgggcctacggctccatcttcagaggcgcttaactggggtataagccaggactccacctaagacttcttctccaaagcttctcttactgaagggggggaaagatagagcaagaatgagtacaaccacagtactcagcaagccacaccagcagatgcatgattaatgcaagggggtacaaagggtaataatataggggttaagttttgcagtaaacagcatttaaaagacacttagttgcccaaagccattttataaagacgatcctagagctacacagtgttattaatcaaggccgtgaaccctcacgaacctgccttaacccaaggcctacgatgattcagaccgaactggcaacccgaccctgggtcccagctcgtcccaagccaacccaggccaaccattccacatttcagttgttaagcaggttttaagaattaaaacactaacttgggtacattgctaggcttgcccataaccgagggcgcggctattcgaataggttatactctgatcagaggtgtacagctttacccacaagacacatcttcctcacgtgtaaccacgtgccacataccaccacggcatacggacgaaagacgtgacatagttcccaacccatcctagccataaa

SEQ ID NO: 20168 - DNA, 5842 bp, Oryza sativa
tcctagagatgtccatcgacccccgacttcgtccatctccatccgtgtacttttgtttataaccagactgagccacaaactaagccttacccactagacatgtggaagtacggtagtgctttgcaacagaggcccgagctcaatccttatagtacccgaggtacgacaaatgaaacccaaccacgcacctcgagcccagcctaaaaccattttgggggttttgaatagaggtggaggtgtgaatccaatttccacaataatccaaccattccatagtgtccatgtgatgagaatattcccaaagtctagagttgtaaaaccacctaatgttgcctatttaaccagcgaagcatctacctaaattcatacaaggggaaccttgagtagagtgcccactagttggggtttggtttattctagggtgaacaaggtaataataacaatagcaataataataaggtcataacaaaggtaaataggcatggctaaataaaacagtgataacgcgggaatttaagtaaagcgataatgcaataatttaaatcaaagtaatttcataaattgggattcaatatgttcaaggatgatgtgccttgccttgctcgctttcccaaacgtcggcttcaacctccacgaagagcggatcttccgaagctgcagcgtctacacgaccaacggaaaagaaaaatgcttttattctaataaactccatataacgagcaggaacaaagcacaaatatgggttcttgacttcttaaggaaaaattagagacttgaacggtccaattccgagttcaaatggccaggttatgtccatttgaagtttatatgctctttaaatgaatatttgcgaatttcttcatttaaattttaatttaaaaagggtttattgcgtcagtcgagggggagggggcacgcggaccgggtccacgggagtggggcccacgcggcagcctcacggtccacggtggaccgggtgcacccgggctcacaccggtcggcgccgtgggccccacacgtcagccgcacccgagggcgcgggcggctgacggccgggccacacgtggcagccactcggcgcgcccgagggtggccatgtcggcgcggttggcgggaggcggcgcgcccgcgccccgatggtcgccgccggcgaccaccggcgcagcggagcggcagccgagagaggggagggaagggggaaacgaggcggcggtccacggctcaccccggggcgacggcggcgacagaggaggcggccggagtggagggaggcggtggcgcggctcgggtcgacggggacagcagcgctccggcggtcagcgaccgaaacggacaggtggacgaggtcggcgaggatgcggcgaagccgaaggaggccggcgccgaggtgggaggcggtccggggcgatgacggcggcggaccggagctcggaggcgatggcggagagagagagtgacgtcgcgagctcgaatccggcgaggaggaagggtggcgagaggcggaaacggacaggggaggcacggggagggtttaaatagggttggaagggggagagggcggccggaggggaaggaaaccggcgcgggaggtccggccgccatcaatggcgtcggcgggattaggggaggggtttccaaatgaatcctagggagagagggagggaaaattgggggaaagggagagggaatcacggggaataattcccccctattgattgcatgcggggacgacgggatgcggcggattcggcggcggcggcggcgcttggcgcgggcagagcggagggagcggcgggaggtcggggatgacgggtgggccccacacgtcagcgagggtggcgggcgggcccgccagtcagcggcgcgcgcgcggggaggggccgagtgggccgcggggagtggagagagaggggaagggagatgggccgagggggaaggagggagggcggcccaagagagagagagggaaggaaaaagagagggaggagggaagggctttggccgcgggccgagagagagagagagggaggctttgggccagacttggcccatagggaggagggggattatttttagctttttctttttaataaactttgataattgttgttgttgcttaataaatatttttggtgctctgaaaattcaagtaaaatttgagggctccttttagaccaaggagaatttaacaaaaattctctgggctacattcgaaattttgttgtacgtattttagtatttgccaatttcttttcgaattttaattaattctattattccttttagggaatgatttttatttcgggatgaatttatcaggacgtgacaattagcttcatattccgtaggtagcaaaaaaaccatgtttaccgataaagatgtaacagctttgcccttgattaacctctttgctttgtcggcttcaacctcatcggctgtcataactttactcttaacacgccattctttctttgccttcttcagctgatggttgttctcttgctgtacctcctaaaaacgttccctgtttctcatcctctgaacccttctcttctgattcttactaaaaataccagaagggcaccattgcgaattcatgtcttcatcttcgtcctgaaggtgatcctggtgtactgagcccaatctctgatgaataggcaaccttttctgacccagccgatcttctatcaatggcaatctcatcccttcattccaacaaaacctgaaaaacttgcagtcccaatgcagatcaaaaccaccatcatcttcaaaatatctttcctcctgcttgtcatgcctcctttgatactagttaataatcttaaccgagttaagctgtgaacttcaatgatttcccccatcggctgctctcccggaagtgtgaaccatgttaacaagaaaagggtgaccatccaccttcatcgatcttctcgaatcattaaactttatttttccttgttcaatagccgattggatctgctgcataaaatctttgcaatcattagtagtctgagatccggtgttgtgccacttgcaatatttcctctttcgcagctcctcaaccgatggaattatatggccagcaggaagttggatttgcttctcccgaagtagtagatcaaatatcttgtcagctttggtgatatcaaaatcatatctctcgtcttttccagaaatcttcacccactaacatgtcacaaccttcttgttccttgcccattcggctgctgctactttggaatcatcatcttcctcggactcagaggcgtaaggatatacatgattaaccttcttggagttcttcttagcttctgcaaacctttgctcatgcaatgttaccttttgagcatggtgagccaaactctcaaaatcctgagccaaaaatctttctttaattggagaaattaaaccttagaaagcaagatcggcaaactgagaatctgccaaagccaagctgtaacacctgttccgcatatccctgaatcttagaatgtaatcttgtacaatttcatcatgtctttgcttaactgctgttaaatcagatatcttcatctcatgattcccactgtaaaaataactatgaaactgcttatccagatcagcccaactctgaacagaattatagggtaatgaagaaaaccatgtgaatgccaatccagataaagacaagggaaataatctaactctcaaagcatcaatagccaatgcttcaccacactggtccaaaaatcggctgacatgcttgtaagttggtacattatcctgccctgagaacttttaaaagtctggaactttgtatcggtttggcaatggaacgctctcaaaatactctaggtatggatgccgatacaaattactagtatcctttggtttaagaccaaactgctccctcatcacatctgcaatcatatcaacccaaggcttttgctgaggtgctcctggcagttggtgctgaatttgatcaaattgattatactagggcaaaagctgaggttgaggtgatccccctggttgatactgaacttgaagtgaatgaggttgatattgaaagttcaggttaccaccaggataattctgaggtaccaatcggctgatgctgttgaataataggtgtctgctgcccgattggtatctgctgaattagttcaacaaccggttgagttggcttgaacattgctgcaatctgctcttgagtcagacgatgaatattcctccctgcatgctgaggctgttgtctgctcaagagataagggtcaaccggttgcttttgtgctgatgatgatgcacccggtctcccaacagctgaggttgatgccatcgggtgctctggggctacaccagaagtaggctgttgcttgccagtcaacaaattcctatatggtggaaacacaccctcaggaaggaaagccggtcctttagcttgatgttcagcaattgtaccatcaaccgcagacttgatcatatttattaaagtgttgactaatactcctgactagttaatcaatgcattgtagacagcatagtcaaactgatcttgcaaattcttgatctcttgagaatcttccccttctgatttgtcgtccttgggttcatcatccttggctttatcacctttagttttaccatctttagacgtgcatgagtccgaatcatcattgggaaccacctttagtttatacctctgaataactatgcccgaacgagtctgcttgaatgaatgcaagtattgattcttcaaattgttcatcatctgctcgtactctagcatctattctggtgtcagcttatccagtcttatcgggatgatgttttcggggccaacgtcagacagtggtttagcagtctgcttaatgtctatcatgatgaaaaaacgtcacaactcggtcccactgggtgtaccaaaagcgtgttgatgcgaaaaacacacactggcctaggagatctgcttaactccagtgtaggtcctaaatcttgctcttggattcaaaggcgtgctagttgatttgatcctgtaatcaacaagaaagaaaaacaaagaaaccaaggttaaatccataaacgatagccgatcggctaggggccgatgacataacgtcaaatattgagccgatgttattggcattggatcggcaataaagaatgaagcaatataaagttggatctactcgatcggctgttgatattaatgatatataatctttttctcgaaatatatttgagctaagtgattgggatagatcgaacagaaagtcgagacagtataaatcacttatacttaaaagtactttaagatgaagattatatatacatttatagcatagccgatcaaatagatctaacatgtatcggctaatactccgataccacttcatattaagatattaaaacagacaaaatatatcaaacaacaagcctaatatactttaatgcaacaagatcttaatataaagtgtagatttagcatatcaggtaagcatatagggaataaagtagctaaatcaggtaaaatcggctaaaaccccgatactatctctattgatgatcataaaacaagctagatattgtagttatgaatattacttaatagatcgaacccaaccgatgcagcaataagcataagaataaataaagatctaggcaagatgatgaaaacttctaaaagatggtagatatgctaactctatcggctactctccaaagataagtatcaaccgattgcaggttaggttgtgaaactgataaagattataaagcatatatgataacttgacgatttacataaacaagattagagtatcataaagatagaagcactaatccctcagaacgcaagccatcatga

SEQ ID NO: 20169 - DNA, 8126 bp, Oryza sativa
tagccgatcagctatcgtttatggatctaaccatggtttctttgtttttcttttttattgattgcatgattaaatcaactggcacgcctttgaacccaagagcaagatagaaacaatggaaacctgaaacatgccttcccgagcaaggaaacccgagacccgacaaaaacggagtctgacttggactctgccggtctgaccgaccctttctagaggaaaccggcagagcaccaaactttggaaattttccctatttcaatcctaggtgccatatttgggtgtaaacagcgtcttcttttgttcaaatgccaactcagcatatttacgatcaacttgatcaacagtaccaagggggtgtgcaacaacaaccactggccaatatgattgctgatgtgatgaggggacaatttggttccaagcctaaagacagtgggatcatgtatcggcatccttacccataatattttgacagagtttctttgccgaaccgatacaagattccggatttctcaaaattctcatggctgaataatgtcaccacctacaagcatatcagccgatttctagcacaatgtagtgaagcatcggctatagaggccttgagagttagattttttcccttgtcattggaatgcatactttcttaagatgttacaaggagaagggtttcagagaacaatcaatgagaatactttctgagtggctggcaagatgcttaaggagtgatacgactggtaattagattatcgctctaaaaccgcgtgctctatgtttttcggctctcaaaaatggccgaaaaggcaatgagcatgtgttaacacccaaatgtagcacctaggcacaaaataggaaaagatattcaaatttggaaaggacccggtttcctccaaagggcaggtctgactaccgccattggattggtcagtcagactagcggcatgtgtttggtgagaccaactaaatccaactccaagtctaattcatcaggtcttgggttttcctgcttgagccgaggttttttgagttctagttggtctctatcccgagtaatacatgaagaatgccctatggaaggcaagacaaacccctttataagggctacagtcaattcaattgagcacacaacttccaacacaactagctaattaaatcgtatgttttaatatcacatctgaattttgcctagttttgtccatcttcgttagtttgcattgaaagccctccatcctcgccgctagagtgtgaatcctcgttataggtgttttttcctatttcatctaacttataaaactgatcttggtttagatttgtgtagatcgtggtggttgccgactccgtatccctgcaaagcatcaggtgttatcatcatgattggcggcatgacgaaaaaagttgccaacagtgaccttaacaacggacacataagcaacaaattgaagagaagaaccaaaaaaaatacagaagcattggtgcactctatatataaaagttttgaagccaaagttttaatttgtgaatggttgcgagttgtgacaaactcacgtgaacgcccacgctttttgactttggcatgacacattttttccatctactaagtttttatacttaattatatacaaaattttatatgtccaattcagatccagaaacaaagtttgttaattatgtacaatctttgtattttaaagttttttacttacaaactttttgggacaatccatcatggtggccccaacgcacatcggccggaacgaacatggtccataatgtgcaacccatggcgtgcaaacgttctcccattagacatactcaattgaaaggaccacacaaaacttccatcatttcttaaacagtgatatgtttatcatggcttgcgatatggtatggcttgtatatatgttccaaaatttaccatgagcatttaggtaggcgtgacgatttgtgttatcatgttatcactaaggcatcccgaattcaccaaacgtgaccattttacttaccaggtaccaccacttattatttagtcgacaacttgatccgaatgaatggtcttctttattctttatgatactatatagtttaatttataaatacactagactaccaaagaaaactgtggccacaagtgatactaaaatacttgcacgcatatagaggtttggatagggctgaccctgaaaataagtccactgtttggaattaaccgtataaaactatcacactaaactgaattgaagttagaagtcaaggagtagctgagatgtccataccagcagcaacaagagttgacatagtaacatggttcagaccattacattttttaacgaatataaccattacattttgcaactataaatatatattgatcacttcatcaatgcatccatgattgaatttgtgacgtgtgtgctgttcagaacgtgtagggatagcaattattataccagatgggtgtcacaatttgtaaagttgcctcttggtttatgaattcaagaatcaagaatccttgatcagaagtcagaactcttcactgaacactcaagcatgcagcatgcttacaggggatgtgtttctggacaagtgtctgttggattaccataacaaaagagagagaaaataaaaccaacagcctaatttcattttttgaaaaaaaagatgtgagatgttatggaggaactttgcatctgttattgatagagggtaaaaatggtgagaaaaccaatgcacgccctggtagcgctcctacgggttatggcaccgttcttaatagcctaacttgttaacaagctgccaacagctcttatgtcaaagttcaataccttgagatatatcaagacaaaagagcttccatcttctcgcccaatcgtcctgcttctaataagatgcatcaagactgagaaaaaaaaaagataaacttgtaaagaacatcagagaaatgcttcgtatgaacatgtaaggttggatatgtaaaaaaatagtgaaatatatcataaacttacaccatagtattacttaggtccacgatcatgttgtttacacccaaatttgacacctatggacaaaataggggaaaattgccaaagtttgagaagtgtcgggtttccttcacagcgccggtcagaccacaagtatgtgggtggtctgaccggctggaagggccggtctgaccgcaggtatgtggccggtcagactgtcagggtccgagtccgagtctgtcagggtccgagtccgagtccgagtctgttttcgtcgggtctcgggtttccttgctcgggaaggcatgtttcgggtttcctttggtttctatcccgagttgggcatggagaagggcctgtagagggcaagaccaacccctgtttaagggacaaggccggttcatagtaaacccccgaatataatctacttgaatcgttcttttaccatgttttctattttaccctagttttagtccatttttgtcgatttacgctgtaaattgtctggcgttgctgcgagagtacgacacctctttgtaggtttatcctgaaaaccttctgttttgcccacgagacgggtagttatcctcatatcgatctaaatatgcctagaggctgattttgatctctaaatcggctccgctagccggtttagttgtttttctacaaaacccatcttgatttggccgtttggctagatcgagatggttggcgactccatgtcaccgcaaggcgtttaagtgttgtgatcgtgtttgtcgacttgtcacaaaaagttgacaacacgatttttggtgactccactggggaacgatctatacggccatattagggccgaattttgatttagtctagtcgtttcgtcgaatcatcaaattagtttcggctaaacagccgaaattaacctacactttgccgccgatattgattttgttttcgagcttaattgttctgttcggtcgcagctagacattaaaccttgtgcatacagggagcagcagccggcttagataagtcgtttccttttgcttcacagggcaacgtagaaaaagatcaggctatcaaagccgatctgctactgctcacataccgaaaaaaaaatcatgaaatattgatctatataccgagagacaagcggtagtacatagtagtttcggtctctatttcttgctgtgcagggtgaccgaaaaagaaaaaaaaatctcaaaagccgttgcagtgcatcggctgttattatggaacatcaatttccaaatatttgttagatacacacagtagcataccaaggaaatcaagaccgtatattaatttatttggtcaaatatttcggctatgagctgtatggccggatttaatcaaggaattccttcatcaattacgacgagcgggaacgaaatcgataaggttacattggaggatcttgatgagaagtaatgtcaagtcatggaggagtggatcaaggcggtcacacaggtgctgttgatgaaatcatgcattaggacccatcaaggtgtggttctcaagcctggtcctcttcccaaatacgtctttgatgataaggtaacctccaattcgcccgatccaagtcttgccattcgaaaacatattgatcgttgtgtagatgcatattttagtgcttattttgacaaaaatatggtagaagatgcttgtaaaacttattctgataagaaaattggctctaaaatagccagttatcaacaataccgtgctacttctacttttgcgtctacacaacatattcataatactatggatggatcaatgggtgttcacatagccgattccaaaggaaccagttatacaaaaagcttagccaatggtcagaccgcgcatcacgccggtcagactgcactctttgccggtcagaccgcgcccgccatagccggtcagaccgtgccctatctccgcaagatagtgcctcctatggccggtataaccgcatcattgaccaccagtcagaccgggccattggccggtcagaccaggtgcttggccggtcagactgggttatgcatagccggtcagaccagcaccctggaacctcttccagagttttgtcccatgactaatagcactgacttaaattgttatttgcctcatgttagtactggtagtcatgctattccacatacacatgctattgcactgataatatagcatgtatagccgaaccaagcgacggttcggattatgctaataatttgtgcaatggtgccataataagtatagccgaaccaaatgttggcttggattgttttactaagttagataataatgcaataaccaatatagccgaaccaagcgatgatttggattgtgttactagtttagacaataacaccattgagaatatagctgaactaaatgacggttcggattgtatcacaagcaaaagtagcggtaacaccccgattttcgttcaggattaaaaataattaaacaatgcatttctagaaattaaataaaaattaaagcaatttaatcatgtgaaattatagaggaaattaaaattttccttcaaaaatcattggccgagaatattttgtaatattctttgtgccctaaaatactctctgaaatttcccataaactttgggagctcaagaaataattttaacaatacaaagttcattttatcaattaaaataaaaagaaaacaaatttaattctccttccttgcccttgcgccattttcggcccggcgaccctacctgtcagctcctccttccaccttcggcctccagagccgaagcggccatgccgcccttttgtggcccacgtcgccgccgattccggctcctcccgcttgcgccctcgtgcccaaaccgcatgaaagcggttcctctccacctcatctacactctccccatgtttccccctaaaatcgcgcctagatcgagctccacttcgcccatgatgtcgtccatgtcgccggccgttgccacccgtttccacccctctctgccatgatttcctttcccgcgcccatataaagcatctcccagttctcctctaccgtttcccctcctcccccgagcttcccatcgcctccctcaccctccccacgccgtgatgtgcactagggtcctgatcttccgaaaggttctgataaacaacgatttgggcggagtcgcgacacaaatcgatccggcttcttgaacgcgcacgctcttgagccccgcaatcgcaacaccacgtctcctctggttatcacccctgtcgaaacgcggatgacctcgccgagaaggctaatccctgtttgccaatcgaagaacacaaacaagaacgagatagaaacaaccaaaattgcagatgaatgattaagctcacgagttggggtcttacaaactgatctagcggcgaaactgttctcgacagaataatctaagcaaaacccaaaaacctaaagatggtggcggtattgatatatagagtttaggatcgtgcaatcccctctcgatgcaaccctaatgggttccaacatgatacacggcacaaaggcccaaatacggtgacgcagcaccgggacagattctggacgtcaacttgttcggtcgattcccattgactcggaaagaatttggacatgagaccaaaaccattggaaaggttatctccttagctttctatccatataaagaacgccccaagccgagcatgtatgcaacctgggcgcctgttttagtgcagattggtcctggactccgaattgcacccgaggtcgaattggtttgggcctccaccttgacttggacgtcctcgatgatcctccatggctctaagtccttctccaagtgtcttcttgtcccctccattgttcctaatcacaatataatcattaggtaacaatctattctcgaattcatacaaagaagaacataggaacgagctcacctctaaattcaattgtcgcgcacgagctcttgttatcggtcctggaatgaccgttggaggattgttgtgtgtatctgaggtagtgatgtccgcatcatcctccccctcttgaattgaagtcgtccgcgactcaagctcatcctcttctcccaagtatggcttcaaatctagaatgttaaatgtgcgactaaccccaaactcgggaggcaactcaagtttatatgcattatcatgaatcttctcaacaattttaaaaggaccatcagcacaaggcatcaacttagactatctcaattccggaaatctatcctttctcaagtgcaaccaaactaaatcacccggttcaaacttaacctcttacttacctttactaccaacaattctatacttttcagtcatcttttcaatgttgagtttggttgactcatgcattttcaaaataaattcagcgcgtgccttagcatcattatgaaccctctcactagtaggtaaaggtaaaatatcaataggagcacgagggttgaaaccatacactatctgaaaaggacttaccttggtagtagaatgtgttgcccgattgtatgcaaactccacatgaggcaaacattcttcccacatcttcaaatttttcttcaaaatatcccttaacgtggtacccaaagtacggttgactacctctgtttggccatctgtttgtgcgtgacatgttgtagaaaacaacagctttgtacccaacttgttccatagcatgtgccaaaaatgacttaagaattttgcatcacgatctgaaacaatagtagaaggcataccatgcaagcgaacaatctcatggaaaaacagatcagcaatatgaacagcatcatcacttttatgacatggtatgaaatgtgctatcttagaaaaacaaaaatgttatccctccccctcttagttctaggcaatcccaaaacaaagtccatagaaatatccgcccaaggaatacaaggtacaggaagaggcatatacaaaccatgtggattcaaacgagacttagctttttgacaagtggttcaacgtgccacgaacctctcaacatcctttctcatcctcggccaaaagaaatgcaaggccaaaacatcttccgtcttcttagctccaaaatgtcccatcaaccctcctccatgcgcttcctgtatcaacaaaagacgaacggacccaactggaatgcatagacggttagctctataaaaaaatcca

SEQ ID NO: 20170 - DNA, 16007 bp, Oryza sativa
aatcccgggggtatctcagctggaaagacatcctcatactcctgcaaaaggttagtaacaacaggaggtatcgaactagcaatatcatctagggaaaccaaggcttgtttgcatatcaaggaatagcaaatatcatcatctgaaatttcagcaatgtcacattttgttgcaagcataacaccacccttcaacttaattccctcaaccttagaactaggtgaaagcttatcgtttttaggtgaaaaaactgatttagcaacttgctgattctcagattcattaagtttcaaactagcagctcgctctttatcagcttctacaatttcagcaggggtcaaaggtagcaatgtaattttctttccattatgcacaaaagtgtatttattcctcctaccatggtgtgtagcatcattatcatgttcccaaggacaacccaacaaaagtgaacaagcttgcataggaaccacatcacaatcaacaaaatctgcatatgagccaatggaaaaagaaaccctgcaaacctgtgttacatttgctcttccggaatcgtttaaccactgaatatggtaaggatgtggatgtgtacgtgtggtcaagccaagcttcttgaccaaatcagaactcaccaagttgttgcagctacctccatcaatgattacacgtgcacgacggttgttgatgacgaagaaaatctgaaacaaattatggcgttgtaacctctcaggctgctgtacctgcgtgctgagcacccgctgcacaatgatggtcctgtaggccgttgtgtcatcacgaccaaagacttcgccatcctcatcctcaacttcttcttcctcctcttcctcttccacgtcagaggtggtaatgtagccatcttctgtagcaacatatgcccgttgactagggcaatctttctgcacgtgcccaaacccttggcaacggtggcactgaatgcgtcccgtggagatggttttggggcactcttggcgggtacctgcaaagaacctttacctaactctgctagtcgtggtggagatggttttggtgccgcagaagcttcggatgcagctggtcgcttgcttgctggctggaaaggcgcccgaaatgaaatggccttgggcagtcccgcagatggcatcatgcacggagtgtatgtactcgccttgttcttgccctgttgctcacgcccctgcaattccttctctgcaagcatagcaaactgaaacaactggttgacagagttaaattccttataatcaacaatgttctgaatttcctccctcaaaccagaataaaaacgacaaatggcatcctcgaccccctccactatgcctcagcgtctcacacccttttgtagctcaccatagtaatcctgtacagacttatacccctgttccaaacgcattagtttctttcatagatcctatgataagatagaggaacaaatctaccacgcatagctaccttaagttcttcccaagtagtaggtaaaaccccctcatcagataacccagcccaccacatgatagcaaaatccttgaactcactactggcttgtcaaactctatgttgctcaggtacaaggtaggcattaaacttctgttctaccgtcatctcccaatcaaggtatttctcagcatcataatatcccgaaaacgatggtattttaaacttaaccttagcataaggatcgtcgggcacacgattattattaccttgttggtggcgagtgccacccatacctgtgcggtttgtgcgtaggcgacgttgtagtggtgccattgaaaaaccattgttacctggggactctcctcaccttcgttacctgaaacactaaaacagcaacaaacggtgaaggttatccctaataatctactacgcaggtgtagtggtgcctctcaacgattctcagcaatatggagtacctaaccaagctcttgtaaggttcttaccagcaaagcaaaggatacctggaaggcatagtcagcgattgcagggatcaagaacctgtgctgtccagaagtaatatgtggagataggaaggccaaatatatgtatatgagtggtacacaatccaatgacagatagtaatgctaaataaaaatcccaagtcacttgcccttcgttgctggtctactcgtgtcctagacagtagtggtaacaacaatcgctcaaggaaaatgacaccagtaaacagcaaggaaggacttgcaggcaagcttcggcgagtttcagcaaaaacaacaaaaccgaactggcagataagctcaacggagcgcgtcgtgagctcaatgcactactggaaatcaacttcactttttttttcttttatttttttgatatttttttctttttccagaacacgagaataggcacacctccaagttacagctcaatcggagttgatatgtggcgtatggaattttctgaaaccactataaacaatgtgcaggaacttgtgagctcgagcagacaattttgcaagccaaattttggaattttggattcgccaaacccgccgaaggtagggagaaacggatgtaaaatttgcctgattccgagtccgtatgcaaaagttatggctgtttgaagtttcggcttccgtctaggtcttcgagaggggatataacctagtctattttgcggtggaactgggatatggtggcagcggagtttgtagggtgttctggtgatatgtggtgatctggatgggtgtttatgatggctgaaacggctctcaaaggataaaccctaacacacggtgaaggtggcggctagggttacaaaggaaaaacagacgactagactaaaacacgcactagaccagcaacaggaacttaaactaggactcaaactcaacactacggactctgaaaaagaatcatgcaaaggctaaacacggtttaggttaaggtgactaacgactaaattttttttggcttttctgtagaccccaggataattgcgaaaaacaaaaactaatctagggcaaagaaactgagcgaacctgacggtgaacctagagctctgataccacttgttgtgcactagggttaccgatcttccgaaaggttctcataaacaacgatttgggcggagtcgcgacacaaatcgatccggcatcttgaacgcgcacgctcttgagccccgcaatcgcagcaccacgtctcttctggttatgacccatgtcgaaacgcggatgacctcgccgagaaggctaatccctatttgccaatcgaagaacacaaacaagaacgagatagaaaacaaccaaaattgcagatgaatgattaagctaatgtgttggggtcttacaaaccgatctagcggtgaaactgttctcgacagaataatctaagcaaaacccaaaaatctaaagatggtggcggtactgatatatagagtttagggtcgtgcaatcccctcttgacacaaccctaataggttccaacacgatacacgatatacggcaaaaaggcccaaataccgtgatgcagcacggggacagattttggacattaatttgttcggtcgattcccattgactccgaaagaatttggacgtgggaccaaaaccattggaaaagttatctccttagctttccatccatataaagaacgccccaatctgagcacgtatgcgacctgggcgcctgttttagtgcagactagtcctggactctaaattgcacctgaggtcgaattggtttgggcctccaccttgacttggacgtcctcgatggtcctccatggctctaagtgcttctccaagtgtctccttgtcccctccattgttcctaatcacaatataatcattaggtagcaatctattctcgaattcatacaaagaagaacataggaacgagctcacctctaattcaattgtcgcgcacgagctcttgttatcggtccttgaatgaccattggaggattgttgtgtgtatccgaggtagtgatgtccgcatcacgccatcccccacctccgtgctttccggcgagttccagccgcgcgctaccaccgcatcgcgctgccaccaccactggcttcggcgccgcgagggcaaacccggccaccacttcccctccccaaaccaccgccaccaccaacccgagccaccgccgcctctagcgggctcccaccggtgagcatcgcctcgcctggccatgccgccgccacccacagtgccgccatgcccagccacaccctgtccaccgctcctcttccccaatccattgccgaaacgccaccgccacgttctccatctctctccgccaccattgccgcctccagctgcgccgcgtcgcctctctggtccacctcacgctgcgccatcgccttccccggcactgcagccatcgtgcgcagctcggcttccactccatctccctcctcaacccctgaagcactactcccaccgtgaacccgagccgccacttccatttgccacctccggctgccgctcgtcgctgctcccgatcatcccaagtcatgccacgaccaccattagctccaccaccgtgaggacaagctcggccactgtcacgcccagaatttctatccaaaattccaaacgcttacatgtgcgttaaaccctcgtccaggaatcagctgaggcacacaatgacaaattgataatagaatactatcaaacagctaattaatattcgcaaaataaattattacagaggtggatagttcctctcaaagaataaaattctatgcagcggaaaataaaaacaaagactaaatagctatggcgactccactccacaagcaactcgacctgaccaaagcctaatcctcctgaaaatcaccttcactgaagtactcctcctctgatgaataaatattgcaagaatgagcatatgacatactcaacatgctacacaacaaatatgcaagtgcacaggataacaaaggatagcataataaagctcatttgcataaacggcatttaataaacatttgagagaatagtaaaacagttgagtaatttaaacaatattaaataaacaccatacaacacacccgtgttgcataggcccaaccacatttgaacaaccaaccccgattgtacaaatcaacctccataccaggaatataccattccaaaccagcagtcaatttaattatcacagtattataattaataacgagtaatgtgagactaatcacgaaaaacattgttagacccacccttaaccgcgggcacagctattcgtatagttttactctggccatagatgtaccactgtacccacaagacacaactccacaacatgtcaccatgcgcctcagtaccaccacggtaccttggaaaggaactatgacaatacctctcacacaacacaactcaccacattgcaccgttcctggatcataatctccccctcaaaaccagaggcaatggactccccagcgacccccacgaacttcttgccacttcacagtctggcaccccgtaatgaatcatgctatacaaaagataaagccgttgcccacgctggcttgtggttggcacgttaaatgtttcacaacagtagctcatgaaccggtccttaattgtcatgagcacaaccatcaaaaccatgtgctcataacccacccttaatcaggttttaattatcaattaattatcataacacgattaaccatcgtgagctaccattaaatctaaccataactaataatgtaatatgattcatcccattaatgaactaatgtttctaagcatggctaagcaattatacctatatagcacacttagctgaaccaaaccaatatataaggtccaagctaaatcaatttattacccctaggaaaataaagtcatcttcggccattaattaattgggaaaggctcaccccccgatgacattaaaaaataatgcataagttgaaataaaacattagctttaaacgggttcaacatgctcaaagggttgtttgggatctgtgtgacttgccttgagcttcttcaaacacttccgaaccttcctcaatgaaaacgctctcctccggaacgtcggaaactaaagcaaatgaacaaaatcaacaaaacagtacaaaataaagcataaactgatgtgaccatggctactacggatacatccgttgctcacatcatggatgaacaacaagatatcaagttcgagtcctccaagtgccaaaatccaattcggccacctgctacactgctgacttcaaacggccgccgaagctccatacgacctccgttttcagcccgtgagtatttgatggaaagctctcggagtcctctttccaatgcatcaagcctcattgccaaattccatctcagtcggcagcaactgaagaaacaatgtgctgtgacacctgtaatgggcctatgggcttgtaacctcatttgggaccccggcccaggtggggcccatgtggggtgcgccccaagctggtggagcacgaccctaggcacccctaggtcgtcctcccacccctatatatagctagttaccccttcagggtttcttgggttttgttagattaaagtttagccattgctacttgcttgcagcgcgcgtgtcggctagaccgtccgtctgcttgttcttcggaaccccaacttatcatttgtattaaattcctatttgcaatatcagattgcttttatcttgttcttgcttgtttcttcgatttgcttgcaggaatagggttgatctgcattggcaagatcagcaacccacggagaggtgtatcgatcgctaaggcgcaacacaacgtctcgtacggctgtagtcagatcatcaacgtttcttccaaatcgtagttatcgcaactcaccgaaagatcgggccaataacagccttgagtgtcgagaggaactcagggttcatcaggtggtatcagagctttcgttgctcggtgagtttttatcttcctataaccagaaaatagccatacaaaaaaaattcgtatcatttacctagccatattgtgccattgcattgttcttttcagtttttgctttgttgaattttgtgttgcatcgtcacgtcgtgttgctggtcttagcgtctagttcgtttagagtttcgagttctggtcacgttttgtaccacagtcgtcgctgccaccgtgtctctgttgttgtcgggacctacgaaaacggaatcggctcgctgccacgattctatttttgtagttttcagaagtttctgtcggttagttttggagttcttgagttgcatctagagtttgccgatccttgtgtgtgtttgttttggccgtgcctgtgtcgtgcacgagaggaggaaggtgaattaccatatctgattttggaagtagtcaagtttgttttggaaagatatagtagattggattggttaaaaatcagtttcctttttatcccatacaccaaattcggctgccatccactccacctcgccgagtcccactcgcccctttggccgagtccgaccccctccctcaattccacggttccgagttgtgtcaaacaccttggcgaatttttgtttggtgtcggtttcgagatctgtttggaaaaacggaaccggcataaattcagcattccattttttgtataattttaattttgggtttagacttttatatttgagtccctgtaaaatttatatttatgtttgagtccctgtaatcttacattaaggtccttgagtcagtttttgttaaaaaaaatcaatcaagaaaaaagtgagaaaaaaaaaggcagaaaggtgcaaaaaaaaaaaagagaaaaaaaaagccgcaccaaaaaaaaaacagaaaagaaaagaaaaaaaagaaagaagaaagaagaaagaaagaaaagataaaatactgttatgtttgagctaaactttatatatcagagttgtgcatgagttgctcctagtgctatcttgtggtatcgtttgtgtctaggctcgcgtctctagtacgtctagcctaggaccagcacggtacttgactttgaacaattattcaactttgcattatctgatttgagcatttgctattcctttgctacatatttaagcctacccagagctccacatatttgattacagccgtaccgcaagtgtttgccaaggcatcgatacatccaaccttcattggggtgcttggttgagtcggtgtatgtcaccattccacttgcattggtaagatcttgtaagagcttggctaaaagcttgagtgtgtgcgatttttgagctgccactacctagtagttaataggaacgcgcatatttttgtgtatgtttcttgttttctactaacaatggcagggatatgcaagataattggggatagctgtgctcaacatcgacatcttcgtcgagacatgaggagggatcaacatgaccattatgaggaagtgcgtaatcacgaaaaggaggagagagacatgaaagagccaccaattccattgttcacactcaagttcgagacacctccatcatctaaagaggacatccaaggtaaagtaaatggtactgaaattaatcaaggtgagtgcattgttaacgaagtaaatttgtccacttttcatgcaaaagtagagcaaccgttagtggaaccaaatgctggaattcctttgtcacaagttgatttactcgctgttccttgtgataaagaagagttgtgtgataatgcttcacttatatccatgccacaactagtgaatgaacatgctattcctagtgtttctttgtgtgctgattttaagcatgctgttcatattgttaatgaagttgaggaacgtaaattgctatcttctttaaatactttgggctatgttcagtttgatgattttggtgagctcgataatttgaaggagaaattatttgctaagtctgatttgccatgtctaactaatgctatttttcatatctttggcaaatataatgatagaggaatatatttggtgcatagagttttcatttgtttggatttagagaaacatgttattgctaatcacactatttcgagtttctctagttttgattggatgaaataggttattttgaatggactatatgaagaacaccatatggaaaaaccgaggacggttttccgtgaagaaggggataccacctgatgaaccctgagttcctctcgacactcaaggctgttgttggcccgatctttcggtgagttgtgataactacgatttgggagaaacgttgacgatccgactacaaccgtacgagacgttgtgttgcgccttagcgatcgatacacctctccgtgggttgctgatcttgccaatgcagatcaaccctattcctgcaagcaaatcgaagaaacaagcaagaacaagataaaagcaatctgatattgcaaataggaatttaatacaaatgataagttggggttccgaagaacaagcagacggacggtctagccgacacgcgcgctgcaagcaagtagcaatggctaaactttaatctaacaaaacccaagaaaccctgaaggggtaactagctatatataggggtgggaggacgacctaggggtgcctagggtcgtgctccaccagcttggggcgcaccccacatgggccccacctgggccggggtcccaaatgaggttacaagcccataggcccattacaggtgtcacagcacattgtttcttcagttgctgccgactgagatggaatttggcaatgaggcttgatgcattggaaagaggactccgagagctttccatcaaatactcatgggctgaaaacggaggtcgtatggagcttcggtggccgtttgaagtcagcagtatagcaggtggccgaattggattttggcacttggaggactcgaacttgatatcttgttgttcatccatgatgtgagcaacggatgtatccgtagtagccatggtcacatcataaacagtacatgtggatatttttaacatgtagatctcgattttagatgaatttagcaacttgcaccacttgaatccgagttacgatgatttagttatgaatttctgaagtttaatcgattttcaactaatacagaaaaactaataaaaaggatttatgacgtcatcgatgacatcatcgccagcataggctcggctccacatgaccaccagcgatagagagctcggttgggctatccgaggacacctacgcgaagaggacgacgacgcgaactcaccggtgcaagaaactacggcggacgacgacgaacgacgaacgacgaccggcgacgagctccgacgacggcacggctcggctcgacggcggcggcggcgctccggcggcttgcgatagcggcgaaggggctgccgaggtgctcctcctccgcaagagcccaacggcggcgaagtaaagcggcggcgacggctacaatggcggcgcggcgcggctggagaggcgccggcaatggcggcggctagggctacgcggcggcggcgctatgggcaatgatagagctcgggacttgaggggaaacatagaggacgactaggggatgctttatataggcttggattagagagatcggactccaaacgagaggaatcgaagccagaaaaatctagggttagtttggagagagaaactcaaaacaaattcgattcggtttatccgggcaaaattgatctccgaaactttaggggaaagggagaggataaggaggagatgatttcccctcaagcaatcgaactcggggacgatcggttagggcggaatcgaaggggaggcggcggcgctcgggctcggctcggccggccggaggtaggagaagaccccgacatgtgggccccacatgtcggcggcttgagaggaggggggccggctcggcttgggctggcgtgggccgcaccgccatgcgcgaggaaaagaggaattgggccggaaatggcccaatgacctaggggagggttttaaagactttttcaattaaaataattcatgaaatgatgtttcatttattaaaaaatactttccttgctcaaataattcctagaaaaatctagaaaatagataaacaagcaaagtatttaataaaattttatctagctcaattttatgttgaaacttttcctagattattagagtttaacttgtaggcttttaaaataacttctaaaaatgatttaaagaatgaattattaaattaggcgattttcagggcgtgacagccaccgctccactggctccaatcaccgccgtagccttcttctccctgttgaggtgagcttcgccttaattcaccagcctctagccgcttttccccgtctcgtcgtgcatttttcctttctcctaaccctaccaccgcatttcccaggttcttctggccgtcgtccgcctattcctgctcgcggaacaccgccggaccgccgttacgagtcaccccgaggagcccgccgccgcctctccttgccgccggccgcctccttccgtcgtttggccgctcggtgagctcccctccttcctctctgcccactcggtttcctctcgctacctctcgcgccgttgccactcgccaccggcatcgtcaccggtggtctcgggcctggcagatgccgccgctcactgccgctcgttgctggagcgcttgtgccgtccggctgcctcggccgtccgatcggccctcggccgatcagggccgtccttgtgtccgcccacgtggtcgccacgtcggtgacgcgtcggcgccacgtgtgcgccacgtgggccactcacccgagccgcacatgggcccggtccatcgtgcgcctgagccccttgagtcaccggcgggtggggtccacttgtcggcgccacctcttcccccctcggctgatgtcataattcgttattaattgtgtaataaatcgatattaattctagaaattcattcaaatggctcaaaacttctaaaattcatatctaattcatacgaattccgaattgagccattcaacttgcaaaattcatttaaaattgagacctacatgtttgtttactttttatgtactgtttccttggtgtttattagattttttcctcgttttgcgtgtcagcatgtagtttccgtcgttttggaagatcgcgctcacaagaaaaagagttcggaagatcgtttgaagaagcaaggtaagtcacacattccccttgagcatattgatcccaatttataaatgttttaccatttgcaaataaatatgcatgttttgttaattacatgggattagggtttacctatctgctcgcttgtgccatagtatttgatatccatcatttgtctacattgggtgataattcgactagcttgtgttacttatgttaacctagctagatcatatatgcttagccatgcttaattaccactagctcataaaatgggataattaaatcattagacatttagtatcttgacgagctgcgttctcgagacatctggccatgtttcatggtcgtaattatccaactaaaatgcgactgaatggtgtgctatgggtgcatggttttgcaggtcgcacccatggcaattaaggactggttcacgggaaaccctagaagacttacagtgcttaccacaagctggagtgggtaactgcttgatttgaagtatagcttgaccctttcctaggcaccggtggcgagggtgggcgtgatggagttgggtcggccggggtgtccggttgtctagctgtcggattaaccgcggcgcacgagggactgcccaccttcgaggtaggggtgggggtgaaaccttagagtggtgtggatggttaggggagggttatatgaagggtcttgtcacaatcactcgacatggtgacgtgtctgcacaggcacggtaacatgccggtggattgtgtcttgtgggtacagttgtgcacctctggctagagtaaaactattcgaatagccgtgcccgcggttatgggcgatcgaccagattcaccgtgattactcccatccttaataattggttaatgaactggtgtacttcaggtggtttggttgggcctgttcaacgtggtgtaccgttatttagtggagatataatattactttaattactcaactgttttaccattttgctcaataaatgttttacaactgcctttatggaaatagccacaaacctccctttttctccccttgcacagtggtttggttggtgtggcttgctgagtacggtggttgtactcagccttgctattgttcccccttttcagaagtgtagtgcttctgagctgaagacgaagttagaagaccaaggctcagaccccagttgagctttgcatgtggaatagagatgaagccccgttaggatcgccttttccactactgtcgttctcttttggtgtgaggactaagtgcctttgctgtaagtattttacgctttatttacgtttggatctgtttattacttgtcattttgtgtacactggctggtcctggacagggatttaatacacaaaatagtctagaaatcagggctaaatttctgggcgtgacaaagtggtatcagaaccaactcaactgtaggttgagccaaatggtcaaaccctaaggacaagttttctgaaaaccttatttgcaaaatgtctcccctccccctttggcaattctttgcgaagcggtttattaaagttcttgtccatgtccctccaattcttttagttgtaaaacctggacgacaaaaccatcagcctcatgcctgttcggaagtcaagtcaagtctcaagcttcgtgcagggagcaaaagatcagttcagagtcgtcgttccgcgaagatcaagcgaagttttcccgaagtttaccttaacccaatctttcccggaagaatagtttcgttagctgatagatcgtgtgttgtttgcttgtgcgtaggggtatggtttgcatcattggtggggatgcgaccatactaggttgtttgcttaagcaacttgaacaataaaagtgtactcacaacagatcagaagtggtttaaggtcttatctttagcaacccctctcttccatctatcttccatcctggtagcagatggtcagtgtcagggagaagagcaacaatgacagtgtgttaaagccacagatcaatggttcagttgaaagctacaaggtaccccaatgccagaagaacccctgctcatgatcaacttttggtgtccaagattagaagatgggtgtattgatgtaggagatgcaaagctcgatgcaaggtcaaatgtagcggaagtaattccagcagcaagtttgttgaggtcagagccactagatcagtccaagacaacaagctaccagttgagtcagagtccctcgctctggatcggaatctggttagccaagatcagatggtggatgtgtcagttgttgatgcagcagcagcagagttcgatgcaacagttacaatggtagtgtcaccaacaacaaatccaagctcagatgcaagcccggaaccagaacctgagtcaaagctagtatatccaagttagcaagcatttgcaacttcaaccaatgtatcgccaagtccctagcagacaagcacacctatgcatgctatggttatagtttaaaagggtagttcttgcaaggtgttcaaccattcatggaagacgtacgacatgtcacttctcagaaggtcaaggcgtcagcgtcatcacatcaacagcttcatttgcaacaccctagctcctcaagttgtgccagttccaatgcagagtcagtcagatcagttttgagaaataaactatgcaactcgacaccgaagtcaggccagaagcagaatagtcatgttagccattacagctgatgcagaagttaattagtagccaataagttcacgagctgaataagggtcacttttatgtggattttccaatcgacaactgagtgttaagtcccaagcatggtcagattggaagtgcaccaccttctgtcatttgaattacccggtgaagtatctagttttcaaagccaaggtcctttgtaaatctaagaagtgttggttatttttcaaggacaacagttcaattgttcccggtaaggcgaaagtatgactactcactgcaagtggggtaggtcttagagatgagttttggctcacctcgtcgccgtttcacttaaaggttcaacccagtgtagcaaattggttagtaattaaaggagtcagttgcgagccattagcagagttaccacaatctcaagtcgacaggttcaattctaaggtacacccgtgaggcaggtcaacagttcggtttagagaagcaacattagggacagtcgcaatctaggcaggagataggtcaagcaggtttcctggaattacttgtgattcgagtcaagaccagttcaagcggacatagggtcaatgagtaacaaacgccagatgcaagcttcatcctcttctagccagcaaggtgaattgtcaggttaccaaaattgtcaatatcaacaattcggtccaaggtaagtaagctccatgagcatccgcagtcctggtctgggtcagttcaagcagaaccagtcagttcatttgtttgtagtgatgaggacacaactagctcggatataaccatgaccaccttatgtattgatcaaccaaaggtgcatatgttctatattcgatttacttgttatatatttgaacaaacgttgctacacattgagtttcgtgtgttttcgttcgcagaggtacttgcttgggtgaaagaaaagagaccgagtgtaaggaatgcatggatgattgaagaggttgattggggactaaaccaagaccttctccagttatacttctacctcaccacatcacttttggcccatagaagacaagagattaagttgtacacgttttggattcggattcggacctcctgacagcatcaacttcaaacggatttagccgctgatatataaggaatttcggggcccatgagtacttgttggaaagcttattgagtctactttcagatatttttggtcccatgtcaaaattccaaccgagctgccgggaatctgcaaaacaagccatgtacctcatccagtccgaatctgatttggg

SEQ ID NO: 20171 - DNA, 889 bp, Oryza sativa
caccggagcgtcgggagagccggaatctaagcgacatacaaagcaaacaatacaaacaggctataagactactgaaacagagaacaaaaccatttttaatggattctttgcatttttcttgatttattgagacttgaatgggcttaaacggagctcggatgaattttctatgaattttagaagattcactgtgtttttactaaaaacatgcgggccccacatggcactggctcgaggtggtggtccgcggtggaccgggtccacggaccggggaggcggcggcgcaccacgtggcgctgacgtggcgccgacacggcggccactcgtcagccacgcgggcggcgagacggacggccccgatctaccgcccggtagatcggacggcggaggcggctcgcggacgggcgggcccgggcagctcaaaccggcccggcggccatggcacgcggcggcgcagcgcgacgcggcggcggcgcaaggcggcgagcgggcgccggcggagagcggcgacgacgcgacgacgacgcgggtggcgctggcggctgaccggctaggcagcgatgcaacggctaagcggcgcgggggagagagagagaaaagggaggggttcctcaccgacgacgatcgacgacgatgagcgacggaaagaagatggcgacgagcggctgagcttcgggatctcctaaggaaccaaaagagggggattagagagagagagagagagagaccatggatggttacgacaccggccgaaggcggcagccatggcgaagctcaccggcgtgcggtgcgaagcgggtgccggcgagggaatgcgacagcgaagggctggacggagcggcctgcacgacggtgaatgcgacggcgtcgacggcacggcggctagcgg

SEQ ID NO: 20172 - DNA, 627 bp, Oryza sativa
cctctacccctgctatcctagagaagtattcctgtcaaactcttctcgaccatggagcaactgctttttcagctgtctgctcgtcggggcgaattctatgagccaccactttcatcggaacccatttatacaactggctatgaaattcgtcccgaactaagtatggttagggaaaatcctttttctggctttgatctagaaaatccctaccatcatctgcgagactttgaacaagtttgctcatgccttaagattcgtggcatgacacaagaaactgtgcggttgaaattgtttccgttctctcttcaagagagagcaaagcaatggtacacctctaccgttggatgtgtaagcggtagctgggagaagttgcgagacagattttgtcttgccttctttccagttactcgtattactgcccttcgaatagaaattctcagttttaagcagatcaaaaacgaatcaatcgatgtagcctggtctagattcactaacttagtgcagtatggaccaacctgtccttacaggtttggataaggagtctgcattctatctagacgtaaccgccggaggatcattcatgcaaaaaacgccgtcggaaggacgaataattttggaccgcattct

SEQ ID NO: 20173 - DNA, 17056 bp, Oryza sativa
gtgatgtttggaaccagatacttaactttagtctatatatttagacactaatttagagtattaaatatagactacttacaaaactaattacataaatgaaagctaatttgcgagataaattttttaagcctaattaatctataattagagaatttttactgtagcatcatataggcttatcatggattaattaggctcaatagatttgtctcgcgaattagtccgagattatggatgagttttattgatagtctacgtttaatatttataattagtgtccaaacatcccatgtaatagggactaaaagttttagtcccatctaaacagggtctaagtccttctaaatctgttactcatataactgtctaactgagataaagtttaaggttgtcatatcatatcatcgtcacgttatatatatgatccctgcacttctctttttatagaatggacgagactcttttttctgtatatgtagcggtcttgtactcttgttagtaccattttgcgtcccattttgacgagacgactggcgtgccattttgcgtcctggttcattacagtctaatttggtgacaaacaaacaaggaacaaataggtcccatggtctagcggttaggacattggactctgaatccagtaacccgagttcaaatctcggtgggaccttaattttctcggttttattttctgcctgagcttattgtcctcctcctgattttttgttgttgtctattttctctgccggaaaaatgtatcaaactcgtcgattctactcgtttgagagcttagtgtgatattgtccttctcctgaagtttctattttttactctctctgttatgaaaattttcatgctagaatgatttacattgtgaaatggagagagaactcgtttgtgcttatttatccttcccctgatttttttccacaccaaaacatatattgtgataattgagtatgctacgcgtctgacgtactacgagtttactccctccgtcccaaaaaaagacaaaccctgagttttcatgtccaatgtttgatcatattatttgaaaaaattatgaaaaaaattaaaaagacaagttacgtataaagtattaatcatattttatcatataacaacaatgaaaatactaattataaaaatttttcatataagacggacagttaaacgttggacacgaaaatctaggatttatttttttttatagagggagtacgaggtaaaaatcgtcctcagcgccttcagaaaaaaaaaggacaaaaatcctcagcgccaaccgactccgctccacagaccacagccgcccaagtgtgcgaggacaacggcggcggcggcggcggctaggtttttgctgcacccgacgccaccgcccaccagcgagtgtggtgggccgcggcggcccataaaagaaatatctaggcggcccatgtagcgccagaaaatatcttctcccccgcctcgggatccttatcctccgcctcgcgcggggtgccgtccgatcagatcaggacggccgcgtggggctataaaaggagggggggtagggcaagcagtgcctcctcgtgctctctttgaggtgggttggcttctcctccccctctttaccttttcctcctcggttcggttccgtggttcgtctagggtttagtgggttgagatggcggcgccggatgtcgagtaccgctgcttcgtcggcggcctcgcctgggccaccgacgaccgctccctcgaggccgccttctccacctacggcgagatcctcgactccaaggttcgccctcgctctcctacgccgtgtcttgtgatgggttttttttgggtggtttctcgtgttggctggatctgtgttgaatttgtttgggtttttttgttggtttgctcggatctgtgatcctggggggttttgctcgtgctgttctgatctcgttggtgccagatctgtgtggaggggttgatttggtggtttttttgggtggatctgatggggatttgtgtgtttttgttttggttgtttgcagatcatcaacgacagggagacggggaggtcacgtgggtttggcttcgtcaccttctcctccgagcagtcgatgcgcgacgccatcgagggcatgaacggcaaggagctcgacggccgcaacatcaccgtcaatgaggcccagtcccgccgctccggcggcggaggcgggggctacggcggcggcggtggcggctacggcggcggtcgtggaggcggcggctacggaggaggtggcggcggcggctacgggcgccgtgagggcggctacggtggcggcggcggctacggcggcggccgtggcggcggcggcggcggctacggtggcagccgtggcggcggctacggcggcgactccggcgggaactggaggaactgattggtggggcccatcgtggccagttatccttagctatccgtgtcagaatcatcttatcatcgagtcgagtcgttatcgtgtccagtggctctctcgagtcgagaagccctctatccatccatccagtgttaggtgttcttcgtccgtgatgttaccatgaattgagttcgctttggttatggtgtttgaactgcttgttgctatctatcggaatgaaatgaaatagaaaacaaggagaaaaaaaagagttcgaaagttttgttcgcataccatatatttccttccggtgcgcgctgtttattcctcgctcagcagcaagattgtttgatcgatattgcagcaagcaattacacaataaatatattgctacactggtacttcaaactacactggtggtcggtgattttcaatagcatgaaccttaattgaacatctgtgtagcttacatctccttcgaaagctgcaatgcttgagaacttggaaagaaattcttgtgatggcagaagctattcactgtccttcgctgcatttacagtccatacagacacagcatttccattttgcacaagatagagaacaacaatcagccttttaggtcaatcccaagtgtgcatcttactgattgtcgaatatgtgctaagaacctgcaagagagtgaggatttttatcattgattgattgtcgaatatatgctaagaaccttcaagagagtgaggatttttatcattgatggagctttgtttctgtaatccaagatttgggaaacagtttatccatgttagggaaatgatttatgcaaacaatattttggagcaaaagttagatagtagtatatgtctgccgacgacctcaacccaaaatattgttttgaggaactcttggattacagaacaaaatactgattccaaaatgatttatgcaaacaatattttggagcaaaaattttgtttctccaagaattcagagaaacaatcatacttttttaacacaaccatcacattggagatttcaaaacagcagagatgataggatctactctttccatgtcttcatccaaacttaattaagcttataattgtccttttatcaatttgcgaagaaagaatgaatgttgataagcagtcaatgcaaatgtcaattatatgaataatatctaaagtttagcatgccaactaaagcttgtaatatgccagtatgtttaaatgagagattgaaaatgtaggggagtatagtcgatatagactttcagtaaggcaagaagaaatgcaatgtcattatgttccaggataaaagggtcaacagaaagacatcatcatgatctcaagcctttgcccgcttcattaggaaaatactcagcagagtgtagaatcttttgagcttaatgaccaaaaatctgcatgaccacatggtaacgtaagtaaattcttttctactttcagtttggagatttagttgttcacacacctccaaattaagaaccaagatgcattgattcattctgaaggactgaaaaatggaagaaaaggaaatgatggagaagaaagaggagagctcgtgccatttggatctgttcagtttcgcccttagcagtgtcgatccaaattcagagatccaaaaatgatttgtgaaaaaaggtacaactttggtgtgattgaagcagccgatgacagaaccataagagcaagatgtacactaatggtggtatgatcaggattacctttggccaagctgttccaagagttgtaatttaggatacaacagaagtgcttaatgcatttggccagacaaacaactatcagcaaacgacgaaaatcatacagtatcatcactaaacactgaaggcgaatcaggggaaattaggagaatagcatacctctctcttttttacactcgttataatcgttcaaactgctgctggcccttgcttttgtcttggttggcttccaaacctgcagagccaacatgaagttcatcagagattaaccacacatgcatggaactctccaaaaaagtatgatgactgtgaagggggtcgaggagatgagggtcgttaagtgaagattaggacggatggattcgcttgagggaggtggtatactggggaagcagtcggaatcggcgatcctggcgacgctggggtacgggccgggacgtcgccgccggccgccgcagccgccgccgccgaggacactgggtgggcggagtcatggccacattcaccgtcgccaccatgatgtcatcttttttcctcctcttggacgcctggtccagtatcacgaacaggtagatcgagccgtcacaaacccgacgcagacatcgctaactccagacctcctcagtcttcaccctcttccccacctccagccagggttcactttctcgttttcggcctttgtatcgggcaatgccgatatgacgaaataattttggtccgaaatttctaaaatttaaaacaaaatctaatcaaatttgaacaaatgttaccaaaattcatgaaaaattaaaataaattaaaaatttcagctgaaataatatcgtattggaggggtccgaaatgacccgaatttccgaaattttgatcattccgaaatttccaaaataatttaggaaatttcagtccgaaatgtgaaaccctgcctccagcttctcgccgcttgcagccgccctccatcgccaacgggggagagggacgacgcaccacggggccgagccatcctcttcaacacttcaaaccatgaccgggtagaacagccgcagaaactcacaccatggcttaagctctgataaagagagcagatctgaagaaggaattggaggagagtgaaagggatttggacatgatggtcagtgtaagtggtgcacattttctcatgatctttttctcttgatttactctatagttctggcttatggatgatatttataccttatttcatctaccgatcagtcttgcatcatagtaaattatatagcgagtgaattgacagcctgctaatttgttccatgctgcaccctgcattttttttctcagctcatccattgtctgattgtttacatggaaggcttactctgttttggttgaaaaagcttagttgggagaatctgtcttttctttgtatgatataaaagtaacatactctttggacgtgctttttctgcattttttttttgccttacacacgtccagatgcaatctaaccaatagacgaagagagagaaggacggcggccggcgccggtggggagaagggccgcgatggcgaccaacagggatgagggcatgaccagcgggaaggagttaggtgacaaagacctcatgtcccttcgagcggcgacggtggatccgcccatcgcctttctcccctctccctcccggcatccttcctccctccccgagctccctggcttgccggtgagcgcacgtagagagagaaggacggcggccaatgaccggtggggagaagggcggcggacggcggccatgggggagaagagcgacgacgacctcatgttccctctccctccctacatccttctgcctcctcccctttccctcctggcatccttcctccctcctcgagttccctggcctaccggcgagcgcgcgcaagaaagagatggccggtggttggcggccggcggccgacggggagaagggtggcaggaagcggccatcggggagaagggcgacgaccttgtctcccttcaagtaacggcggtggagccgcctgccgctcttttccatctccgccgccgtcgtcaccgctggccgcatctggtgcccatccgcccccctctccggctctctgcgctcccaccgttgatgccctccccttttcccgcgtcgccgccgccaaacctccccgtgacctcatggcacctagagaaaagaagaggggagaggggagaaaggaggggggggggggggggggggtgttgagaatgacatgtggggcccatgtgggccacatcattttaattattttttttaactgacatgtgggatcatagttgtattattttccaaatcaaattaccacgtcaatgccacatcagatgaagaccgagtatatttagccacgtcagctaaaaccgccgtccaaactgccatgggacttatattgcactgattttgacagttgagggacgaaaatcggactcgttcataagttaagggacctcagatgaactttttccattcagtcttggggagtctaggggattatcggagtatatgggcctgtgaggtcacgtgctctggtgggcttttttctttttcaaaatgggcctgcgtaaggtttattgatttcatttcggccttttactaatttatgcccaacccaaaactttgtatgggtttcttttagatataagttcagttcaggtcccttagtttgtctatgaattcgattttcatctttgaacccaaaaaatagatatgatgggcccctcaactattaaaaccggtgcaacattagtctgaaggcactatagatggttgttttgtcctatgtcgcacttggactatggtcagcctacatggagcgccacataagcggtcaactctggtcaaacgcactttagaccaactatggttcactaaaacaagatcatcgatcttaatacgtaattgataagtctacggacctatatgatacatatgctcaagtttaagtatcgaccatgtattttactcttaaaattatttccataatcatgcaccagttaggaaaagcttcaacaagcaagcaagccgaacgtatatgcgccgtattttggacaggggagtcaaatcaaccacatcaccatgcatatttctacatatacactggtcattttttttgggtacatcggaaatcattttcaccggatttagcccagacaaccagtatcccaatgagtgattaattacttgtattatactcattgttgccttgttggctctttgaggtcagaaagggacaattgaaaggcctcgattgaacaaacgttaggacatgatgcgcttctatataaattcaaggaacaaaaaagcaagctaattaaggttttgtgttctgcataattaatccattaagtatagtgagatctgaggtgaggagaggattaattaagacaaaatctagccaaacttgtgtgaatctccctctaatccatatgcatgatcccccccctcttgctttgcaaatactgtgagcttaattaattccatgtctctctctaattctgcttttgatgttgcaagttgcaagaagcttcacctctcctagggtttatacaagcagcggcatggacgactcgagcctcttcttgcattgggcggtgagcacgctgcagcaccagcacccggcggccgtcgcagtcgtggccgacgacgacgccacgttcttctcgttccaggagctctgcgacaccgaggaggtggttgttgtcccggtccaggaagaagtgatcacggaagcgcatggtggtggagccagcagaatcggcctcgccgtggccgtggatgagcacggaggctggtcaaggtccccgaatccgggggccagggccgccgtctggtggatgcggcagcaataatctgcccctgatgagctgggacttcagcgccgcctcggtggcggtgcaggtgcagccgaacggcggcggcggtggcggcgcgccggagatggcgtacgggtcaccgccggcggccgggggatccaccaccaggaagacctcggcgcccacggtggggcggcggcggcgtacgcgcagctggagcacgtcgtcgcggagcggaagcggcgggagaagatcaaccagcggttcatggagctctccgccgtcatccccaagctcaagaaggtataaaaaatctcaccaattcctcaacatgaaatgctccgatcgaatttgctttcgtctcgtgatcgatttgatgatcagatggacaaggcgacgatcctctccgacgcggcgagctacatcagggagctgcaagagaagctcaaggcgctagaggagcaggctgctgccagggtcaccgaggcagcaatggcgacaccgtcgccggcgagggcgatgaaccaccttccagttccgccggagatcgaggtgcggtgctcgccgacgaacaacgttgtgatggtgaggatccattgcgagaacggcgagggggtgatcgtgaggatcctcgccgaggtcgaggagatccacctcagaatcatcaacgccaatgtcatgccatttctggatcagggcgccacgatgatcataacgatcgctgcaaaggcaagttcttcattattatattaattacgagtaattaatatatattacttgtgagtaatattttatgttatctgtacactatctcgtgtgtctttccaaaaacagattagtgaatgctttaatcggtcacatccgtcacgcataacgtcactgctgatgatgctcttatatggtaccatatggtatattatgcatctcatgtgagtcatgttgtttttggcatttgttttgggttttggttaacaacactcaagagatcaatggaatatctagctgttagattcgcaccacggttcatgcatcactagcctctagcatcattaataggtgtacagataatcttatctgtaacataaagtattagtactagctaagtagctatatatatcgatagatctgtaatcatggtgatatttagaaatcaatcggtctgaggttaaagttcaagatttagagcaagatcgattcgagaaggcgccattgcaacaatatggctattagaaatgagagaaatagcgttatccaagatgagagagagggagatagcgctgagctgagcttaattaattaggagaggtggcatggtgacctttttttttttcggacacggatgtgtaattcaatcaatggcaagatgaatttgtgttttttgagatgttggagcacattttagccattatggactccttgtggaatgcaacagtttgccatgaatttcactgaaatttttgcataagtttcacaataaatagtgcattttgctcaggactattttttttttagaaaaaaactcacattctaaagaagccaaaagataggtgcggacttgctgcatcttccatatataacatcttattgaaatgtgtagagctatattacttttttgtaagttaattccttgcggaagaacattgtcaagtgtcaacaactcaacatatactgtttccgtttttcttgaagagacatactgcttgcatttattgtcttatgtgtatattatcatcttaaaagtgtttacaccacttatttggaacaaatggttgataaattaaggaattttgtaggacttttcctatttgatcctatggaacaaagctagtatcagggttagtttttagaatcttatgaaattcccaacccagttatataattgatcaatacgtaggaatcttagagggaagtgtgagatccaacctcatggaatttactttggtctgtattttcctatactttctttttgtctatttctacattttttttctatgctttgcaatccctttttgtgcacatggccacatgtattcatgctaaatcccaacattttccctatatattattgtgttaattcctacattacaaaggagaaatctttgaaagagctggagcaatttcacctaaattcttacattccaaagagttgggtcctagcttttaaggttgagagtaaattaatggagttctaacatttctactcttttatgagtaatttattgatgagttcaatattgtaaatcttatttctatttgacataccactagctataggtaggagaggaaatatctactgtggaaaaatcgtgtgctaaaacaaaaacaatcatacatatatataattcaaaaattaccccttttttaaaaagaaaactttgtacttagttctctgaaatgaaattgctcagaataaatcattcttttcatataatcattctttctcatatataaactccataaatattttaggtagaggaaggcttcacagtcaaggcagaggagattgtaggcaggcttaactcagctttatacaaacaagacgtcagcactgctattgaggaaaacagaaactaaaattcgtactccctccgatttaagatgtaagttgttttagctttctcaacttccccaaaatgcaagtcattttaaacttctttgcatttttcatcttaatttccttttgattattcatccttgtgaaaaaaaatgactattctttcccaataatgcagtatacgtatgaagagcaagaagtcatttgaactatatatcgcacaagtttaaaatgacttgaacttgaaatcagatggagaacgctatatagtacatctacatcaggggttaattaatatatactaccttcgtttcaggttaaaagactttataacactactcacattcatatatatattaatgaatctagtcacacatatatatctaaattcattaacatatatatatgaatgtgggcaatgctagaaaatcttataatatgaaacggaggaagtacgtatgtatagacttcctatacgcggtatacatatgcacgtgaaaatacacatatgcttggatacaatggagcttgtacttggacggtcatggtatatatatttgatgggtcgtctttggaacggatgcatcccagttgcacgtacatatattcataaaagattgcaaatttgcggcatgagaatcggtacgatcggtcgacatgcaaattttaacttggccagcttaattgggcatcatcaactcacatatttggtgtgcaaataatacaattgttagttaattattgcatcttactagtaccatgcaaaaagaaaaatgatgacatattgattgatgtgctacatctcttgcaagttgcaatgtgctcgcatccatcgggatcgacttaatttcctgcaataaataaagatcaaattgtgttaatcaaatccttaatttgctgatgtattgacatgcagatctttactttgattatataatcgacaactccaggtggccggggtactaacgtactataggaaaaaataattttaggaaaaattacaaattaccccgtgaaccattgggtgagtacgaattgttggaaatttggtcataattcggcatattttaatccaaaatattaagacaataaacatgacatttgcaatatgagtagatctagtgatagtgctagatgtatacaacttgagtatgcttaatatgaaataagcatcaacatttacatagtaacgcaatgctgccattgcgaagagtattaacaaagaaacatctaatagaatcgggagaatgaaagtataccccgagaacgtcccaccgctggattttgaggcagtattgcctccgttgatgtcgttcatcttcttctctccaatctccattgacatcttggtgaaggtaccgatgcagtagcagtagccgcgaagaacaagagcagtcgcgtttgaagcgctacccaaaaacttgatcgcccacctacccgtgcaacttctcaagcggacggagttccggagggacctgctcatcccgtacaactgtgcgcgcaggtgaacagaaccggggaaggattctgcagctcaggaacagaggaggaggaactcgaagtgcaagagtcgtgaagaacttcgttcgtccttctggttgctgtggagtatatatatgcgagcgcgagagtaacgttcggagtcatcaaccgcggtgtttaatttcgtaaccgacgtgctcgttaatacggaatcaattcacggcgtttaattccgtatccgacggaatcaattcatgacgtttaattccgtaaccgacgtgtttattgatacgaaatcaattctccgtgtttattaccgtccgttacaaaacgagagagtgcagcagcagctgctgtctgcctcgcctcgcctcgccccgcctggttgtttgcgcaccatctcaaccggtcaacagagactctccactagctccgtatttaagttgagacctcttcacttagatttccaaggtggtattattacccatagcacttaatgtgggccaatggaatttattaggatttaattgggcctagcccattaatctaacaatccccaccaaatttcatggctcacaggaaatgttctcgattctgatcctgtttgttataccagtgtttcggtgaagactgttaagttgaacttccacctaggaaaagagctacaccagatcacaactgaacaatggactatgccttgaattgtcagtcttgtgcgattcaggtttcactcaaacccttaactggtactaggctgccgtttacatcccctctgtttggagcatataagtcatactcctggccttttcatgagtatctagagatcacctagatctcatagactgtgactagcagtcgaactcatataggtgtgttccctctaagatgttctgtaggccaatatctctgctttatgaaaagccactcggatcacattaaggtgtataccatcctaccatacagattagaagagaagtgcatcatgaagataagcccattttagggtctcttctctcagttacacaatagtttgtttcaccatccaaattcatgggatctccgatcacaatggataggtttccaccattgtgcaactctaagtgggtctcaagcccatctcccttgatgcacagtctatcacattacgtggtagccccttggtaaactgatctgccagatttttagccgtctggacatagtccaatgctatcactccggagtttttctgctttctgacagacttcagtcttcttttaacatgcctggatgacttcatgttgtccctcgaactgttcactttaataatcacactgtttgattatcacagttcatcatgattgctggtactggtttttcaaccaccggcaagtccataaggagctcacgaagccattcgtcctcaactgtggcagtatctaaagctgtgagctctgcttccattgttgacctcgttaagatggtctgcttgcaagacttccaggaaacagcgccacctccaagtgtgaacacatatccacttgtggcctttatctcatcagcatcagatatccagtttgaatcactatagccctccagcacttttgggtacccggcgtagtgaattccatagctcattgtcccttttagatagtgcattactctttcaagagcatgccaatgatcatctcccggatttgaaacaaatcggctcaacttgctcatagcaaatgagatgtcaggcctcgttgcactagctaagtacatcaatgaaccaatgatctgggagtatctcaattgatcccttgctattcttcggtttttccttaatagcacactaggatcataaggagtaggagctgccttgcagtcactataacaaaagcgactcaagaccttgttcacatagtgatattgcacaaatgtaatcccaccctcatctcctctcagtagtttaatgttaagaataacatcagccactcccaaatccttcatttcaaagcttttggacagaaagtccttgacctcctcaatcacattgaggctggtcccaaagatcaatatgtcatcgacatataaacacaagatcactccctctcccccaccatagcaatagtacacacatttgtcagcttcgttcacaacaaagccagcagatgtaagtgtattgtcaaacttctcatgccattgcttaggcgcttgtttgagaccatacaaggacttcaacagcttgcacaccattccctcctgaccttctagtacatacccatctggttgatccatatagatctcctcctccaactctccattgaggaaagctgtcttaacatccatctgatggacgagtagaccatgagaggctgccagagcgagtagtactcgaatcgtggtcaagcgtgcaaccgatgaataagtatcgaaaaaatcctcgtcttctttttgggtataacccttggccacaagccttgccttgtacttttcaattgtaccataaggcctaagttttttcttgaaaacccatttgcatcctataggcttgcacccatatcgacgctcgatgacttcccaagtaccattagatgtaattgagtccatctcactgcgtaccgcttccttccaatagtcagcgtcaggagatgaatatgcctcttcaatggtttttagagtatcatccacaagatatacaatgtagtcatctccaaaagactttgcagtcctttgtctcttactctttcgagttgctacaatgttatcctcctcaggattttcctcaagcgtttgatcaatgtgttctatcggcacaaagtgctcaggggataaaataggttcttgactagaagtgctaggtgcatttttcataggaaattcattttcaaaaaatgtggcatctctagactcagtaattgtaccaacacgcatgtcgggtactccagaattaactattaagaacctatatcccatactgtggatagcataaccaaggaacacacaatctacggtctttggtcctagtttacgctttttggctataggtacatttaccttggccaaacagccccatgtgcgcaggtgagagagatttaatttcttcctttcccattcctcgaatggtgttactttcttatgcttagtaggaattatattcaggacatgacacgcagtcaatattgcctcaccccaccattccttggaaagtccagcactgtctaacatggcattcaccatctcagttagagtgcggttctttctttcggctaccccatttgactggggtgaatagggatgcgtcctctcatgaataattccatactcttcgcagaaagaagtaaactcattggaaaaatactctccacccctatcaaaccttaaccgtttgattttcctttccagttggttttctacctcagccttatagatcttaaagtaatgtaatgcttcatcctttgttttcaataggtacacatagcagaatctagtgcaatcatctatcagtgtcatgaaatatttctttccccctttagtcaacacgccgttcatttcgcacagatcggaatgaacaagttctagtggtgccaaattcctcgcctcagatgccttgtgaggcttgcgaggttgtttcgattgaacacaagtatggcacttagagcctttgactaaagtgaattttggaattaaactcatgttggctaagcgtgtcatacaaccaaaattcacatgacaaagtcgcgaatgccacacattggactcatcatcatcatcgcttacatggttcacaactttattacacatatcatccaaggaaaagcgaaacaaacctccactgtcataaccttttccaataaacgttccatatttagatacgacacatttattggattcaaacacaagtctaaaaccatctcacacagtagagagccgctaactagattcttctttattgaagggacatgctgcacgttctttagctgcacgatctttcgtgaagtaaacttcagatcgaccgtaccaacaccatgaacagccgcaagcgatccgtttcccatcaacaaagaggaacctctcccgacttgataagaagaaaatagggaaatgtccacacacacatgaatattagcaccagtatcaactcaccaatcaggtgagtgacagacagagagaactgtaggtaaaaatttaccataccccaatgttcctccaccctcactaataaccatgtttgcagacttcttgtccttgcgctcaggacaatccttggcccaatgcctaggcttgcacacacaaagcaatctcctttttcctttcccttgcttttcttcttaaaattggttgtagcctttgggttttacgtcaggtttgactttcttgttgttgttcttctgcaccaaattggcgctagaacctccctcgatctttttgccccagttgtcctttgccctcgcctctcctcaatacccaaagagccaatgagatcagtaacactgaactcttgcctcttgtgttttagagaagtagcaaagtccgaccaagaaggtggcaatttggcaataatgcctccaaccacaaacttgtccggcaactcgcagttgttgttctcaagttcctttaccagcatctgaatctcatgagcctgttccactatagagcggtcatcgaccatcttgtagtcatagaactgctccatgacatacagctcgctgccggcgtcggaaaccccgaacttggcctcaagagcaccccacatgtccttccctgaaggtatgtgcatatacacatctataatattatcggagagcacactgatcaatgctccacggaacaagcaatccgtagcctcgaacttagcctcctcctcaggagagagaggcggttcactcggtttgccccgtgagacaaagaaataatgcatcaccgtcaaccaaaaaagtgcatgtgctttccatcttttataatttgaaccatcgaaagcatgtggttttagtgatgcaacaaagccaactaccgaaaaagacctatcaagtttttggactgttggaaatttggtcataattcagcatattttaatccaaaatattaagacaataaacatgacatttgcaatatga

SEQ ID NO: 20174 - DNA, 16373 bp, Oryza sativa
  unsure (1)..(16373): unsure at all n locations
ccgctggattttgaggcagtattgcctccgttgatgttgttcatcttcttgtctccaatctccgttgacatcttggtgaaggtgccgatgcagtagcagtagccgcgaagaacaagagcagtcgcgcttgaagcgctacccaaaaacttgatcgcccacctacccgtgcaagttctcaagcggacggagttccggaggcacctgctcatcccgtacatctgtgcgcgcaggtgaacagaaccggggaaggattctgcagctcaggaacagaggaggaggaactcgaagtgcaagagtcgtgaagaacttcgttcgtccttctggtcgctgcggagtatatatatgcgagggcgacagtaacgttcggagtcatcaaccgcggtgtttaatttcgtaaccgacgcgctcgttaatacggaatcaattcacggcgtttaattccgtaaccgacggaatcaattcacgacgtttaattccgtaactgacggaatcaattcacgatgtttaattccgtaaccgacgtgtttattgatacgaaatcaattctccgtgtttattaccgtccgttacaaaacgagagagtacagcagcagctgctgtgtgcctcgcctcgcctcgcccctactggttgtccgcgcaccatctcaaccggtcaacagagactctccactacctcctgatttaatttgagacctcttgacttagattgacaaggtggtattatacccatagcacttaatgtgggcggagctcggggcggcgataggagggggccgtggagggtggagctcggggagcttggggccgagggggctgcagagctcggggcagcggaggacggagctcgaggaggtggagggggcgcccgcagtcgctgacactcgggacgacggcgggcggagcttggggccgagggggtggcacgaggagggggcgccggagctcggggcggcgggaggctgggacggcggagggcagagctcggggaacttggggctgaggggactacggagctcggggcggcggaggacggaactcgaggcggcggagggggcgttcgcagccaccggtgttctggatgaaggcgagcggagcttggggccggggggcggcacgaggagggggtgtcggagctcggggctgtgggaggaggggacggcggagggcggagctcagggcggcggagaggtgcccatagccgtcggcgcgcggctcgtcgaggcagcggacgggacgcccgcagctagcgatgctcggggaggtggaggggcggtagagcgagctgaggatggcggcgggcggagctcgggctatggaggaagcgcccgcagccaccgccgcgcagctcgtcgaggcgatggagggggcgtccgccgcgacgctgccgtgcctcagcgccctagcccgtccccctctcctctgcgctccggagccgacgggcaaggaagccctcccaccgggggcacctccttgccgcttctgcggccacgatggctgctctcatccattgtcgtcgaggacaggaaaaggggaggtggaggaaaagacggcatcagaaaaaggggcagtgccgccgctggggagaggaggaggagaggagtgacagccaggggagaggaaggaggaggaggaggggcggcgctaccggtataggaggaggagggggagtggcggtacgggagagggaggaggaggagggacagcgccgtcgggagagtagtagtgcgtctgcgtgtgagtaagagatgcggaggagagagaggaggagagagagagagaaatgttgtagcgattgtgcgattgaacggtgttgagtggataagagcaggcacaatagcagactataaaccagctacaaacacatatcgagaagataaaaaatgagagagaagagcagtaggctacagatttgtaattagctgcagcacggactccaagacacaatgtgtgtatgacagttgggaccatgtattaatagtgtacatatgtttataggtaactattgtatgaattgggtattaagttgactatagatgatttggagctagtaattggctatactattaaacttgctctaaggatagatgcctgccagccctctctttggccggcttggtttttttatatatgtaccagttttttaaaatattatagatattggtttttaattaactggtacctataatatattatatgtgccggttcttttaaaaacaagtacctattgtattagtaccggttttttctctaaaatcggcaccgatagtgctcaaaggtgttggttctattttttttcatcgcacgaagatgggaaagggtccaatgaattggcatttataaatgagtgtcaaattattatggcaaataaagttcatataattcgattgaacatagagcacgatcgaattattgctatagctacttttctttccaaaaagaagttcatcgaattgtattattgcatactttttcatcacactaaaaggcgctcaatgatctgaatctgaactcgatagtttaattagtttattagtggtgaagagacaagatttatttgactgcgattatttcctaacctctcataatataataagacctgtgagccaaaattgcgttgtcctttgcattggacgcagttgctaacaacagacacccttcttttcagacgttttctgctgacaggaacggctcaaataattgttacctaaagttaataaagataatggggttcgtatatatatggttttgcagatgtgtgccttgcggctacattggattcgtcaagctgtcctttaattttaaaagtacaggggggatcgagttccaaatgacgtattaattaattaaataatgcaatgagtaccatagaattcaacaagctttctaggagtatgtactactagtatgcaatgtatgggatcgatatagtacttctttttatgaaaaaaattgcatccatatatatgtcggcaatctctcctttttaggttaaaatctactgtgctgcacaaagttacctagatttcatgcagacctgccattatatatttttagggccctttgaatcacatgtataaaaaacggaggaatagaaaaaacacagaattttgacaggaattgaagtgtgaaacagaggattgaaaaacacaggaaaaacacaggaatggtcgtttgattggagcgcaggaaaaacgcaggaatcggatgagagagataaactcaaaggaaattttccaagaggttggagctcttgctaaatttcctccaaaatccacatgcaatgtgccattccataggaatttcataggatttgaaaagcttcaatcctttgaattaaatggccaaataggaaaattttttataggatttgaatcctatgaaattgctatataaatcctttgattcaaaggggcccagactctttatctctcctctaattcctgtgtttttcctatggtccaatcaaacggctattcctgtgtttttcctgtgttttgcaattctctgttttacacttgtattcatatcaaaatcctatatttttcctattcctatgttttctcattcctgcgattcaaaggagcctaaaaccggtaaaccggtctgctgcatgttcagttcaaagcatgacagacaatatatgtgtgtgtgcagcgcagatcgggcaccactgtcctagtgtctgatatgtacttgaacgtggaataatgtacagttgttacaacttaattttaacgcatattcaactggcatttgcatgctcggtttgtggaaaagcttaggtaagctagagaagagaccagaggaatcgacatatatatgcatccacgggctaaccgataagaatgttaatttcagtaatagtataatttggaatgaaaaaaaaatcctgaatataggcatgttaataattgataccaaataaacactcaatttcagtagtatagcttagaatatttgatataactgatgcaaggcagcaagctgggttagactacaggaaacaatcgcttcaataaaatatgtcattagttggtgttggttcgtaaaagtgcggttatcgaatcggcaccaatcttgatgaggtgttgttgggggagggggacgtcattagtgccggtttaagaactagcactgatgtgcccacacgagtcaaaaaaataaaaagggatgcttccctcctccaagaatcggctcagccggcctttggaggtccataacggtaatcaatttccatcaccatccaagaacagataaaagaaaatctaataagtcacccgatcaattttcatcccaagaatatatcaagaacacaatattgatcctcattccaagaacaaataacactagaaccaattggattgaacttgatcaaccaataaatatcacaatacacacatcaagaactcttgtagctagtctgttcacaaatcaacagctcatacaaaactcatcgacgcgactatcgttgtcatcaagccacgaccgtcgttgatctggggttgccaaatctagggtcaccagatccacctcctctagcatggtcgtcgtcatcttctgtccgaaggggggggggggggaggctgccgctctttcccttgccattgcccacccaccaaatctcttgcccctcatctccagacgatgagaacacaggagagcgaaggaggagacagaagcgacaccggggcaacgacaatggggcgaagccaggattggacgaagggaaggcgacttggagatgagtgtcgtcagcttctgagctgcaatgagcgtgttgccatccgagctatgaaccgcatgcgcccttactacagccagccgaatccatcagtggtaaggctgggatcggcagatccgacatccttggcctcctcagtagcgaatgcggtagtggcagtggaatgcccggagtaggataagacgaagagcacagttaggagtgcaaagggtgatgccactggtggagaaatgctttttagtcacggttcgcaaccctctgtagtaatccgggactaaagatcgctatctttagtcccggttcaaatacccgggactaaaaatagatctttagtcctggttagtaacaccaaccgggattaaagagagggttgcggcagtgagatgatcccctttttcttttttttttcttttttatttctcccaaatcaagtgggatacatatcccaaatcaaacccccaatccacaaatcgaagtaacatcaaaaatcaaagttacttatacacacaaataaatacatcacaaatcaaatacatcacaatatcctaagaaattactcaaatacatcacagatccaaacaatgaatcacaaatttgtaacttctcagtcaaatacatctcagtgaatcatcacaaattagaaaaaaaaagaatgccgctgccgccgctggtcgccacgaacgacgggcgcggccccactggccgtcgggcacggccccgccgcccgccgccgggcgcggccccgccgcccgccgcccgccaccctccgcggccacagccccgccgcccgccacgcccgccgccgtgcgcggccccgccgcccgccgccctccgccgggcgccaccccgccggccgccgccggccaccgtagtgcgcgtccccgccactggccggcccgctggatgggaaggggaggccggccgggaaggagagagaagggggaggagaggaggaaggggaggagttagagaagagagttagaaaggatagatctgaggagagggggtgagtttcgatctgttaagttgtaactgtggaggagaggataagggatagggattgtggaggagaggataagggatagggattatatactacgtgtttaattttagtcccggttggtactatccaacctggactaaagacccggttggtagtacctggctggtagtacctaccgtgattaaagtggtgatctttagtcccggttattgacaccaaccgggactaaagatccttggccccctgacatacatctgacaggggatgaaccgaccaaccaggactaaagatcaaaatttttataaccgggactaaaaacaatctttactcccggttctttttggatccgggactattgtggattttaccggaccgatcaaagatggtttctccacgagtgtgcggttgagagaactagaggggagggggacaggaaagggcgatgtagtggagcctagcgtgttgaccgtgggatcagctgcaattgagagatttttatttccttcggttcagctcacctcgccttgcctcaaaaccagtttggctcaaccggttttttatgtggttcaactaaaaatccgacaccaatacttatttttctatacaattcatctaaacaaccgatgctaaataatacatcagtattggttcatttaaattaggaaccctacactgatgaccgtcacttgtgcgaggttttccactctcgggatgcgcacaggttcggatggcagaaaatctcatattagtgtcaggttttaactaaccgatacgatgctgatgtggtgttccgtagtagtgaataaaagtagagtaaattgagtagaatacttgatataacagtggcgatgatcactgtatcctcacgctgctatgtagacgaattgaattgaagaagatgtcaagccaaccgattgttacataagaatagtgagtagagatatgtgaagatgacggtgaatgtaactaggatacgggaaattattctaaactcgaggtgacatcccctcgttgtttgcatgtcatttaaatagttacaaaacaattgaaaaaaatcaacaagataaattaatgtgataaatatttaacatctacaagtttcaatgaaaaaacaaatttgaatatacgtcacaaacaaaaatgtgatcgaaaaaataaatagtagttccatgctattcataatattaatattaatatttaacatctatcattgcccacattcatataatattaatgaatctagacacatattatatgaatatgggcaatgctagaaagtcttacattatgaaacggaggaagtatataatatctatattcaagtatgtgcattgaacagcccagctctatctatacgtgccgaaggcccaaatatagcactttgacccaattaacttacaagtcaacaatagtacatgtactgcatgcacctgtaggggcggatccaacgtgggtgcaggggagactcacccacaaaacccatggatacccccagagcaccccttcggtttttcaccatgaatgataaactaaaagtctctaaatggctggaggttgaaaaaactgtgtaattgagccctcccagttttttttcctagatccgcccctgcacctggccgtttctctcatatgggcaaatgagaaaaacgagcgagagagagagagaagagaaaacacaaataaaaaggagactgaacgctccatgcttacgcgaacgaggctctgcatgcagcattaatgcagtcgtctttatattgacatgaatttgatataaaaaggagaccgaattaaccgtgctccatgctagcaacatcaccctctctagatctgattaatttggtaagactcatgggtcatgtcaatgagcatatatcgttccttattaattaatgtgtgaccatcatattgtgaagtagcttatttgaagcatggatttgacatgattttataggaatcatgtactatgttgttttacgaagaaaatctcatgctcaaatgggattatttttcacgaacacgcaaaaagattacataatcaatatgtgctcaaatgggatcatttttcacgcatgcgtaaaaagattacacatacattaatatatattagaagaaggagaattcgattacacactgtagctagccagagagccattgtccggggacagggagaaaaaaaaacaaactaaaagacgtcaatatatggtcaaatgggatcatatatttcttgtctatgaaatgcgtttgacatttcgcctcggtcactagatcatgactaggtgatctgattccagctcagcattagtgtgattcttgaccatcgatgccaactcagttcaatccgtcatagataggccgttaagactggaccgatctggtgttttcgaaattaaaacacccccctgctaactatgatacaacgttgatctttttttttttacatttcttcccaaactgaaaaaatatctgtgcgttgcaatgggtgaaggttattttaatattattatagttatacggtttagttaagatgaaatttactctgagaattcgcttggatatatattttttaaaaaaatcataagctgtaattagtagtccgatcatgttaagttagcatgcgagtatttttaaagaaatatcttatacgactccatctgtatttccaaaagtgaacgaacttaaaaccccgtctcaaatatgaatctgtatttacaaaagcaaataaatttaaaaaccgatttatacacagatgacgtaccaaaatactgataaaaacatcttcgatcaatttttataacagtattgattaataagtccactctttgttatttattgccaacccaaaacttcgttgatctgtattctgacaataattttgctatgacccattccatgcatggtttgggtgggccgtaggtattatattctaatacaaaggctactgcattctagatgtcggaaagtctaatgcgcgatggatcgctaccgagatcgctctcggtagcgatcaccacctctccccctccctccctccacgttttcttttttggcaccgcattacttttctattttagtaaatttatgtacctaaagtttatacacctaaagtttatagatccaaaatttataaatcaaaagtttatatatccgattcaaatttaaatttgaattcaaatattttttatagtatttctatacatctaaaatttatagacctaaagtttataagtcaaaagtttatatacccgtttcaaatttgaattatatccaattcaaatttaaatttgaattcaaatattttctatatatagtatttctatacatctaaagtttatacacctaaagtttatagatccaaaatttataagtcaaaagtttacatacccgatttaaatttgaatttgaattcaaatattttctatatatagtatttctatacatctaaagtttatagacccaaagtttataagtcaaaagtttatataaccgattcaaatttgaatttgaattcaaattttttatatatagtatttctatacataaatttttctaactttttgtttttaaatttttttttgtgtggtttaagaaggggaggagggaagagagggggagtagggggacggacgggcgcccaatatatatatatatatatatatatatatatatatatatatatatatatatatatatatatatatatatatatatatatatatatggccgtgtttagttcaccctcaactacctcaaacttctaactttctatacatcacatcacatttaaaacttttctacatatataaacttccaactttttctaaactttcaacttttttcaggaactaaacacaacctatatatggaactgtcaagaataggcacaacttgtcttgtccttgtccttgtcaatttgtcattaattgagattaatcactccatactgtacgacgataataactcctccatctgttccaataagcatttaattttcttctatcaaaatacttgtcatagatactcatattttattatttttagagagctaactttcccttcctaccatacaaccacaacaatactagttactccctccttccaaaaatctgagacctatttctttttcattaaaactaagaagtaattaactcactcaccatgtggcaaaaccaataaacatacaaccaataagtactagaatactttttggtttctgatcaaccatttaatttagcacatagtgattacaaataggacttagatttttggaaaaaccaaagaatgaaataggtctcagatttttggaaggagggagtacttcacacgaggtttttgtacttgttttaacaagaaaaataattaggacataattaatcaaggtaactgtatatgtaatttgtccttttttgttagaattataagtaaattgaaacagggaagactatgctccatatgtcaatgcaaaagcacagcatgtgccatgagaccatagtacaaaaaaacggtatcgggccggcggttgagctggaaaaaaccggaaccggcgactttggtggcttggttaaaaaaaaagaccgcccctgcaatcaaacaagtaaaaaaccagtgaaccgggcggttttatgggagccggtgaaccggtagttgttttttaataatcgaactggtttaaaatttatcctcgcagtatggcattatgaatttattatgttacaacgctatatttttttatgttgtggcgatataataatagatatactagtttatttatacatattttcactaatttgtgatgattatatatttaaaataatgcaaatcaaatataatattaataaataaaaaaccggtggttcgaccggtgaaccggtgaaccgacgactagagcgggttgacctccggtccggcttttttactatgcatgagactgaataagtacggctcagtgccgcctaccatttcgtcattaatatattttctctcgaatcaaatccatattgtttggccggaagttggcacttctattactaaaaaaagaatagaatccagtatatttttagtacgtatttcattcaagcgtcgccaaacgttggttcagccagccaatcaatcaagattatccattttgaataaattagttcatggcgagattcaccatctagtttagtaaaccaagctgaatgattgtagtggcctctgctctaattggcaggatttgctccgatctgctgactgataagtacgtacgtgctacgactttgcctccagcttttgatcagcttcacactaataatacgtcatcgttccgtttcaaaataaacaaattgatcttattgatatgctccctccgtttctaaatatttgacgccgttgactttttaaaatatatttgaccattcatcttatttaaaagtttaagcaattattaattttttcatatcatttgattcattattagatatacttatatgcatatatatagttttacatatttcacaaaagttttgaataagacgaacggtcaaacatgctaaaaagtcaacggtgttaaatatttagaaacggactagatttatttattttaatatgagggaagtacgaataattcacgataacatgccaagaactcctcaatgcaaaacggcacatacgtacaaattccttgcacacgagaacttgttaggaattttttttatttataattttttttattaaaagttttacaaaaataattttccattttgaaaattgacggaaatagtcgcctaccgccctctgggagggcgattnttcaaatcgccctcccagagggcggcgaaaatgacgtggcagacggccgttcgctctcgggcgacggccgtcaacgaaatttgcaggcggcccccttgccgccctccgcgagggcgattttgcactgtgcgggggcccgcctgcaaatgggcggcgagggggcatggaattttgcaggcggcccccttgccgccctgggggagggcgattttgtactgtgctctatattttttttatataaatatcaatagttatcaaatctttttatattgaaaactatacaagattaaaatctccaagattggtaaaatacaattttattattttttagggcatatttggaatgttaccgtacaaatattttgttaatgccaaaatataagcaagttttggcactaccaaatatttggtaaggtaaaattgcatttgatcatatttggtttgctgccaaaatgtaaaattgtagtgaagaatgttgtacataatctcaattctagattacgtattaccaattaataggcttccattttcgtgtgtggtgtggtagtgggaaagaagatatgaagaggttgccttcagattgtcaattatatagcgtcgttttcactgcaatatatgtgaactcaatgagatacattattcattagatgtgacaagacgatcacgcgtgggcgtgattcactttatgtcaacaggcagcgccgaaagttgatagtgataactcgagctgccgcttttcatgtgtgctgttgtggactgtgcgcgctactggatatggcactaccgtgaagcgccgaaagtgtgttgttgtgagcataagttgttcaagcaccatacgaatgaaaagaactacgtagacgagacaaacacaagtagtactgcagtagtaatagcaaaagtagtactgctttacaagtttgtaaaccaaaagaaacggtcacataaggactgaagaggtagaacactactgacgaggcctcttacccctgtccctcctaccctgcgccctaatgtgcccctgggagtacgtgagtcggtccgggggtacggcacggccaacccgtcctgcctgtacaggtgtgacctctggctgctcctgagtgtgcgcctctggagctcctccaagctgagaggagcctagtacgtcctggtggtctgcaccgtgcaagtcgtcgtcgtagaactggctagtaggaccagtcctaccggcgtgagacgaagaggccccagtaccgaagatcccggctgcaaatcctgctggacaaggaccatcagtttcgtataggtatttaacagtattaataaaaagtaaagtaccgtgtgggcgagggatcgacgctccgtgagaggaagagctggcgaacgcgcctgaagaggtggcgaacgcccctgcggagctcgcggaagcgccggtcgtgcctgcgaacgcgctcgaaggcatacgaggtcctgcgatgaggaaacgtgcagttaaaacatggtgacacattcgtgcaaaagctgaaacaaaaatgaactaatatctgggctgaactgtaccgtgcgaaaccggtgctgtaggtcgcactgctccgaagctaggggcgctcgaagacaaacgaggtcctgctccgacggtaggaccgcgaggccgtgggtgtaccggaccagctggaggtacgacgtccacggcgctgcgacaggagaagacgcgcatgaccgcacgcatcttctcctgcatccggtcgaaggtcgacctctgctcaacgtcagtcaagtgcaaacctctgttcaacctcacctggactgcggtgatatcggcactgatatcccgtgccgcatcagcctatgcaagatggaaataaaaaattcagtagttgtcctatattatgcaagataaatgacataattgttggaagtaatacaaattggacgtaccgccacgaagtagtctcggtcacggtgcgtgggatacgcgtccgtgacagcggcaacgtgcggctctggggcgtctggagtgaaggtcacacgcgcacgagtgcgaggaaggtaccagcgaaggtagtcacggtagttctcctccgtgtgtgggaagagctcgttgatcacctcctctgtagctaacacccagtcgtcaacgtactgctgtacacgtggagcccaaagtgcgcctgctagctgtccccgtcgagtcaacctgtgaagagaggtaaattgtatggctcgatgatgtaattatcataaaaatttagaaatgaacaatccgaactcacgagtggtcggcaggggggacggtcggctgcacgttgccgggaaacacctgcctaagtccgaactgtctcatcacacgctgcggccagtgaggctcaacgaaaatgtcgaacaccatcggcaggatggtgagccagtaagcctggtcgcgtgtgcacaaggacgaaagtcctagcggtgctctcgcagcgacggcctcttctgtgtacggctcccagatgacgtcgctcggctggagacggtcaaactcgaacacgaagtccgggtaaccacgtctcacctggacgtgagcgtaacgacgctgcaataaacatgatcggaattagacatgttatgtgaaggaaaaaaaaagaagaggactgataaacttataacgcagcgaagttgcactaaccccacgtcgacaccagtaagtccccatcgtgggaccgtcctctggccactgcgcgctgcgaccaaccccgtagggtgcgctgtccaccactggtcgccctatggcaaacctctcggctgcccaaagctgaagcaacataggacagccagcgatgatcgctcccgcgtcagtcttcgtgcacgcctcacagagggcacggtacgtggctgctagcacggcagaaccccagctccactgcggcacgtcctgtggctgagcatccgcgatggaccgtgcgtagtggaccagccggaagtccacagcgtgcccgtgggtgctagtgaacatcacccacccgaacaaccacaacaggtacgcctcaagggagcgtcggaccgagtaatcatcagcgtcagggtgcagaaggtccgcctacagttaagaatgaaatgttagtacaaaacactgatccggtcgcaaataagcacgtatgataataacaacttatgtacttacagtgaactggagcaaccaagccttgctaggcccgactgtagagtacagaggaagggtggtggtcggtcctaggtgtggaaggcgcatcacctgctcgaagcgcgcagtgatatcctccttccacccaaaaacaccgtcgacgggaccaactggtgctcccgccagcggtagcccgagcaggtacgacacgtcctgcagtgtcggagccatctccccacagggaaggtggaacgtgtgcgtctcaggtctccagcggtctacaagagcggcaaggagtgaccggtctgcatcccaccgcttcgctgggtcacggtcgtcccccgccgcctcaacaagcctacaaagtggtagaaggcctgccgcacgcaacctgtatagagcaaacttcaaacataagtataaaacaaagcaaagttgagttgaaatgtgaacatacgcgtaccaaggaacgtgacgggggtcgacacgcaaccactcgcgcgacgtgcgtggacggaaggtgccgagctgtgcaccctcgactgctgacaggaacgagcggtggttcctgtcaatcccacggttcaacagcgccggtgtgtcgtacgccatacctgcatcaaataggttgatcagaaacatataaataattagttcaacataagtaataaatgttcataagcgaattactaacacatattaaacaagagtacaaacaaacaaaagtgtttagtccgaacactcatcacgataacattatgatacaacaccgaatagttcgcaatactactagtacaacaatagtcggaggtactcattacaacaagattgaattgaaattacacgatagaagtatttagtccgaacactcattacatcattttatttcctaaatcgaaagcattgttacaccatggaatcgcctgctgcgcgacgacgccttggccttgcgcgcctgcttgttgttccttcaccaggtggtcgcctaccatcacttgcctgtccagatggactagcatctgcgccgcttggaacttctgcattcttcgggcatgtcttgtaagtatggccgcgcagatcacacttgctgcagcgtaaagtcctcccacctgcttctgactcatccacatcatttctgatgcgtctagtttggcgtcgaccctttttcaccctaaacttagatggatctggaatataaaaaacttgggcactcagcgttgtgtaagatcctgagatcccgaacccatatatctcctcactccatgtatgaaagattgcttctttcctgaaataatttgagacgtacacattgggagatatgccacaatcaccggcagcagcaagaacgtgtgagcaaggaaggtgatgaagcttcggcttcatacaactgcaggtacatccaccatccgccttcaagacacattcctgcacggcttgcttgcgatagataccacgcctgctcctatcaacacacattatttcataccgatgcacttgtgtgccttgagcaacaactctatgtctccgtgcctttttgattttatcttccatgtactttgtcactacgttgccaaacactatgttgttatcggccatggacggaccaattttcttgtatcgatccctaaagtaggcttgcgtgccgtgaaggatgaattcaacaatagcaaccaatggaagtacccgaactcctcgcattacccagttgtacacctctgccaaat

SEQ ID NO: 20175 - DNA, 21477 bp, Oryza sativa
  unsure (1)..(21477): unsure at all n locations
tgagcaaagcatatctaattacaactgcggcaatgtgagagctgttccggttaggagtacagggattctccttgtgttgtgatgccgagcttgactagacgtgatcacaaatggacgaaacctactatagtactagtagtaggagcactacttctactctagctactcctcgagcccagttattccatccatcggattccttccacagataggcagaaactagcaagcctataagttttttctttctttttttttctgaaataattacagaaggccctaataaaaaaaactaattataaaatccgttgttaaaacagcgagacgaatttattaagcctaattaattcatcattagcaaatatttactgaagcaccatatcgttaaatcatagagtaactaacctatatttaatattttatgtgagtgtttaaacgtttgatgtgacatattgtaaaattttagcgtgagaactaaacagaactaaacagggcctataatacttcctaagtactgtactaccagcttaatactccgagaaagacgtttatcaatgtttgaagtactattactgtactagctgcggcaaggggtggtgttcagcttataatacttcttactttacttcggctgtttctagttaagcgtaaaatttagattttgtttgaaattgaaaatgatgtgacttaaaagttatgtgtgtatgataggttgatgtaatggcaaaggactaaagtttggatctaaactttagatctaaacacagccttcctctgtctgctagtagtgtagtattgactttgtcccaaaatatatttttaagttttgactgatatacagttatccagatttataatcagaaatgtttatatttatatttttgacggttgaagcagttgtgaactgatcgttacaaagtctcatttattctaaaataagctaatttttgagtaattattatatctaaatttacgaaagtagtagaatatatagatatactgggagtagataaaataaataataatggtactggaatttaataaggtagaggtactcttttcaatttttttattggtgcaagagaaaaataaacttactttaaaaaataaacggcttcagtactgagatttaataaagtagagctatcatactatttttaatttcatattggtgcgagagaaaaataaacttactttaaaaataaacgaagtcagtactgtatatattttttttactacctccgttttaaaattatgttcatctttcaaccatctcacatataccaatacaaaagagcctcgtcgattacttatattccctaataaatcaaaacaattcattagagaataaaaattaatttatagataaaaattttatatatttgttcgtaacgatttaaaagccaattgaaaaaggaaattacgttgaaaacatctttgcatcaactttaaaatcaagttcgaaaattcaaattttagttttttcttggcttattaggctatctcatggggctctagaatatccatgctttatcaaatctcaatgtaactactttttatttttatcttttctcaatacaataattccttacttttatatactttgatgtaatgtttactccaaaaataaatttattaacttttgtatatattttttttataaaaacatacccgtttagggtgtgtttagttcctaaaaaaagttgaaagtgtgaagaaagttgggagtttggataaaaaagttggaggtttatgtgtgtagaaaaattttgatataatatgatgtgatggaaagttggaaataggagagaaactaaacacggcctttagtagtttgaaaaacatgcaagtgtaaaaggagcgaagtgttcattcaaaacttttctacttacataaactcctaattttttttctaaactaccaactttctccaaacttctccccaaattcagaaactaaacacagcctaaagttggataaaaaaacctatagtcgctcttaaaatgggacaaaagagtacttcctccgtcccaaaaaaagacaaaccttggtttccgtgtccaacgtttgactgtccgtcttatttgaaaaaattatgaaaaaaaataaaaagacaagtcacgcataaaatattatgttttatcatctaacaataataaaaatatgaattataaaaaaattttatataagacggataatcaaagttggatacggaaacccagggtttatttttatttttattttttttgacggagggagtatggctagtgctactacccctattaattatgcaatgtggagttagctactagctctagtgtagggagacaagatttgcatcgctagtctagattttagatagatcgagtattatatatggtgatgcatgggtgtttgaccataaaaaactaattacagaatccgtcggtaaacagcaagataaatttattaggtctaattaatctgttattagcaaatatttactatagcactacattgttaaatcataaagtaattaggattaaaagattcgtgtcccaaattagttaatctgtgcaattatttttttttctatattaaatcttcatagttccgttgtcgtgtcacccggcgcaacacgccaccatgacctgtcctgtccaattgaaaggccttttccatagctgcttctgctgtagcagcagagcgaaagcagccagaggcccagagcttcagcttcagcctactactagtactctactactcccaactccatggccttcgttcgcctgcacgacggcacaaccaaaatgcgcagaaactcccaatactcctgctactgaacacaggaggggacattgcaagaaaattatactagccccagcatatactagcctgcacacaggagaggcagcagctgaagaaggaagcaaaacagtcaagcttttgcattgcaagcagccgattctgaattctgaaagctgtgattccttgcttgcaaggcagggagtcgcacacgggcaggcaggcagagagaggcagtggagagcgtgggtggctgcatcctgcaggcaggaggaggggaagcgttttgctccaaaaggaaagctgaaaaggcctttggcctcgcgctgtgcgtggccgtgttgatgttgagtagcgcccggccggcgggcgttcccctccaagctgcgcgccagtggacagtggtggccatggccattgcactactgtgcagcgatatggctgggcgctttaaagtaagtgcactgcactgcactgcgccgatgggctctttctttctgacctcctcggttgttctttacacgagcaagttgatagtatagccaaatactactaactccaaatcatttatagccaacgtaatagctaattcatacaatagttgtttactaaataattaatatctgatcctacttttcatacacatattacgtcttcaagttcgtgctgtagctaactacagatctatagcctgctgctcctctctctctttctttatctctttaaaatatatttatagctggcttatagcatgctattatacctgctctacagggcattttggttttcgatggcatgtaattttagtgcccttaatgaaaggattaaaatgttttatgtaatttaaggctgagttcttcaggtaactttcccaaattaattttctcatttttcgagtgcatattttttaaaatattaaatggtgcgatttctaaacaaaattatataaaagttgctttaaaatataactagcatagtggctagcgcatattacgcagctagcataatatattttctgtagtataatagcatatatgttttctcattatattattcaaatatattaaaatgacaacataattttaaattttgcaataactttacgaaactactaatgtgtaatattcatattgtattttatatacgtgttagttattaattatttttaatatcagattttagttatttgttatttatatatattcctatatggactatagactcgtcttttaatatttcttttttaaatttcgaattttctgtaaattgtatttctcttcttccaatattatttatttttatttatgaatttttattatttctaattatatttctatgtggactctaaactcatctttcaatattctttaatttttaattttgaatttcagttacttctaaattgtattcctatattgactttaaactcatcttcccatgtttttcttaattacgaattttagttatttgtaaattgtatttttatatggactctaaactctacttttaattttattatatttattccgaattttagttagttttaaattcctatatggactccatactctatttctaatattccttattttgtaattccgaatttctttttttcttaattgtagtctcctcttctaatattccttatttttaattccaaatttcaactatttcctaattgtatttctatatggactctagtctcctcttctaatattccttattttttagttccgaatttcaggtatttctaaattgtatttctatatggactctgttttttctttttctccgattaatgtgagaatttctatgctatgagagcgaacgtggaggctcctttttctattcctttaataatataatagatattaatttatttttaagttttttaagttaatagtacttaattcatcatatattaataaatcattacatatgctaattttactagaactctgtcaaaataagtgtacttattaagtacttttttaaagaacttggaaaatagattaaaatattaatgaaaaattacctttttgaccttatgatatactccctctgttttattttaagcgcactgtaactatgagttttttttttgtccaaatttgattgtccgttttatttgaaatttttttatgattagtattgtgttgttattagatgataaataagacgaaccattcagttagacatgaaaactaatgacgtcaattaaaatgagacaaatggagtactctatccgttaaaaaaaggcaacacctctcctagtacactgtcgctgtggaggtccttatatacgcacgtcccgtctcgtttggtccgatccggtgcggtgcgggtgcggtcacgtcgttggccagagggcctgtcccttctctcgggtcatctcagcgacgtcgccacctgcagtagcctccatggtaacctgtgcgtcgtcacgctacgcagatgctaccctcgctgccgtaaaaaatccgtcgatcgatcgccgagatgataccgatgatcgatgggaaaatgtgcctgataccgctggctcgctcgctgcgcggcgaaacagggatcccagcatgtgactcgccaagtcgagtcgccagggtgtagtcggtcaggccaattgcagagatcgatcgatcggttggtcagatacgttgtgccggactgccggtgtgtgtgactgcgcgtggttgtggtagatcggaagaattcaattcaacggtgcatagacacaaaagttccaacgagagaagacgagaacacaaaaggaattaaacataaactaaactttaatccatccaagttatatcggatgaatttgaagtattaaacgtagactacttattataaaactaattatataaatgagagctaattcacgtgacaaatcttttaagcataattaattcataatttgcgtatgtttactgtagcatcacatagcctaatcatggattaattaggctcaatagattcgtctcgcgaattagtgcagggttatagaatgggtttttattaataatctacgtttaatatttataattagtgttcaaacatccgatatgatagggactaaaaagttttattctcatctaagcaggaaagattttgggactgaaatttctccgtcgattggcagttgtgttctttttttaagtgtttccttcatctagaatgtagcaatttaagatgggatgagatacatccttagacaatatatctagatataccttatgtccaaatatattgtcctaagatcctagatgaaggtagtagttcctaactcactttctcgtctctcctgtgtacgtttcccaaattcttaaaaaatatttatatacgaaaattactttaaaaaaatcatattaatgtacttttttaaaaagaaaaaaagtttcttatattttgtaacaaggctagtagtactccgtggtatatgaccaattgttggtgtcctgcgccagagtgacgccccagagtaaattggaccggaatattgttgaggcccgaacagcaggcctagatttagttgggcccgacctggatagcgaggaatgaaccagcccagaactagtcggctaggtcgggatgcgatgggatcccgatgtacgtgttggacttggacccagcccaatactcccaatattcaagtttgaggcaggccactaatccgtcgcagcattcgagcccattttcgtttcgaatcaacgtatctgctttggttcacaggaaagatttaaatatccacgcatttcaaacgtgttaaaactaaaaggccatatgattttttttctcagtcctgcgaacacgcctacgaggttactagtgagtctatggtggcaacttattactcattttctgttagctaaacaaatacgctttcttattttttaaaaaactaaatagacccatttttatttgttataattgatatttaattaatcatatggtaattacttgcatcgtttctgtgccacgaaaaatccaactcactagggtgtgttattttcttccactctttagttttcactttttgattttctgcacacgcttcccaaatcgttaaattgtgtgttttttttaagaagaatatgaaagttcatttgaaagtatcatattaatatattatttgatctttttaatatttaattaatcatgcgttagtacctatttaggtttcgtgtgcctaggaaaatggtatccaaacccctcaaaataacacagcaaagtctgtgacccgcgtggtagatccagccatccaggaattttaacaatcgtgcacaaacattttataacaatagtaacaatctgtacgactgtaccttatttgcgcttgtaggtgtcaacggtcggtttggaaaaaaaaaaaacttccaacggccggaatccttcttccatctcctcatccaaatcccaacggtcatctctccgcccttccccccacttgtcccctagctccgccgcgataaagtcttgtagccgttggagatcaaaatcaccaagcaatcccatcccccgcggcgccccttcccccccaattctccgcctcgaattcaccctctctctctctctccccccgaatccacagatcgagatggctgcggcgacggcgaggtctccgtcccccggccccggcgcgaggccgggctgcgccgttaggaggagcgccgactccagccccgccgcctccccctgcggtaacgtctcgttttgatttgtttccggtttcgttttcgaacaagctttccgtttctgcggcgagcggatctgatctgatggtttcgtggtgattttgatcgagtcgtgtttttttttgtttttggttggatgcggcagatttggcggcgctgaggagctccgtggtgtgcaggaacgcgtcgccgcgggcgtcgtggtgcgcggagaaggagaacagcgggcagcgcgacgcggcggcgagggcggcggcggcgcccaagcccgctcgccccgcggccggcgccgcgaagaacttcatggcgccgaccatctccgcggcgtccaaggcctcgccaaggaagaaggtgctcggggagcgcaacgagcagcagcagctctaccccgtggcctcgtcccccgtcaagcccatggcgtccgaggcgggcgccccgcgacgcctccggctctcgttcgatggggcgcccaatactgccccacccgccgcatccacgccggtcaccgcggcggccggctccaggcactcgttcggcggggaggaggagcggagggtggagaatcccccgtgcaagaaccaccaccacgccacggccttcgacgacgctgcttccgcggaggcggaccagggtgcggctccgtacgatcccaggacgaactacctgtcgccgaggcctcggtttctgcactacaagcccaacccccgcatcgatctgtaccggcaaggcagcagcggtggcgtgaggcggctcgaggacgggttcgcctccgagagcagcgaggaaaccgtcaccaccaccaccaccaccagcagcgaggaggaggtggttcttgtagacgaagaacaacaagcgcatctgtcgtctgagctcggagatggcgccgctgttcccgcggctgatgcttgtgccctgccgctggagcctgcgtcgggttcaccgcgggctcgcgtgctgacgccagagccagcgacgcgttccccgcgcgctcgtgtccagacaccggagccggagcctacggcgagctccgagcgagctcgtcgtcccaggaagaggtcttccctgaggttcctggttgctccccttgcgctggtcgtgttcatggctgctgctctcatctgcgtgccgccgccgccggtggattctccggtcatgccgctaaccgccctgtcgaaggtgtcggactttctgtcagttcaagaattgcatcctgtggagttggctgcttggctgaagcaatggtcaagcagttcgttgaatctggtcacatcctactgggaatcccttgtttgggcgcaagagcaagagttctttggtccgcacttcgcagccaatttgagtgctgcaactgcaagtgcgcacgagggtgttgatctctactgcaactttgttgaaacaaggccagttctaatggaagatatcggtgccagtgcctttgagcaggattccaagatccaggaggctgtttcagcaagtgattctgagttgatttcagagatcagtgatgtggagcaagaagatatcactgataagggagatgtgatcgatgatgggttcttagcagaggagcttaatgttgagatgccggaagaagacgctgagatgtcacaagaagtttcaggtagcaatggtgaagagatggcatccttcagtcaggatctggagccctcccaacctgcaggagaagctgagccactagagaacattgaaactagcacttcttccttgaagcaggatgttcagactgatgattctgagggtgatcgtgctgccgacggagaggagagcccagaggcggatcatggaatgaagtcagaattggggatgtggccaagctacctggacaaaatctcaaagcctgctgctgctggcgcagctctggctgccgtcattgttccagctgcactggccttcctcctcatgagcaagaagcaagatcaggctgtcgcaaatgctgccgctgaggcaccagctgatcaagctgaaccggttgtcgagaagaccctatctggttcggggagcagcgagggtcatcttcgtgtgaagggttcacagcttcagactcctcctgtggcagatgaaaccgagagattcggcggcggctccggcgcttcgatgtatagcagcagcttgtcttctggctatggcaggaggaagagtgccaaggaggacgagagcctgagccttgatccagtgtccaggagggattctgccgcgcaacccacatcgtcctatggtagtttcaccacctacgagaagatccctgccaagaaggtatacaattaagcggttgctgtttatatcctgaattcatcctttgaaagtttgtttgtgctaggttgcatgcttaattaatttaactttgtttgtgcagagaaacaaggatgatgaggcggtgaccaccccagtccggcgttccagcaggttgaggaatcaggttaaatcaccggaggcgtaaagatgggcagccccagtgctaactacgatctgtaggggacctaactatcagcttgattttagcacttgctgctttagcttaactgctcctcagctttcattgacattgctttagcacttgaattcgactgatgtatgatgataaataacagctctctgctgttcttttcatcgaaaaatggattacgatttctgttttttccccccttctttttagttgtgtctgttgagatgactgctttcgtgcagctttgttatgtttgctacctgaatatgaatgtattaatccaggacatcgctttgttaccattctgtcagtttctttgtgaccgtgacatcatctattgtcttccgtattaatgtttcagaaacatgctgtttttcgtttggagtatttcgatggatttacgattatggtactagtagttctgtagtagccacgacaaaacactttgaaacttccaactttccatcacatccaaaacttttctacacacataaactttcaactttccccaaacttctaactttttttaggaactaaacatagcccaggttagattcatattgaaatcagaaccaagcctgccaaattcacttagcattaaaatttcagatttactatgcaaacacttggaagctgtgctgtaacaatcgttcgtgtttctgcaaaaccgtgtgcaaattcacataaaactgctcgaattcatattccattgtgatgggtgtgaatttcaacgctgctaatatttgacttttgacaagttgccatcctgtggcgggaaaaacaagcttaaaaagaaaaaacaaactcaaacaacatttgcctaccggacccacatgtcagcttccaagtagcccaatccgttggctccctgacaggtcggacccacttgtcatctgccccaattcggttcaactacccgcaggagtcggtctccccgccctcctcgcatcgcatcctccgccgccgccgccgccatcaccctcctctccgccgcattagcagtagaatcctaagccataatggcaacctccgccgccgccgccgcgagcaccttgccttacctcgtcgccgccgcctcctcctccgcggcggcgcgccgccgcggggcccaccggatccgggcgtcgtcggcggcggcggaggtggagggggcgatggacgtggtgtcggaggcggagctgcgggagaaggggttcatggggctccggaagacgaagctggtgtgcacggtggggcccgcgtgcgtgggggctttgccggcgctggcgcgcggcgggatgggcgtggcgcgggtcaacctgtgccacgggggccgcggctggcaccgcgccgtgatgcgcgaggtgcggaggctcaacgaggaggaaggcttctgcgtctccctcatggtcgacaccgaggggtcccagctcctcgtcgccgaccacggcggcgccgcctccgtcaaggccgaggtgtgctttctccattttcttgtcgatttggttcccggcattgacgtccggggattatttcatataattgcgcaacaatgccccacaccttcaaatgtgcatcctagaaacatccaatttggtattttggttgtccaaatttgaaataaaaacaattggtgttttcttgggagtaattttgtcaaatttgattgaatttgatctagccggtgaccagatttgaatcataacattcgggtaggatgtccattcatttgggattgttttgctaaatgacaattgttgtacagagacattgttatgactttcatttagcagatggccctttggcatttgatttatttgtatgcatattttatacatcctttatattgcaaaagactaagataaattcagtcttagttagatagtatattccttaataaaaggatagctgctagtgtatttctcgaaagaaggacagtggctagccctttcagcctttgtaatgctaaagcagataagtcttcacttatgttcctccattatgccgaagaagctgaagtaactagattttttgctaacagcattcttaataggacatattcatggttaaaaagttttacggacttggtactactagaagtactagattattatttcgtgcttatagcttaggtttcattagagtatggcactgcaagtaaaaaaagatgaactttggtcatctcgatctttgtaatttacgccttcaaccattcatcaagttattgtgtgaggtagcaaaatttatcgaattagtcctgatctattaccatacactgtttgagttttggttagtatctactcttcattgatactatcatttatctgtaattgtctcagcatctcaatatcattgtgaacatatttttgttactctctttcacacaaatcattccattgtttccttgtttccattaaatattgcaggatggctctgaatggctatttacaagtaaaagaaccgatgaatctcatccattcacaatgcatgttaactttgataagttttctgaaggtctgaagatttgcatggcttttgctggttttccataacaggaatttaaatgttcttttcacaaattacataccatttacagacattctagttggtgatgagcttgtaattgatggaggaatggcaacatttgaagttattgagaaggtcggaaatgatttgcgctgtaagtgcacagacccaggtttgcttcttcctcgagccaaactgtcattctggaggaatggaaaattagttgaaaggaactttgggcttcctacattgtcagcaaaggttaacttaaaatgcagtactttattattgctatttgttcgctttcaatgtagtgtcgctttgttttttcctgaaaaaaacagcatgttttcacttattcatgaagtatttctattaattgaattattgcatttatactgtttccttaaagttgcccattttttttgttttttcccctgaagactgcaacaatttttttggcttattcatgaagtatttctgttaattgaattaatacatttgtactgtttccatgtgacagttcttaagaagtgatagaatttctggatatttccatttcataaattgttctctcatagcatgcttgctgcgtgcatatattatcttgtaggattgggctgacattgaatttgggatagctgaaggagttgattgcatcgctctttcatttgtaaaagatgctaatgacatcaagtatctcaagacttacctctccagaaaatcattagagtgagcagacaactgacatataaagtccttttatagtttgctaaactgaattttctttgcattattgtaaaatggtgtacaattatttgtttcacaggattgttgcgtaatatatatgtgtcaatttattattattatagatgtctatgtgctaaaggagagtcctagaaaattctggagctgctgcagttaagcttataaatcaatgcatcacattgtcttatctagaaatgcaaacctggtagaagtgcagaacgaaagaaaatcgatgctattatttcacagcagagcatattaagtcaattgtttggaagtattcagctgcaatacagaaccacagaactaacttgtgttactgatgtatttatgccaaagttaccaccctattcagtttaggatttgcagttatgttactgttggatagatctttatgcaactgctagctagttgctgtactaatacaatcttgctgtataccagacacatcaaaatattcgcgaaggttgagagtcttgaatcactcaagaaccttaaagacatcatagaggcatctgatggagttatggtagcacgtggtgatcttggagttcagattcctttagaacaaatcccagccatccaagaggcaattgttgatctttgtcgacggttgaacaagccagtgatagttgcctctcagcttcttgaatcaatggttgagtatccaacaccaactcgtgcagaggtaatctatttttttaaggaaataaagttgatataaccacgatgtacggataatacatttcaaaaagaaattttaattccatctacctaacctttttgtgcttctccttgatgacctggcattatctttctgaaggtagcagacgtttctgaagcagtacggcaatatgctgatgccgtaatgttatcggcagagtcagctataggtgcatatccccagaaagctctagcagtcctccgtgctgctagtgagaggatggaatcatggagccgtgaggaaaacatgcagaaacttcttccacaacatcagcttgcaatagctttgcctgataggatctcagagcaaatttgcaccagtgctgcagaaatgggtatttttctaattttcttgtttatacatcctttccagatatccactacctttttctttcgataagcaaatatatattacctttttataatatcatctgatattcgctcatggttactctccctgcagcaaacaaccttgcggtggatgccatctttgtttacacaaagtatggtcacatggcgtcgcttctttcgcgcaaccggcccaaccctcccatttttgctttcactgataatgccaactcaagaaagagcatgaacctctactggggagtaattccacttcagctaccactgtcaaataacatggaagataacttcaatcaaaccatcaagcttatgaagtcgaagggttcagtgaaatctggagacacagtcttggtcgtcgccgactctgatctgaaccgaccccgtgctgctacctcagttttccaatccattcaagttcgaatagtggactaggttagtcattgctgagctagttgctagcagctgcagatctggatggatatttacaaattatacgatgattcttgaaattgttctgatgcgaacttcttgtggtatttggattaggggtcttcatctgcaataagtatcgaatgaaagtgttgcttgtgcgcacctggtattagtttgtatacattccaatcatgaatcatctcccctttttcatactaaaaggcttcaaaaataattctatgttcaaatgttagcgttatgtgcagaatctaaaatgtacgacgttctaaactgtggcccactatgtctatatccaagccaccatgtaatcatacaattttgattctgatacctttgagtcgttctgataacatacgaagtgtatgagttcatgggtattggcattgcaagcataatgccgaagagccctaatttaagaacaatacatacaaaaatttaaagaaaagctnnnnnnnnnnnnnnnnnnnnnnnnnncgtttggtaagcgggaggtcttgaagttcgactctcaacgaaagcataatttatttgcccatttgattttttatgaaatttttgccacgattttgtttgagtttgtgctaagggaagcaattaaataaccatgggtttgagacgatttacttgaagtatatataaccacgatttcattcgagtttgtgtaaggaaatcaaataaccaggattttcttgagtttgtctttaggaaagcatataactaattaaccacaatttcgtttgagttgtgtgttaaggaaagaaataaccacgattttcaaacgctgcgcgcgccacacatgcatgcctgcaagataaatttgtgcacttgtgcagtgaaatctattagtactattcactgtataattggtaagaaacagctagcctaccataatctgcagaagcttgctacaacgccgtttcgtctatgttcattttaagttaaagtagaaaaagccgttcctctttaaagaaagcagtaaaactgtggaacatatactacattcgttttataatatatgacgttatatattgaaaacgaagggattattattatcatcatcatcatcatcatcatcatcatcatcatcatcatcatcatcatcctcctcctatcaattccttttcaatcattttgtatggtttttatggtcatgcctcatacttgtcttcattaatttgcagaaatgagcttatccatgcttgaatgcatctccccattttcgttatatggatgtgaacattacaacctaatatcgctatgtccatggacgtagaacaactagaggaaagttcaagagtgagttggtgtgcctacatcaattaatggaggagcacgcagcaaaatgattcctacgtacccccgatccacaaggataggcaatcatatcttcattgactcaatcggacttataggttgattcttaaagcatcatggattaaagcggatatagcacaagaaagatcatcggggaaggaggacaacacctacgataggaggtctaggattggaagccaaattgagcttgtgcctgttagagatcgagttgtaaggatcctaaccattgtaatatgagtaattttacactccttgaggagatagtgggagataacatattttctaatgtaaaatttggtacctcttggtacctccaatactaagaggtatggaaatttacactaattattttttacctctttgtgtctctcaaggactacaaaatttctcttgtaatgttacatctagaagtgatatatgctaagcttccaatacttttgtgcttgtagtctagagagcttattagaatagtcaacgacgtagggcatgcgcttggacttaagagaggaggagagcaaacagagagcactccgtaatatgctagaggtaaattgtcaaactattttacaattcaaactttgccaaacatgctctaacatcactttgcattaattcattattgtggaatggcatgtagaagatgttgcaaaatggcggctcgccttggatgtcatttaggtggagtatatgtttttatcccttgccacctctatgaaaatcccttaattgatatgtccaagtgtagctagaacatccctatcgagctcaagacaccaagaaggcgatgcttcttcatctcatacccggaaaggccacggctccaagtgatgacgatgatgaagaggagaaggacaacggcaaggattacatcgtatattgtgctgacgagattgggccatctcaacttgacaatgcacctcagccatctcaacctactcaacaatacaacacttgttgtaaccaatcgataaaacttaatacattgcaaattattagacttcccttcacattctcaaaagtaagtccttacaatatgtaggtacactctttggatggatgttattcgacatcaacataaaaagtgaagacatgtttttacaaattgtgttgcaatgtacgttgattactaattgcttgtgatggactacgtgttgtaatatcatgcaatgtgaaagactatgtttctatttgtatcgactatatgttatggtaatggatatgttatgaattgctatggtcaacaatatcccatgtgtataattgggatatggtaattttttatgagatgtgctatattgttatatctgttgtgcttacacaaatatgtataaatgcatgtggttcatgccaaattttactgtcaagttgttctaggaataatatcttcctaacaaaaaaaaaattccaggtgttgccaggcttggcaccagcctcaccatgtgcctacttccacaccttggcaccagaggccgcttgaggcaggaggggaggtcgccagtaggggtgagaattcggtcagaccaaaccaatagtttgttttttttttcaaaagtttatttatctagaaaggataaatgattggttcctagaaaatgtcaaggctgagtgtttttgagtcagttagaaccgaactaaacaaactatcagagaccacgtcaaaaggcaaatcataaaacacgatagtttacattggatttagagatctagaatagatatgagagacaacatacaagcaccaaatccaaaaacaaatcaccgaatcaccatagtttttacaatggaaagagagaacagatctaagagcaattagacatgcatgggagagacatgatgttgccacctaaggatagcagctgggatccaccaccagcctctcctgactccatcgctcgagccatcactgctggtccctccatcctcgacatcggttgtgacgagcagacagggtcgcccggagggaaggtcggagcggcggatcaaaggaggaggaatggaaatcaaggaggcggaggaggaggcgagccactgggcgactgctgcttgcagcctcataggggcgtaggttggcaggatggtggcgacgttttatgtgtggtgggaagtggatgccaagtgggagaggacaggaggggaggggaggggagctaaccaaatattttggttttggtcaatttggtttcggtttattatgcctacccctaggcaccagggccttggctgagatgccggttggggggggggggtcggtgccagcctccttggcgtcgagctgcaacacctcgacgtaagcttcattggcattgagccctagccaccgcatcaaccaactaggcatgggtgccacgaaaagggccaacggggggagggggtagagggtcggcatcgagccattggacctcggcgccaaaaaagggttcgttcctaaaataaaattttcagggtctatttatgaaataagtattcaaaagggccaaaatgtaaagattttaggcttgtgagcactcgtctttatgtcatgtactctagtaagtaatagtgtacatgtataggcttttaatgttgatatttttctatccatatatgaatcaaaggttttatgaaatcgaaatcgattctttcttagatatatagatagatggatggatctatctttctattcagatatcttttgcaattattcctaaatccttgatttggccaggaaataaagcactgctttggccctaggaagcgaagggaatgagctcggctgcttctcctccacgcttctttatttctccgtgccccttctgcatgcacttcacgcgccattggccctttgctctcttcttgtttcttcattggagtgttcggatggacttcgctgttctttcccaatgaaaatggaaagggttgtatcacatcgaggtgtcaatccgttttccgccccaaatgagatggcgattagtcacctttgtcccttcatctttatgaaaggaatcaaggcccaaccaggctcgcgttgttccagtagcgcctcagtatactatcgtgcacagtaactaggagtcctattacacctaaggccaacttccattcaccaaacccaggttcatctcgtgtagtgattgtggactcgtacaaggatatggagtcgacggttgatgtatcagactcgaccctgtctttcgtagcatgcattcccatccgtgttgcaactgatttggtaagctacgtgtccggtgcaaggaaaattgccttcggtcttccaaccttactcatggcaaccttctggccgctcaacaacctataatgctagtcactactcccactggggctaggaagtaagccccacaacccaaagcggcgaagaacaaatagaatttgctacaaaagcctgctaacggggtattcccgtatatgagaacattgtaattgagaaggttatagccaaaataggattcggaattgataagtattgtgttcctttaagatgtacaattaattaagttctgtcaggcatccacagtttctccatgtataatcaaattttggagggtttggttcctaaggaaataattcttatatgatcatttggaacaaaggaatggtttccccaaattccttattagtattgtctcaaatcataggaattttgaggactctcaacatgaggttctaccatactaggtaaaattcctttgtatctatatatatctcttctgatttttgtgtttttcatgtgctccatctttctgtagtttttttttaaagtttttatctataggattggagatgacaaggcactcgtgactcctacgttttccatattcgcatgttttgaaaatccgtcattccaatgaccaaacaaaggagccctaattgtttgttttccaacttctagcttgaattttctaattttgattaggttacttattattctgcagggaaatgtccatttaatgcgcaattgttaacgtgttttcactttcagttatttcggtcgtatcagtacgtgaacatattgacatattactagctacagattgaacaagtgaatgttcattatattgtacaaacatcttaacaagtcttaataattatatatttattatttcactggtactctgctagtacccagccttctcacctctcagatccaacagcctatatatgtgctacagcaaacatcatgagagcatcttcagtgcccagtactacctaacataaagtacactactgcagcttcaagagacttcgctatatacatgagctgataatttggccggatatatacatcattgagtatgttgctggattaaattccattaattatccaaaaaaatagctgacagtagcttatggagatactcctatgaagcagagatttaattaatttccgtctctgcagtgaaaattaattcagaggtacatatatatacgtagttatacatcactaacatacaaagggccatcattgccatttcatatataaccgacatcgcaatattggtttttaatccagcagcagggcaatcgactgtgatagtatcactgccacgaatatgcagtgcagcactgtatattctgtgcactcgtgcagtacttgagccctggagatgctattatgtatggatcttgggttagattctgatcctactgtatattatatatatgtatatatttaaatggttctttccacaaatttcgttagttccaacacacatcgaccgtgcagtaaacaatatattaaagcaaatttaataatataatcaactactagcttcaaaattggaacatcatcaatagctgacctagggcctgtttggtagggctccaactcctaaatcctagctccaaactccaactccagtgggagctagctcctgttggagctagagatactcctgaaagcgtttggcaagcctgctcagctccagaaattctgaaagagatgataagggggagatagacaatactacccttattgttttcttgtttatttgacgtaggattaataacagttatttctccttaatatttgaacactaatatggaaggttaaaatttaattaaaataaaattgataaagttctagttggtgcatgacatatatgtaataatacaaatgtttagaaataataaccggtagcattgtcatctaaacatagaccaaaagagtagaacagccatcatcctgcaatagaccaaaagagtagaaaagccatcatcctgcgatacggccggctaggtcatcacgaaatgcatccatggatacatcactttgaccctcggtagatgtatccgatgcatcttgagaaatgacatatctcctaaatctagatggaatggtaggcacataatccggattcctttcaaacctatgaaaatgcctatccggagcattat

SEQ ID NO: 20176 - DNA, 3142 bp, Oryza sativa
aacaagtggtagttaccttggggaggatggggaaagatatctatatcggttctcaatgcattaaatagcacggttgtgtcatgcatcgagccaggttgtccaatagatgcataggtaaatctcatatcatggtcacaaatagccatcacattctgagtggttgattttgatctaccaatatatctaatcttatcatcatctggaacaactgcaaggatatgagtaccatcaaccgccccaatacaatctttgaagtgtggccacatacgacgatccttcctaattctctcatggacattagaaaagtttggatcctttggacgaacaatatcacgtcccaactccacaacagcaaacaatacttcttcaatttttcttgatattgtctcaccagaatgcttgaaacagttttgtgccctttggtttgatgaaccatcacctagaatgtacaaaaaaattgcaagtgcctccattgtatgcatgtgcacagtaggtgccaacttatatttatcaaccaaaagatcatgtaatgcaagaaaggtgttgccattcatgcgaagcatcctatagcattcacctggtgtggccaaagtttcttgcacccatcccattccactaagtcttgatgtcctaggcgcagccttattcatgtagagagagtgataactctctgccattcttcgagttgaagaaatattgcttgtcacagtttcaaacaattgcatggcaagcaaatcacaatcatattcttcatctgatgaaccatcttcactctcacttgacatctacaaagggagacatacaaaatcaattagaatagtactgcatatctacaattaatcgaacagtactgcatgccatacatatgaaaataatccaagagatatatatctgaaaataattcaataatagtgcatgacatatatatgaaaataatccaacaagattacatgacataggtctgaaaatagtagttcagaacccatacaacaaggtgatacaatccaataatagttcagaactgaaaatcaaataacccatacaaacatgtctcttcagtagatagttctgaaattaaatgacaactaaattaaagtgatacatttcatggccacattgcattcatctaatttccatacttcacatcatacttcttcttaagccatgcaaagcgtcctgcaggagtgcgcaatgaattaacaaacatctctctttgatccttcttgatgaaaatttcagttgcaatgaagtgttcatttgtcccttcaacagcaccacactcctccaccaaggtcataacatcctttatagaacaacccggtggatcctctcttattttagtgaatgattgaatggatgataaagtttgtgcagagagctcgttactctttgacatctcctccaccatcttttgggatccactctttgtttttttcagcttatccaccttcgagctatctcctctcttctctttgcgcttggttcatcttcatccgtctcatcgtcaatctcattgacatcggcaatttgaatagtgccattagtggtggctgatggtatggtgccttgccctaaagaccaatggtcggcaccggtattgcgaatgtcttcaaacatcttctcaagtaactcctcattttgaagccggcctttctaaatttgaggcagcctgctatatcctacatgacatgacattataaaaataagttaatacacaattttggttcgcatttgcataatttaacaccgtacgacaaaaacttacttctttaagttgtttccaacgtgctgctgtagctgtgacggtttgccttgcgtcatcccatcccaaacctgtttgagatttcaacttcttccaacaattgtactcaatcctaagtttatcccatttgttcttaatttgaagcctagtgtacctcagccctgtctttgaggcaaattgctcaatgacttcgtcatacccagaattggataaatgggtatttggacgattacccgcaactacttgatcagcaaaaatctcacacacaactctagtgttgtagtcattccaatcagcatagtcaattggcattttaacactcttcgatggcacattttcagccatgcctgccatccactcacaccatagtttcaaagtttagataaaggttcagaatgcactactataatttcacattgtgtgttcatgcagggttataatacatttatacacctatgtatcaatctgaaatcaagttatacattatcctctcaagcatatacatcaatctaaaatcaagttatacgttatcctctcacactgcaagagaaatagagaacataacatcaatctgaaatcaagttacacatagtactctgcatatttttacagcacgcatctttgcagatttttacagaccatagcaagaaaactcagggcctcctcatggaccactacccgttagatctacaactccatgtgacacaagattgagcaaatatcaagcaatcatccacccaaaaaattaaatccactccacaaaaatcatgctgtcatccgaaggaaagatttggggggatttctagggttttacagatttgataccttgtggtgctgggggatagggaccggcttcctcgagcttccgccgccgtgcgctgccgctgtgagcctccgccgtcgtgcgccgccaccgtgcgttgtcgccctcgtctgcaacaaggtccgccggaggtcaagagagggggaagagacaatgggggaggaaagaaaagaggggaaaggagaggggatttgagagcgcacctgctcaccgctgccaccggttcgtcgccgtcgctggtgtgcctcaggcagatgcgctgcgccgccgcctccttttttttcgcaagcgagactcgctggtgcggcggactgaggggatgcgatacaggcaaggggagggggaggggtggagggagtagttcgatggcatttgcgggtaatttttcttaaacttcagtggtacttctaaaatttggttggagttagagttagggagcggggggaatgccgctccgcgccgctagtacattttttcagagcgatccgcctactccgctccattttttttgtggagctggactgtttggttggactctagttggatctgagatgaat

SEQ ID NO: 20177 - DNA, 19682 bp, Oryza sativa
tgccaatgtatacaacctgcttgtgttactatactacacccgctcttaggaagtactacctccctcttaaaagactgtagttatgcactatttatattcaacgtcaggctgtccgtattatttaaaatttttttatgattagtattttaattgttactccctccgtcctaaaatataagcacttttagctatgaatctagacaactgtgtgtctagattcatagccaaaagttgttatattttgggatagatgtagtattatgtgataaatataaatagtagtttatatgtgactattttttaaattttataataaatttcttaaataagatgaatggtcaaacgctgaacacaaaaattcacaactacctacttaaaatgaaatggaggtatatatattactactaataagggagacatggcacgtgtggttttagcatggaatctgatgcatctcccaaaaggtggtaaatgtggagggccatgcattgcctgcgggagcagcatccatcaatcatactacgtactagttttgtaggtttagtactgatgcaccatgcacaaacatggccaaggacccgacccctgtagtagcacgtttctctgtaactccaccacgacggtcgttgggtcctagctagcttttctgaacgacatggactagtgttattttcttctctctctctctctctagctctcatttttttgggaggagattaaaggcagatggattaattagctgaaattacgtacatagagttacaatacattcttcactgtatatatgaacgagaggatattaattggcaagctgctcatctatccatgctggagagcttgtaaaccctactaattaattacattacattgatccctcttaaccttctgaaattctcacctcagaggatcgagatcagttatatcatcttgttctacgttttccaaaactaggatttcggagatgcatgttggcattttgtatcctaataaatcatttaagtactaaaaatttcagcaaaatctataatctttcaaagcaattcatcctttttatctcatcactaatgtgtctcagaaaccagcttgaactagcccaccactatagtatgtggtgatgtccgccatagctaccaaaaacatgagaacctcagctttcttggcttctctcaccctctgcgcacaaaggacgaggcatttattatataaaaaacccatcgcttgtatgttaaaacatacatcctatctaacattagctatggtaaagtaaggcatagaaatacaaaatacttcccgacaacttgtagccaatgtatttcttgtaagaactgatacacacaacactaatcgactacatgttatttcagagatccattctttaatatggtgtagctttatcgtgatctgcatgtctttcacgatctaggatttaagagaagcatattaggacaacaacattttatatcctaacgaatcatttatattattggaaaagttagataaatctatacattttgaaagcaagctagttatgctcggcatcacttaaataatgtgtctcagaaacccacgctggaattgatccactagaatagtgtgcaatgaccaccattgttaaccaaggacacgagcgtaccctagctttctaggcctccctctccatatgagcaggaaggctgggatgacaagacctttattacactataagttctagagttatgcatgtgcgtacgtatgacactagttgcaacatatgaaacacttatatcaatattagtaatgcatacaaacaatttaaaattagtgcttcattataacatgtagcgaattgaattgtcttgcaagaactaagtggttgttttgcaaggctcaaactcctaaatctaactgtaggagtgaaggcgaaccctgctccactcttctagttctttctagatcaacttagctcagtccactccaatggactatgtaagcaattggtctatggagagagagagagagagagagcatattttcttatttatttttacacatggattaaaaaaaagactaatatgtgaaagtgcaactagggattctagtcataggtcacctgtgaaaattattttttataggtgcctcccttatgaggccgaacataaaactcagaccatttttacaggcaaacttctcaaagatccgcttgtgaaaatcatatttcccaaaccctcgcttcctctctcctctcccctcagacccctcttcaatcacgttctctctcccctcaaaccccccctctccctctattaaccaggtttgcaggcggcgaaagataggtggcggcaacatctgtggggagggatggacccttcctctctctcccttaccatgctcacaggaggcggtggcaatggcaaagtggagatgcggtggtgttggaggatgcggatgcgccatcacggcacttggaagaagtggatctaccagcggcttggttgggaactccttcccttcttcctttgcaaccactgtgacaccgatcgacaagctttgctgaggcggattcatcggcaacaaccttggaaacaccggatctatctgttgtgggctgcggagtggaggtcggcggcaaaggtgctcaatgaaggtgatgatggtagtaggcagatccaggcgaggcgaggtcattaatggcgtcggcggatggatccaaatgaggcaagggtcatccaagacaatgaagctgggggagccctgtatgcaacaagaaccatgtcttcgctccacttcttgtctccaaatacttggtcattcctcaagcttacttgcctttgagaaccatcttatccgcctccaggaggacctcgtctttgccctcgaggaggacctccatgcaaaacagctgatcacctcatcgaacttcaaggtactagccaggctagcttgtacggagtggcttcaaggggaacatttttctctactgctgaaatctgggtttgttggaaccatgccaccctaattttgcaaaatttgagatatgccacccgtatgaatttggcatgtacaatggatgccacaagcactagtggtctcaagacgccacatatgatagaacaacacaaaggtcacactagccgcagtgaaaccactgcaaaacgtattttgcttttcagcccctatctatttatatgtcagtccttatattgtatgttattatcaaacctattaaaactttatattttggaccctataacaaccaaaataagtacatatgcacccctaaacactatacggacccactgtcagcctcttcccccctatcttttttattctctctccctctctcccccctctctccctctctcccgagccatctctctctctccctctctcattcgccatattcgctggtgagctccccatctcagcggcgcggacaagttctcggtggcggatccggaggcgggctcgacgccgccgtcctcctcccccacgacggtgcggacgagctcgccgacggcgtggcgagcttggtggcgtctggctcgccgaattcgggcgcgagctcgctggatctggcggcgggggccacaacggcggcggttcctcttccccttccttcttctcgagcgttggcagcggatccggatgcgggctcgacgccgccgtcctcctctccccacgacgacgcggaagagctcatcgatggcgggctcgccggatccaggtgcaggctcgccggattgcggcgagggccacaacgcggcggttcctctccccctcccttcttcacgagcgtcggcggcgaggagcaacggtggcggcgatgcgaccggacgaggcaacgcacggggctccggctccgccaacgcgtggcctcgggctgtggcttcgcccttctcgagcccaagcgcgacgcttcgagcggttcctctgcaagcgcgaaatcggtctgcggagccacggtccccactgccatggatgcgcgtgtccgacatggagggttaagaccacaagccagagccacgctttgtacatggcctgacaagaaatcgaaagttttatcacctgcattgacatgacttgtgcactatttttgcacgtacgccagcacatgaaagactatcaccggcactgtgccgtcacaagctggttgtaccaaaatagtcttgtcttggtgttcttccaggaaagatgccgccaactaaatttagtaacgtactgtacgtacagactacagtagtttggtccaacgtacacggtatcacaggatcaggtacatggctattctcaatagtattcttttaattaaactccggccacttgggtaaaaattcgggtcttctttgatcagtatagctaagatattttgtaaaatccgtacgtgtaaacaaaattcacaaagctatatatatagagagagctatgatatttctttaataatgaaatgaattatatcttgggacatatataggctgtgttcttcctgtacactttcccaacttctactcactcatttttcacgcgtatgtttctcaaactgttaaacgatgttttttatttttacaaaaattttctatagaaaagttgcttttaaaagatatattaataatccattttttattttttagtaaatacttaattaatgatacgctaatatgttattccattttgtgtaccgtgcggaaagattcccaaccgccacaatcgaacatatagctatagatgataactaaacttgtgccgttcaaaggactcatgtaatagtagcttcaatcaatcctgatatatacaatttaattaaaagaactatcctatagttgtagagtctgaatagatttccattatccagtaatgcacctaaaattcgagcatgagatgactctagctagcttggatattggtggcggcgagctaacttggtttctcacattaataatttacttttaaaaaataaacattcgctctagttggtttgaaataaaaaaaaaattgaagttactgaaagctgagcaatttcttcaggaccccgtattgaaaataattaatacttccttagagcgttgtatatatgcacacgttaggttagcacgcgattaatcaacaattaatagattggctagctactagttgcatcatgagatgtggatatctttgcatatgataatctgacagtgggttacgagtatcattttggtaggattcggccagataatcgcgatcgccagaaatgatttgtatattaattccgtcgcttttggttgtcctttgtggggaaagggaaaggtgatcgagagtcgtatgcataatattagcggcaattttggaggagacatagcacgtcaaaattaaatttaaagctaacacacaaaaggcatctgcttcacgagtgtagttactgcacgtttattttttgtttcctaaaagtaagtccaaagtgcacgtttataaactgttcttccttttgtttagattctatatctagcaacgattttggcgcagtcggtttgattcatgacaaaggcgagccgatatgtataagacgaggtgattcagccaagagtacaaaacaaaatggctcattttcaaatgagaaaattatttacagaaactttggagctatatagccatccaaagttcctttctaaatactacaaacacatgcatactttttttgaatctctttcaaaatgtaaggtacatatgcgtgtaggatcaatatgactttctgccttttactatcatttaactatagtctgttgtgttaggtttttatattttgggatggatgaagtattaagtccaccgccccccctcccccccccccaaaaaaaaaaccgcgctcacacacatttcgtatcctcttttggttcaaatcattaactccataggtacactggctgttcatgaatgtagctaggagacactgcacgtgagatatttcactttgttaatctatatatatggtactgtatagtacaattgatggtactacataaataccagaggtagcacatgcaaatcaatgttttgtttagggagaaattttatggtccttacaagctgtcaaaatgccaatacgaaaaggttaaataaattacactaaaaaattggtacctttcggtatctacttaagaactacaaaatcactcattttaaggtctataatgttagtgataccttccaagtgttgaggtatcaagagataccataaattagtatagcaaatctttggattatgacaactcctaaagtaccatgaaaaatcccatgattgtttaaccaaaatatatgcaattgactaagcaaaagggagcagtcgtcctagtggaggtgctctatatatgtcaaagaagagaaaagcctctgacatgatttatatggagagaggtggttagccagctaggccaagcacaaaaaatcctcgactagtcttgaatggtgttcttcagagtgactctctcttccatacattgtcccaaatattatttgcatgttaagcaggatctgagagattgttgatagatctgcaggtaagtggtactgtcccactgtcttggctacaaacgattctgtgtgtttcacgagctccaattcaatgggcaatctgtagtggcatcaagtcagctactgttcttgtctgtgattgatagctgtatatgtctcccggatgcatggatgatggatctctgtgcttgtttgccagtagaccagtagccaaatagttttctcttcagactggctgcaaaagtttttgttcgaccattcacatctcgaccagtcgattttctgtttgaatcatgtagcttagctctcgctcgatcgtccaattaatcttggattcttggagatatataactctccgatgtctagatcgacattgatcagactcaagagtgaaatgtttgtttgtttgtttgttattttgtctaggtagatagctagtagagttctttttctttggagacatggaggactcgagcctgttcatggagtgggccatggagacgctgcagcacctgcacccgctgccggcgacgccgccgcctgccggcggcgggtacgccggcgacaacgcgacttttccgtcgctccaagcgctccgcgagtcgtcggtgtcgcagaacggcatggccccgccggagccaacggcgcacgaaggccaccgagcctccaacagctggagctcgggcgacacggacagcgtgtccggtggcggcggcggcgcggtcatggagcacgacggatggtcgacgtcgccaaattcggtcaggtgcgccgctggcggcgggggcggcggcggcggcggcggcctctggcccgtgagctggaacttctcgtcggccatgacgcagccgtgcaacgatcaggccacgccgtcgaacccgccgacgacgacgagagcgcgctacggcggcggcggcgttcgatacctgccggccgccgtgtcgccatcgccatctgcacagacacggagagcctcctccaaaggcaacggcggcggtggctccggctcctcgtcggcggcgccgtacgcgcaggagcacatcatcgcggagcgcaagcgccgggagaagatcaaccagcggttcatcgagctctccaccgtcatcccgggcctcaagaaggtataatacatatatctccatttctcgctcatttctctcaccatcttctctgaacacgaagatcgatttgaacagatggacaaggcgacgatcctctccgacgcggtgaggtacgtgaaggagatgcaggagaagctcagcgagctcgagcaacaccagaacggcggcgtcgagtcggcaatactcctcaagaagccgtgcatagccacgtcgtcgtcggacggcggctgccccgcagcgtcatcggccgtggctggaagcagcagcagcggcacggcgagaagctcgctgccggagatcgaggcgaagatctcgcacggcaacgtgatggtgaggatccacggcgagaataatggcaaggggtcgctggtgcggctgctcgccgcggttgaagggctccacctcggcatcacgcacaccaatgtcatgcccttctcggcatgcaccgccatcataaccatcatggcaaaggtaagacaaattaattcgtcgttttaattcgagagaatttaaccaacttgttttgtgtttttttttgtaaatgcatgatatgtcttgtagttaatattccactctggtcaaatatatttgatgttgggagaatcatgcatatgtattaatttacagctagatctctcaatgtcaaatataacatgtccaaataatatggaccagtatggcttatatgctttaaaatttgtggcaccagtcttagggcccatttgaatcgtaggattgaaaaaacggatgaataggaaaaacacaggattttgatagaaatgtaagtgtaaaacaggggattgcaaaacacaggaaaaatatagaaatgactgtttgattagaccgcaggaaaaatgcaggaatgagatgagagagatagactcaaggaaagttttccaagaggtcagagtggatgttaactttcctacgttttgctctataattgtaggaataggaaagtttcctacattttttctttttcttattcctatgaatcaaaggcatgaatagtgtaggatttcaattcctttgtttttcctccatttttcctccaattcaaagggggccttaaacaatttacaagatcaagtaaggttatgaccacacaagcgcttcgatttaagaatatttcgaattgatcatcttcaacaagcacggacaaagctgtaagtaagtaaaaatagtttacacttggtgctggagcataaacttttgctacagctagcatatgggtttgctttgtgctgagaaacgtctaggggtctttcggctagctccacaaggtggtgggctagacgacctgggttcgaagcctcacctcttctaatcaattgatattaatggtcattccctaatattcacgtctgggtttgccttgtgctgactgcaggagtagtaagaacactaaaattcataaggtatatcgtgatgataatcatgttatgtagtacaacatatcttatgactacagtcattctttatgcacttcttatatactttctagttgcaagattttcaattaaaaaaatgctgggcctgtcaattgtaaatttattgctttatacatgcataatcatagtggcttataattaggtggaaaatatttttttaagagaggtggaaaataaaattgattgggataaaactatagtacttggagtagctagtatagttaactaattaatatcactgaaaacaaattttggctatgatatgctatatagggtaatatttatcacctaatcggaactagatcttatacatatataatggcttctgtaatcatcacagtaagaaaaatggcttcatgtttccgaacttgccacatcaggaatcactaaaactaatatttgagttttaatttctcatatcatatactatatataataatatttatagcaataaaataatagttgtacgaaataaactaaatgcaaatgttgatctaatgatattgtttttaccaaatacagtttaatttatattatactccctccgttttataatataagtcattctagcatttctcacatttatattgatgctaatgaatctagacatatatatctatctagattcattaacatcattatgaatataagaaatactagaataacttacattatggaacggaggaagtattaggctaattgtcagttatatatttgaagacttaaatttcaaaatgtccgcccatcttatttagtggaaggagcaagtaaatgcataacttcccccattaaatttacatagatttaaattcttgtgcacatttattttcgctagaaattactccccccatcccaaaataagcgcaaccataagttttcgtgtccaattttaatcgtccatcttatttaaattttttttaaaaaaactaaaaatatgagtcacgcataaaatactattcatgttttataatctaataaaaatatcaattataaaaagattttaaataagacggatgattaaaattggatacgaaaacttatggttgtattttttttaatggagtacgtgtttattgttgattccgtcgtcgtccacttaactattgcatatgtacacggtgtcaaacaaaatattactccggaaaattatggcaagctgaaagacaagtgataattgattaattgatttatgcaccggaaccaaaataattaagaatgcatctacatttatttaatacgcttgcgtggcagcaccgttattttttagtcgatagcagcggtcctcaacaatattaattaattgatgaaagcggctgtgaggagatttttaaaattaaaagtcatacttaaaatcaattagaatgccaaattcatcttttcgtcgtatcttccacaaaatctgagtactatatataactggtcgttgagtggatatgtatagcaggtatatataaatgcgcgtccactaattaagtttgaaagctgtaatatacattgcaccaaaatttataccagtactaatttcttatacgggtcgcttataaaacccttcacgaaaattcgtcaaaacgtactgtcatgaaattaagttctcgcgagtttgcattcgtaattaatatatatgcatattaattatacgatttaatttgcatcaggtggaggacggggtgagcgtcacagctgaggacattgtagggaagctaaacactgtgctccagcaaaacagcagaaatagcgcgcgagaaacaaaaagctgacaaacagcaacaaacgacagctgctagctagcttggctagctactcaatcaggcatgttgccattgattccagaacagtgtaaacacacactctctctcgatctgctcgtcgtgtacttgcgtgcatctggcccgtgatgcatgcatttgcacaaataaatctagcactggatacaatttatcttagtgcaataagtttaaatatatcatatttagtactagatttagttttttggacggagagaatactagctagagctacgaatgcactctctatagccgaataatcttaagatgtaccggttcaactttttttaaagatgttcataggagataagatgtgtgcatgtacatttatatcaatgagtgttttgcatgttatgagtatcatcatttgtacaatgttttttttaaaaaatattatgctgatgttgatcgattggtcaggaggattcatgcattttgcacatatatttgcgcttatatatgttgacactgcacggccagcgaccgatcgatcgatatacgagaatctcttggatgatgaccattggattgatcgaccggcaactagctactctggctagctagttttattagctcgttctcattgctctccggcaccatacttccgctcagatgcaaataattcacttttcaaaagtttccaagctaggggccggcctccatgaccatattcccaatgcatgcatgtgttcagcatagtctccatcttcatgttactattttttaaagaaaaagtacgaattaccgtcttaaattatcatagtcaaccgaactaacctaaacataaaaaccagacatctttcacccccaattttataaaccggataaataatcccctagcttaatcccggtagttttggtcctatgtggtatacacgtgatagtccagtcagtatttcttttaaaaaaaatcagtgcggctcactataagatctctcccctcccacctctctccaccaccaccacacgctgcggccgacgaagatgctgccccctctcccaccaccccccctctcctcatcctcctcctcctcacccaccaccggagaagctgccgccgcggacgacgacgatgacgagggatgcccttgcatctcctcatgagacaaccttccctaccgagccgaactcctcagccttcgccacggtgccctccttctcggcctccgccggcacgtgtgtgcagatgggagagggctggatgatgcccttcttgtagagctttgcacagcatgggcttgggtgcagacggaggtcgcaagtcccaagcgggcagcggcatgtcgtccctatccatgaggatgtgccacttgcggtggagctcatcggccttgacgcggggcatgctacggaggcgcgcttgagctgtgttgccttgacgaaaaattgttgattggactgccacacatataccacgtaggaccaaaaccacaacggattaaatcgggggagggggggttatttgtctggtttacatagttggggcgaaggatgtctagttttcgagtttgggggggaggggtaattcaatcgaccgcgatagttcagaaggctaattcatacttttttcctttttttaataaagacagtttaaatcttgcgccatacctattcgatacaataaatattagtgtaagaaaaaaaagacatatctacagtggtaggacaaacccccgaactcactcgaaaagatgaccaatcaatttagcatttccatatattttttttagataatgaattttcattaatccgatctttatatctatgaaggatatacacagctaaaaatatacaagagcacttagactcacacctcaacaaagaggagaacacacaacaaaaaaaaaagaaaagaaaaacctacgacctcagcacaaccctgcttctcgacatcctctcctgaaatgcccagattcggcgagtggaagttgtctagtcatcgctgcccctagtgtgccgtcattgcgaatctccgctagtgccatgttcatctacttcaagtgagctgacgccacgcgttgccggttagcccaccttcattcgtcatcatccaatcagaactagccgaccagacgcaagctgacaggatctgcttccgcttcgtcggattcctaggcctctgccacccataggccatagggctgccaccttcgactatatccttctccgtctcccagatttctagcccgccgctacccctagggccgccgctgccactgaggaaatcctcttccacccggactccgaggccttccacacctgatgggatccgcctcctcatcgttgagaaccttgcaccggtgcccaggctaccgccgcccctagggttgtagccgccgccgtcgaggaggtcttctgccttgatgcccaggccgccgccgccgcctacaggaccacctccaccggatccgccttctccctgtcgaggactagccatcgacgcttaggtcgccgccgtcctccgccacgttaagtacatgaagataagccctagtataatcttaacacttagtattgttaaaaagtattatcgttacaacaacgatgaattcaagatctttctattgcgtaccaatgagttcatcattgggtgcactcagacatacaacattgtcatctctacaaggttgaggataccgataggactttctcttgctactatgtcacctatggtgttattttgcagatgcttggtcgaaatattgcatcaagtcaaattgttgtagtggtttgttttcatcatgttgtgatatttcattgcaattgttctttcgatttgttgaagcaagatattgcccattttgcatcaagtttttatcgtcaccatttgtgttgcaggcttattgtggacatttacaaacatagtacttgctagattgtaatattaattgttgcggcaggatttgagatattgtatctactatggggagagatagagttcttgtgatatttgattctttttttcgattacacggcacatactactacacaacacacaccatacttatatatatatatatatatatatgtggggcaccatggtgctcgggcaccatggtatgaaattcacaaattcgctcaaaattttcaaattgtgagtatatacctagttataagtattcgattaatacctataccaagcaacaaaacaactcaaatttaactttatttcacaatccaatattacatacctaactaattatatgtttggatgctatatacatagaatcaaaatctaacaaaatcatgtttaaattcagttcaaacttgttttgaactagttaatgttaatacctagacattttaaaaaatttcatactcatttgaattgaatatatactcaatttgaatcatgaagctcgggcaccatggagcacccaacatacacacacatatatatatatatacccacgagtgcatccccttctaacacatgctcaatagatggactgatagagagccaagataaattcatgagccttactaaaacattatcaaaaggcggtgaacctgagtgtgtgctcataattatttatttacaatagtttttgtgtagaaatatatttacaatatataattagtattgttgcatgatcgagtcctaattgttggtgtatcttgtgtgtgggagttcattgtattgtattaggtggttcaggtaaagccacttaagtgagtcaaacgatggaatggacagtagtatgataaaagttgttctgtggatgatgtccgatttgtagttgcgtcctttcatttcgtggatgaatatgactgtttgatacgctaggagctttatatatacagctcctgcgagtgacaaatatcgatagattctctgcgattgaaagatataaatatatatccatctttagattcacattgttatagctgggtctaatatatataatttatatatatatcagtctttgtattgcctctgtatatattattatcaactagattaaaaaaacgtgtgattgtatcagtgtgtgcatttgtacgatcctggcgcaccagcagtatatatatatatatatatatatatatatatatatatatatatatatatatatatatatatatatatatatatatatataaaagcttctagtatccaaatataatacacgcgcggtgtataaacatacgtaatatatatgcatgtagttttgtattgcagttttgaaatgcacatatagcagagtattttgggacatgcatcttaaagtttttggcacatatatatgccgtctatacatcagctgtgagttggtactacaagaatctgtaattttcttagaggcaaaaatcgttaaggatagcataaaaaccgccaaggtaatgacgatttttgtatagtatatacatacgtgtacgcatataatacgcatgtccttccatactgtctacatatgcaaaatgattatgcaaatctacgagcataaggctttttcagttagcttatattatgtcatgtttaattagcttattatatatgctctttggaatatatatacagcttggctagcaaaataatcatgtcttttgttgtgctgcattacatatatatactgaagaaattaggaaagactcaagcatcgacgaaaccaacatttggagtacatatttattttgctgcaaaagattgagatttcgctgatggctgagggtcccagcagctttgcatgcatgcatacatgctcgattatctttaattagaatggttaggagctctgccaatttattgaaaagagtaacttgaaataaagttacagcagctatcaaagatggatacatcaacgccataacataaaggaaacatgcatgcttaattatcttgagatatgttaagttaccaatactttggggatgtgtccccatctgaaactgaggtgaggatattcacaagatcaatctgacaacctcttaggacattgaaccttgcttaccaaaaaaatatatatacatgatacatgcagacagagacacatgcatggccatgctaggtcgatatcttggcaattagtgtgaaatagtccctgacaagcaagtcactaatttctgggccagggcagctagctgaatgtcagcacggtatataccatggagtagtataacgacaagtagtttgttcgcttgatcagatgggccgtgcaccacctaattaaacccgattgagaccagccaggactactgctatctgatttttttacttgactttattcattttttcgatgtgattgccacattcattctatatgattttctagttacccggaacctcctgtccctgaactccggatgtttcgggctgcctgccaggaagttccgggccctgtttaaatttgaccgccgcgattatttttagtgtttttcagttaagcctactcaccctccccccctctctaggttacatcttcagcttttatgtctggcagcggtgagtacggtgtcagtgagcgtggatggctcttcctcctcgccccgactccatgcgactccgggatagtggtaacgttggccatctccttgctctagcggcatagcagggcttgggtcagccttcccctttcgaccatggcacgggagcaagcaggtgctctgcagcagagcaagaggacgaagctgggttgggagggtgaggtggtgcggcggtggagataggggcaggtacgtacttttatcgctatttctctctccatttcctcctaatataataaaataataccgcaggtgtccagcaaataattaccttttttttgcggtgtcctctagcagaaacacgttcttgtggtatcctctagcaaagagagccattgagtgttgagtaaattttgctttgtaaagctgcattggagggattcctcaccgaccgcactcgcgagaaaattaattttcgcatgcgttcgctaaagaaccgtaaaccatactaaaatccccacccaatccctcatcccctatctcacatcaagtccccacccctacctcaccatgccctctctcggcttcctccttcactctctctccctctccctctaggtcgctaatgcgcctcgtgggggtgaccggttgctcgctccatccctaccctagtccaaacctgtggcagtgctcatcaagagaatcggcaacgatgattggacgaggcaatagatttgacaatggcgtgtctagaggtgacgaatctagtagtggtagtgcctgtaggtggcaacctgcaacggtaggtggtgacaaagaaaagacactactacaagaaccctaattggtgtcggttgggaaactcccttaggtattggttttcccaacaggcatcacagaaccggcaccgctgaccttcattggaactcttttcttcttcattgtactattgcttccaccgtcatcatccctgtctccacaattataccgagaagccttgcatactggacattcatcaagatatgcaaaatcaccccggtaaagaatgcaatcatttcgacaagcgtgaattttatgtatctcaagaccaagggaacatataacttttttcgcttagtacgttatttcagacaagacattatccgcaggaagaatttctttcaacaactctagcaactcagtgaagctcttatcagaccatccattgcttgccttcaggtgaagtagagataggaccacctggagcatggtgtgctccgccttacatccattgtaaggtggagcttttgagtcctccaccatggttttgaacatgcgatatttcctatcatcagtgtcagccttctccccgtcgcgcatcatctgatctagattagcttcactgtgatcgacacatgtttggtcctcttgctcacagccgacatcctcatttggcatgtcacagttgcctgcacttccctcgcattgctcctcttctccatagaacttgtccatgagccgccttataagaagatgtgcatggactcgatgcgccagaaattgcctgtctttcttgcaatcattcaatcaaagcatggacaccacagataatccggcgtatccactgagtttgtgctcgtcaccatggcaacgaaagccgttactcccctgatatactccatagagtcacgatccgcttcatacacccatcgtagatccattacaacaggcgggtacatacaaatattacttaatgtagattactctgaatcatacaaattcaatttacccaataacaaaaccgatagatcttataaatgaacaagaaaagataagcaacatctataacaccaaattagttttgttaaatctaacattgaatatattttgataacatgtctttgtattgaaaatgttattatattttcttataaccttggtcaaactttaaaaagtttgacttagaaaaagccgaatgacttataatatggaatagagggaataataatttatcgtttattaaaaatcgtgcagaaaaaaaatacaatgagggttttgtaatttacaagaacattggaataaaatacaatgagaaatgatcattttatccctaagataaaattgatattttttttgaaaatgccatgtcacattaattattcatggttaaaaaaagaaaaataatttatattttccatcaatgaggaaaaatatcggatcatgccatgggtacacatttttccatagcggtaaaatggatattttcttgtccttaacggtgtttcactaacatttgactaacatcgatggcatagatggtagaaaacatcaactcaaatttagcatatcatccaagaatagatctaatgagattaatggacacaaaaaagaaaaagagttatccctaaaaacgacacataattgtttcgatcatgtattttacatgcatacgtagcacacggtattgtaaatcaacaagcaaaagtgaaacggagtgagaaataatgaatttcaccttgtaggcttcaaccttcaaccaaaccccaaaaaaaatcgagcaaccaccccctccccccgcttccagctaatcgggcaagaacaagaggcgctgctctgttcttactcaatcagctcgagtgggatgatatatatgtagttggctcataggtgccggggttctacatctaaaactagcatctatgtctgagaggtaccaacagttagtacaggggtggaggtagaaaggtgttggctcttaactaaaatccagcacttatctctttcaccataaaggtgtcggttctagggtgggccctgcgccaactaatccgatgtgatgggaaataaaaggtgccggattttagagaaaaaaccgacatatttctctaacagggataataggtgccgattctatttaaaaaccggcacctattaggagagataggtgctggttttagggttttggtaggctggcggagggtgtgggcaagataagcactataggtgccgaatttacctactccagcacctatagtatcggcacctatttgatgttatgtagtagtgaggggcaacacggtggagggagcggagtatggcgtaacagcgaagaccgctcctccctctaggtgcaacggcagcggcacgatgaagggtcctctcctaccactgctcgtccactccccctcccttccctctcccaaatcttgctcacgctctctcgctctaccagatcttttggtcgaagggggaggagactgcattgctcggcgaccgtcctcggtagtagcggatccaaagagccatcgtgcttggcaacagcaaccgccccgtctctcccactctcttcccctttgccgttgttcatgtttgcatgcatgcttggcgacaacgacctgatcattgtatgttgatgtttgcatattcattgatgagctacttgc

SEQ ID NO: 20178 - DNA, 1561 bp, Oryza sativa
ttagctggaagtcccttctgatccgaaccgttctgcaagtagtcaatagcccgcaacatacccgcatgacgatcatgtataaggcaaacgttgggcctcatacgcaccactgcaatgtgcactctcttaggaaccagtaccagctttcagtgttctcactctctacaaatgcaaaagccataggtagaacctggttgttcccatcacacccaattgctgtcaatatctgacctcggtatttacctgtcataaaagttccatctatgcatagaacaggtcgacaatgcacaaaagcattgatgcaagcacccaatgagaaaaaggctctttgcagcacactctttgttctatcttcaaccgatgtaaatgtatgtaggtcatagtaagtattattattcctctgggcaatggtggctaacaaacgaggcaaattatcataagaagcttcaaatgtgccatacctcatctcaatgatcttttgtttggctctccaggcctttgcatagcttatggtgtacttgaatttgttctcgatgtgcctaataattgattttggttcaaagccaatgttaccaacaacactgctgtacatctcacttgccacaaaagctgaagtgatgtttcggtgatacttctccaccccttgtaagtagcacttgtgctcggtcacaatgctaactttccaataatcattccatttacccttatatgcatggacacgccacggacaatcttccttcatgcacctcacttcatacacataatttgttgacttgaccaccctaaactctctctgcaatgaaactgcccaatgcttcaccgcctccttcatctcatccttatgagcataccttgcaccctcaattacctcgtactccttatactcccagggtacatgatcaccctctgatataacaagaccagagaagtcctcatttgcccaatcagtggccattacatcaccttcctcatcggatgatgcgtcgtcctccgcttgctcattatccgaatcttccctctccatttcattaacaattataccgactctctccccctcatccgccatgcccatggcctgctcctcccttggttgattttcctcattttgcatcgatggtccaacaacatcccctgcattgctaggaccctccacatcttcggtttgcattgaaacatttgtatctttctcttgtaccgacacaaatataacgaggggccatgaccgttcaaaagccatttccacataccgtctccaagcagcagtgctgtccatcggcattagttcccaaaaataaccttctattgcacgactcactacaacagatactgacattgtgtagacttcttggtctattctaaatcctctcaacaaccaactataaattgactgaaatgttctctccgcaggcctatcgatgcccttagatgtcattacaaaatctgacagatcaacaccatctggaccaaatctaatatttccttcaccgtgaactatctgaaatgtgaccttacttgacattgtgcctgatgaaaacaataactgcgttaacctcgcatttct

SEQ ID NO: 20179 - DNA, 622 bp, Oryza sativa
aaagtatcacacaaaatatgatcaatcgagcaacaggtgagtaagtgtcaaagaaatcttcgccttctttctgagtatagcccttagcaacaagccgagccttgtacttttcaatagtaccctcaggcctaagcttcttcttgaacacccactttcaccccaggggtttacacccatagggtcgctctgtcacctcccaagtcccattagcgataatggaatccatttcactacggacagcctccttccagtagtctgcatcaggagatgcatatgcttctgaaattgacttaggagtgtcatccatgaggtacacagtgaaatcaccaccaaaggacttagccgtcatttgtctcttacttcttcgaggagcttcactgacatcctcctcagagacatgttcatgtgtatgttcagtttgttctggtggtgtgattgaactgggaattatttcagaaggttggctcgaaccactatgtgtatccttcattgggaaaaagctctcaaagaaggtagcatcacgagactccataattgtaccaacatgcatgtcaggtacctcggatttaactattaaaaatctataggcaatgctgtgatgatcatatcccagaaagacaca

SEQ ID NO: 20180 - DNA, 523 bp, Oryza sativa
ggtaatcttgtttcttggcgaaccaagaagcaggcaatggtggctcggtctaccgccgaagcagaatatagagctatggctttgagtttgagtgagatgctgtggatgaggagcttgttgactgaattgcgagtgttaagaagtgatactgtgatgcttcattgtgacaataaatcagccatcaacattggaaacaaccttgttcaacatgatcgcactaagcatgtggagattgataggttctttattaaggagaagattgatagtggggtacttatgctagagtatatcaagtcatgtgaacaactagctgattgtctaactaaggggttaggtcctagtgaaattcaatcaatatgtaacaagatgggtatgattgatatcttttacccatcttgagggggagtgttggtgtaaataagtgatgttcctaggacccatttgtaaatgttaagagaatataaaggaggagatgtgggaacaggggagtaaccctgaaaaaccccccaaaattagacaatat

SEQ ID NO: 20181 - DNA, 2232 bp, Oryza sativa
cccttgcgcagatgcagcctccttttgcagttttgttttgctgcgggaaattcggatttgttttgttttgccttttgcagttttgttttgctacgggaaattcggatttgttttattttggaaacattccgaaaaatccggtgcgtgaaaacgtccttttgcagttttgttttgctgcgggaaattcggatttgttttgttttgccttttgcagttttgttttgctacgggaaattcggatttgttttattttggaaacattccgaaaaatccggtgcgtgaaaacggcatggagtccggataggttacgcgcgacttatccggttcggtttacgcgggcgccctgatcaggcgatctatctctatataaaccgagccgccgccttcacgcaacacacgcgaaatcaatctagggtttacctcctactctgtactgcgccgtcgctcgtagactactctatcccgctcgccgacgtgcaccggtgatcgggatagcaggtctccggaacctctgccttcgacgtcctgcaccgggagaagacggcaataaggtttttggaagcgcttcgcgcgactgctccctgttcgtccgcgacggctcgccttcctctccgctcgcgtgcttcgcgccttcgtcgacgctcgcaaccgcgagtagttcctgccgagcaaccggtctttccaccacctcggtacgtgttcgacatgttgcgcatatttgatatgttcatgttttactgcttagtttacatgtgtagatctaatgatgcgttcaatctagtttacatggcttctgcatgagtgagagagtttatcggtgtgctgcagcccatgtgttcatggttgttgatgtggtaaaaaaaaagtagtttggggtggttcaaattgcaatgcaaacaaaattaactaaagatgaggtaaactaatgatggtcaaagtgaaacttaagcaataaaagtagcccaagtagcagtacattctttatttttatcaaaataacagcacaaatagtttgaataaagtcctagataaccaaggaattgaatccaataacatttatagtcatggtgcgtttttataccatagaaacactccattccatcatcgtcactaatctttaaaaacacatccctctcaataaatgtgaatggacaatgattcaagaatcaaattcctgattccttgctaaaatgaaataaaggattaccatgttgtttcggtggcaatgcccaaataaaccgtggatcagaacaccgccaccttgtgatgatcttgacaaggaagtttttggtacaacaaccaaggtgacaattggaaatggtagaaaagcatatttctgggaatccaattgggtgggacaccagtcgctcaagtacctcgcaccagcgctatataaccactccaaagggaagcatcgaacagtctgcgatgcactaatcgacaaccagtggatcagggacataaggcacgagctgaatttggcactagttcatgaattcatcaaagtctaccagtagatttgggaaggtgaaattaccttaacagataaaaccgaagacactattctttggagatagacaaacaatggcaaatattcagcaaaatcagcatatttgggtcaattcagtggcagaatcggatcaagagcagccaacctaatctggccgacctgggcgccgtccaagtgcaagaacttcacatggctgttgctgcaaaaccggatttggacagcggatcgccgacaacgccggcaatggcccaacaattatttttgtcagctttgctacagaaatttagaaactgcacaacacctcttcaaggactgctctttcacaaaggaagtgtgggacaaggtctccttaagactaaaccacaatcacatccctacgccacacaacgacgacgagactctgctggattggtgggaaagaagagctaaccaaaccgaaaagggcaaaacaaaagggatgtgctccctttcacatgatgataaattgggagatttggtgtgaatgaaaccggcgagttttcaaaaacaaagaactcgcaatgccacacttgctgacgaagatcatggatgaaatcaacaaatggataggatgcggggcaaaagatttagcgagattagtgctgtagccttcccgtgatccttgtagctctgctttcctctctgctccctcttggctatgcgtctcctctgttttttcttttggtcctttgtttctcaccgtt

SEQ ID NO: 20182 - DNA, 718 bp, Oryza sativa
gcaggggcttacgacggcgaggaagcggcggcgcgcgcctacgacctcgccgcattgaagtactggggccacgacaccgtcctcaacttccctgtacgtggcatacgcctctccaaaaatccatggcatctttctctgaactgaatcctctgcacaagcgttcttcggaacccttcaagaaatgcacgcacagtgcagcttgtttgattctgtttggttttctgaggaagattgttgctgtttttctcatgttggaactctctgcagctgtcaacatatgacgaggaattgaaggaaatggaggggcagtccagggaagagtacatcggatcgctccggaggtaaatattcagttaaccccatgttaccactgactttcaacaaagagaagttaattcagatcattacaaactttcagaaaaatccaaatcaaaacccattgaaatatgcttctctgatcagacatagtgaaatattcatgtctgagaagctgtgttttgaagtagttcttcttgattaagatcataaacctttttcaccctgcaggaagagcagtggcttctcaagaggggtgtccaagtacagaggagttgcaaggtagttaatcagtactaatctacactgaaggttccagttttctactgaacattgctagtagaatcagttaattaacagctgttttattcaggcatcatcacaacggcaaatgggaggctcg

SEQ ID NO: 20183 - DNA, 1094 bp, Oryza sativa
gttaaattgactcgaaggtagaattcgctatggattccaaaaattatcccagccagcaaggcctagaatgtgatcatggaacaaaaaaaaagtagtcctccgcatttagagtcgatcaacagttatgaccaattgaccacttgactaccagctcagagcaacatgtgaggtaccaattttagcagcattgtagttgcaacaacatgagcaatcaacaaattacaattacttgcaactacacaagcttttatggacataaatgaacatggatatgttagcacatatgatatggcaccaaagatcttaagcacaaacctgcctctgctgctcagtcataaaagaaccagacagatcccgcaagatgctcaagatatcatcaaatgccaccttcccattgcagtcagtgtcataaaccctgaaaataactacagagaaaacatagcatatttctcagaacatctagacatccgggacagaaagcaaatggagaatttaagtacgaactgggaacccacattcaattttttgctgcaggcttgcgcggggactaaacgccgataagaacgccacgaactccttaaagttcagcccatcgagcatcctcagaagcctctgacagagacatcgcatcgattaacaaatagcattcctcaaacatctacccaatcacccaattcattcctttcctaatccctcgttctcaatacagaataagaaaaggtattgaggaacaggctagttatgtcttgtaacctgagagagagggttcacggcgaactcggggacggtcatgaattcctcggcggagacgaatccgcccccattccggtcgagctggcagaaccggtggtacagcgacacgatctcctgctgcgagacttagctcccaaaacaccccgaatcagcaggtcagatcggaggggaacagcggcagacagcatcaatcttcgttgagagttcagaatccaatcgaaagagagaaacacaagcgcgcaaactcacaggcgtggtcgcagtggtcctggacctcctcgatgtcgtatgcgtcagcatcgacgaggtgctccccatctcggcggaggagacggggatcc

SEQ ID NO: 20184 - DNA, 730 bp, Oryza sativa
attatatctcgaaaaaataataaaaaacatgggacccacatgtcagctaaaaataataattttaaaatggtggccccacatgtcagctactcctcccttcttccccctcccttctctctcatattcatcgtcctctcttcttcatgtgcgcagggggaaggaggcgaggcgaggcgacgggaccatcccccacaccgacaccacccccagcgcgccgccaccgccggcatcttcgtcttcctcctcgccgccgccgctgccgctgccgccagcatcttcgtcttcctcctccgccgtcaccgcctacatcttcgtcttcctcctcgccgccgccgccgccgcagcaaccgcagcaagcaggccggcgacgacgacgtggagatggccgaggggaggaacaacaaggtcgccgacggcggcagcaccgatgactcgacgaccagcggcaaggcggacaccaaggtgtagctctggcgtctcaatcgatccatgagcgatcgagtagctcagtagcatgcaatcggctaagatttcctgcatgtgttctagtactacaagtaataatattagctagctaaaaggctaaaacacataacgtgcatgaaaggaaagtactatcctaactgaataaaacagcttttgcaggcacaagtttaacataatatgtctgctttgatctttatttggaagttgtaattaaccatgtttgtaataacgagataattaaacg

SEQ ID NO: 20185 - DNA, 650 bp, Oryza sativa
  unsure (1)..(650): unsure at all n locations
tttcgtcttccacaaaacgaaccatatcttcctctcacccgatggtgcatcgctagacgaggcatctgacctaccatgattagataagttccaggccaatctacatgcactcttcacggtaaacagtcctgatttctccaaatgccaggctggaaaatcatccggttggcattccaataacctgatcttgaggacctcttcggcatcatccttcttcatcacatgacgaactaggttttcattccagcttttcaaccccggttccattagttcattcacatagattagcctgttccttgcatttttccacaggacattgactcgctcaccctgtgccaccatcttctccaaattnnnnnnnnnnnnnnnnnnnnnnnaccatattggactcctttccaggtaggtaaagaaactgtcgggaaagctgtgtccaacagacttccacttgggaagtatttcgcttttaaactcgggcgccaagactctcaggagttgtgatcagcctccaagcttgtttagttaacaaagcttgattgaaacatttcatgtccctaaaccccaaacccccatggatcttcgggctagtgatcttttcccacgctatccagtgcactttcttttttcctttctcatgaccccaccagaaattg

SEQ ID NO: 20186 - DNA, 1286 bp, Oryza sativa
tacacgtcgttatttcagtagtacgtacgttggccgcgttcgtggtttttgttcacgatgcagggggacgtacgggttctgtataccctacgtaccttgctggttcaaacatagcaactgtatgcagcatttatactcacaagcaattggcgttttgttgtcttgtgctgcgcattgagaactgaaattgtttggagcaaattttgttgaaacatttgttacgcaaaaaatttatgaagggaagccgccgctggactggcagacgaggaagcggatcgcggtggggacggcgaggggattgctgtacctgcacgagcagtgcgacccaaagatcatccaccgcgacgtgaaggccgcgaacgtgctgctggacgagtgccacgaggccgtcgtcggcgacttcgggctcgccaagctgctcgaccacggcgactcccacgtcaccacggcggtgcgcggcacggtggggcacatcgcgccggagtacctctccacggggcagtcgtcggagaagaccgacgtgttcggcttcggcatcctgctgctcgagctcgtcaccggccagcgcgcgctcgaggtcggcaagggctccggcgtcatccagcaccagaagggcgtcatgctcgattgggtaagcatgcacttccacatttcttctccaattttcagctttttttagctgctgtttgagccgtgatcgaaaagatgttgcactagttcttgtttgacgaattaaaagcctcggttgctttgatcgagcccgtacgtgaatgtctttggtaaagttcgcaaatcttttgcgaaagatccatccagtacactagcatgtgcgttcattgcgcgcgcggtcactggctcactgcactttgaggcgctgctcattcaatagcaacttctagtgaatctgatgctcgaatgacagtagtcagtaggcgccccaactgtcagtctaagattaattgcgagtactatgaacctgacatactaacgcaatcctgcaagcattgccactgcatgtttgaatgctgatcgtcctcccacgtactgttcactctgcatatggcatgcaaatgacttgcttctgaaaaatgacaatgtcttcaactacttaatctccatgtgtaaatgatctgaaaattttcttcttttttgttttcgttcgatcgtgttatcaaaatgaaggtgaggaaggtgcaccaagagaagctgcatgacttgctagtggaccaagatttggggcctcactacgacaggatagaggtggcggagatggtgcaggtggcgct

SEQ ID NO: 20187 - DNA, 3716 bp, Oryza sativa
tacagttcatcaagagcaaattaatactttaaattggacaaatgaaaaaaaaacatacatgtagattttctccaaaaattctttttttttaaaacaatcagaacaagatgagggcacgatgattcattgaatagtgtattaaaaaattgcaaggtcagtaccttagaaggcagtaataccaggaaaaaataccaccaccacacatcgagagcacctacacaaagtcaaagagaaggctagcacctgatcgaccatcactaaacgtgatcggtcaccgctagaccaataaaggaaggtatagccaggacggctcaaaaccaatccctagactgaactcaactctagccacgcctttgaaattgaggaggagagggtgagagaaaaaaaatggatccgctctccccctatggcccgtcaacgtggccaacttgcataagctaggacacagttgcaagaggataaaacaactagaaagagcttgcatcagctgccagagggaagttttggcaagggacctagatgatgtctccagcgagatgaacgatgatgagcaccaccgtcgccgtctattgaggtctcaaggaggaccaagataaggttttcacctggtagtcctaccagagtaagccatgttcttttttctaacaagagttggatgaagattaaaattttcgtggcacgtttttcaaactgctaaacggtgcgttttgtgtgaaaactttctatatgaaagttgctctaaaatgtcatattaatttatttttcaagtttgtaataattaaaactcaaccaatcatacgttaataccacctcgttttgcgtaaaaaaacttaattttcatctttatttttaagagaaaagaacctgctttaagttgcatatcttggacgatcgctacttaaaaaaagaagaattttcataggccctaccttggaggcttggactactaatatgatgctaaaagaaaacaacgtacattaatttcgcctacaatgatttacacaggcaaaatgtcttaggcaacaactcacattaatgtctaatagcataggtgtgccacaggcaaaatgtcttaggcaacaactcacattaatgtctaatagcataggtgtgccacttaaggtaatgcacgtgaaaattacacataagatggtcataaagaggcccgcctagacgaatgtgtatctgtgtatctttagacaatgctcctaattgtccgtccatgacttacacctttttattttcctcatgccactacttccactacctacacttccatcagtgatcacgactgggcttctcaaaattcgaatcacccgactcctctattgccacgccacacctcctcgcctccaactctttgcctattttccaatacatagagtgtaatgcaagtttttcgccgcaatatctccctctctctgcattctcttctatctctgccatattgggttcgagatgccaacactagtatgtcaccgttagcaaatacttttctctgtctcaaattatagagcactcctgtttctatgaaaatcaaactcgttaaattttgactaacaattacactagcaatatttatactaagtattatgcatactatatatttcaaaatattttatattatactaattttatagttattgataacataatattaaataattaataatcaaattatatcgttgaaaaccatgtaaaaaaatagatcttataatgtgatataatgtgagatagaggaagtagaatgtaaagacagagttgaacacaagaggaccgcctcgccccaacaccatcaccatcacacagaacatcgaacggggaactgacgagtatttcttcaacgggtcgcatatgctcaacttggtgtcacaattcaacaagctgaaggtgctagcaaatcatcaacacaaagttcgtttgaggcaaagacatgtgtcttttggttttcctcggttcatttccttgtggatgtaatgttcgtctgaattcacatatgaaaagagagaaaaattacaccgttggtgtaatttttagttgaagttagttcgttgttctctatgttcaggaggggtactgcccctgttgaatgatgcccaataaaatgtgattaacaactgagaagacatgaccaacagattaaccactacttttcttttagttattttgcatgatgtttgtagttcagtagattgttactgattgcttggtatagttatcaactcacaggggtacatcttcagataattcaaaaatcatacaaccatatccacaatttcatatatatgcataaacaaattctatacataaaaataaaattctattatgaattattcatccacataaatgtgtacatcgataggcaagcgcgtagcgcttattaattagtcattcatcaacacctacacacttatttatgcatacatgaataaggtgatctgaacacatagaacacaaactacacaagctaggaacacacaacaatataatctttggtaagcttcacgcgggtcgtgacgagcttacttgccatggccactgcccgcgtatgagccggctctggaccctgcatacgagccggagccggcaccagagcctccatgcgggccagcaccggagcccgcgtacgagccggcttccgagccagcgtacgaccctgcgcctccgccgttggagccggcatacgagcctgcactggaaccagcgtacgagcctgcgccggagccgccatctccaccattcgagccagcatacgagccagccctggagccggcgtatgaccccgcaccacctggccccgcgttcgagccggctcctgactcagcgctcgagccggccgatgagcctcctccacctgacctcgagctcgaacccgagcttgagccagaccacgaacctgacccagaccctgaaccggagcccgagcctgagccagagtaagacccggagcctgagccagagtaagacccggagccagagccgccgccaccaccaccaccaccaccaccaccgatgcccactccaatccccgagccgagtcccaggccaccgccggtgccgacgcccaatccgccgccaccgccaactccgaggccaccgccgaggttgacgcccaggtccttccttgcagcgcggccctcagccgcgagaacggccgccgcgaccaccgcgacgcccaacacgacgccggccttcacggaagccatatcgcgcaaacgcagacactctagccgtgcacacgcaggtgtctcaacctccggtgaccagtgctcctctgctgtactgctgtgtgtggtgtgatgaactgatggcttgatggattgatgagttcgtggtgggatttagcggtgaaatttatagggagcgcgcgcggttgtggtggtacgcatgcgtgcggtagctagcgcggctcgtcgtgtcgtaaggttttagtgggatttgcgtcggtgtcgcgaggttgtggccgcggccggcggagggcgtcgcgtagtggagcaatccggcctgtcccgcagatttgggcgcgctctcctcagcaatccgagcgacacgtacgtaaggcagaccggaccgagctgatcaacccatgtacgtaccgatcgatcaatcgtacgtcgatcattcgatccactaaacacggctagctagcttccaatcgattgaacgcacgagtgtgacgtattcgatcatgttggggcgtgtgacccaatgtaggt

SEQ ID NO: 20188 - DNA, 994 bp, Oryza sativa
aatggaacatcttccggtgcaccttgtgaggcaaacaaagtgctgtggtccagcattcatgacgcagatgtatccttgcgaaaggtacctggggatccttaagggttatgtacggaaccgttcacaccccgaggggagtatcatcgagagttacaccaccgaagaggcctcgaattttgtgtggactacatgtcagaaacatcttcaatggattaccacgatctcatcacgaagggaggcttgacggtgttggtactgttggaagaaagactattaggttggatcgtaaggtgtacgataaagctcatttcacggtactacagcatatgactgaggtggtgccgtacgttgacgaacaccttgcagttatccgacaagagacccaggccgatcagagagttgggtcaggaataagcacatgtcttctttcaacgagtggctgaagaaccgaattgccaggttgcagaacttgcctagtgaaacacttcagtggttgtcacagggtcctgaatggagtgccaccacctggcaaggatatgacataaatggatacacctttcacacggtcaagcaagacagcaaatgcacagtgcagaacagtgggttacgcatcgaggctgctagtgacggtggtcgtcgtgatcaatactatggtagagttgagcaaatattggagctagattacttgaagttcaaagtcccgttgtttcgttgtcgatgggtctatcttcgcaatgtaaaagttgacaatgaaggtttcaccactgtcaacttggctaacaacgcgtacaaggatgaaccgttcgttctcgccaaacaagttgttcaagtgttctacatagttgacccgtgtaaaaagaaactacatgttgttcgtgaagggaaaaggagaattgttggattggacaatattgcagacgaggatgattacaaccagcacgtccacggcataggtcaagaaatacctttagaagaggaggaggaagaagatgaa

SEQ ID NO: 20189 - DNA, 5563 bp, Oryza sativa
tgcgaaattgcgttcatgaatgcacatagctttgttattgatgcccggacattgtctggaaggataccccttattacaactggtagcagttgtgtcatcaacacgtgacagtcatgagactttaggtttgtgaacttcttctccttcgtgcttattattcgcttgatattcgtggagtatccagacggtacctttatgctctccaagcattcaaacatactttccttctctgccttgctaagagtgtagctggctggactcaagtaatggcttcctttctcctttggttccgggtgaaggtcgccgcgttgtttcatatgcttcagatcattacgtgcttccagtgtatctttcgactttccgtatacacctaggaagccaagaaggtttacgcaaaggttcttagtgaggtgcatcacgtcgattgcgtggcgtacgtccatgaattcccaatatggtaactcccaaaatatagagttctttttccacatcgccgcgtgaccatcttcgctctctatatgctggcttcaggcccctttccgaacactactttaagatctttaaccatagcaaacactgttttcccgctgcgatgtttaggcttcgtacggtggtcggccttatgttcgaagtgcttgcctttcttccgtaccgggtggtttgctgcaaggaatcgacgatgacccatgtatacaaccttcctacagtgcttaagatacgtactttctgtttcatccatacagtgagtgcaagccttgtaccccttgttggactgtccggataggttgctaagtgcaggccaatcgttgatggttacgaacagcagcgctcgtaggttaaactcctcctgtttgtcctcgtcccacacggggacaccttccttcttccacaactgtttaagatcttcgaccagtggtcttaggtacacgtcgatgtcgttaccaggttgcttggggccttgaataataatcggcatcattatgtacttcctcttcatgcatagccagggggggaggttgtagatacacatcgtaacgggccaagtgctatggccgctgctcatctctccaaaaggattcatgccatccgtactcaaaccaaaccgtatgtttcgtgcgtcctttccaaattctttaaattttctgtcgatgtttcgccactgcgaaccatcggcggggtgtctcagcatcccgtcctgttgacgctcttcagcgtgccatcacaacattctagcattccccttgttcctgaacaaacgccttagccgtggtattatagggaaataccacatcaccttagcaggaattctcttctttgttagctgcccgtcaacttctcctggatcgtcccgtctaatcttgtatcgtagtgctttgcaaacagggcatgcttctaggttctcatactcctcaccgcgatataggatacaatcgttcggacatgcgtgaatcttatgaacttccagtcctaacgggcagactatcttcttagcctcgtacgttgtctcgggcaatttgtttcccccccgaaagaatgttcttgacgagtttcaataaatcgccaaatgccttgtcactaaccccattttttgccttccattgcaacaactccagagtggtatccaacgttttgttcccctgctcgcaacctgggtacaacgaagttctgtggtcctccaacatcttgtccaatttatgggcctccttttcactttcgcagtcctccctggcgtcctgcaacatctgaccaagatcatccgcaacgtcgttaccatcagcagctatttcctcctcgcccgtttgatttccttcaaatccaacatactgagcaaagtccggaatattgtcgtcttccacttcatcttcttccatttcaacaccttgctctccgtgggatgtccaacaattatagcttggcatgaaccccgactcaaacaagtggaaatgaatagtcttggatgcagaatactccttctgattcttacacttattgcatggacaacaaataaaacccctttgcctgttagcttcggccactcaaaaaatagtgcacgccgtcaataaactctttggaccgccggtcagcgtacatccattgccgatccatctacatgagtcaaaaaaaccgcacacaaataattattcttacaataatgacagtcatacaataattataagatatctttattcatacaaaaattataaaatattacaccaaataattcttaaaaactatttgtaaatttttaaactaattttaatgtgttttacttcttttaattttcattttagtttgttttctattatttaagattaactttcactagagttttccttctcaactattttataaaaccttgtttagcaaatgaactaaatttctatatattctttcttccccacacacattttctctctcatcaacttacaactaaattttggagacaaaaaaaagtgtgcaaaacataggtgcaaatgtagtatgacaaaaaaaaacattggaggatgaagttgcaaaccttttaggcacctccgatttgtatgtaatcaccaaaataaattcaatagaaattttggcatgacctcccctcttttttaaagtaattttgaagcttgctcgggcagctggaggaggaagaagacatatatataggggtgggactttagtcccggttggtagcaccaaccgggactaaagatcactgggatcattagtcccggttagtattaccaaccgggactaaagttaagatctttagtcccggttggtagcaccaaccggggctaaagatcaccgggatctttagtcccggttggtaagttaagatctttagtcccggttggtgttaccaaccgggactaaagatcccgggggggcctgacaggtcctgacagcattcgaaccgggactaaagatgatttttagtcccggttggtaacacaaaccgggactaaagatcaaatatgcccgtttcccttttgaaccggggctaaagatgatctttagccccggtttttattgcatccgggactattgtggaaatcggccgaccgacgaaagatggtttctccaccagtggactataccgtaaagataaacatcacagggaaatacgatataagcatgcattcttgggtgcatgcatgtcaataaaaggaatttgggagcaacaaatatcatgctgagttgatgactatgtgcacgattgcattcttggcaccacctattgtatcctcatttgttgcacgtttggcatgcattgtcgaagaaaacctttcatgtaattatggattaaatgcgttccagacttatcaaaattattggtcctaatagtttgctacttatggaacaatttttttttgttaaccatcctaaccaacaagatcgattattggattactcaactattgcaaaagcatacccttctatcaacaatttcagatatttgacacccttaaactataagaaaattcttctatacccttgaatttttagctaatcccttctatgtccctaaattttgcttactttcttgtatacctccaaaatttgattttgatcccttccatacccctatcgtcagttgaccgtctaatttctataacaatgaccattttaccctttggacgaacatagaaattcataaattacattattaaaaatgtaaaagtttatcgcataagactattatagttatgagtttgttgtgcgatgcattatttatcacacaatttatttttagataaagaaataaaaaatatgtatttattttttaaaaaaagtcataaaaaatgatgagcattcgtataaggataggactaccaatgctcacaataatttttttatgaatgctgccaatcaaaaatatccattgtcctattaaaatttcaaataaaaaatttaatttatttttattttcaaaatttatgtcaaaatttttcgcactaattatttagtctcattagttttataaaatgcacatattgtgcacttaaacaaaattttcaatcatttttcaaccttatattcaaacctaaagcatcatgggcaaaaaagacatttgcaaccaaaggaaaatgtaatagtaggggtatggaagggatcaagttaaaattttaggggtatataagggatcaggtaaatttcagaggtatgaaaagaattgagtgagttttcaggggcacacagggaatttactcttaaactatttaatctggacaaattacctagcacgcaaacaaatattggtacaacagctgaaccaaatacaacagtgtacgtacgtgtaccatagtcactgcctataaaaccatcatgatatttatcgtgacaggttccttttctttatatgacatgcacccacactaatgcacactttatcgtatttccatgtactatggtacactacaggtcagcctctaccttgatttgccgagaggtttgctagagtgacttttagcgatgagcggtaaagccccaagcccccaatcagcacttcaaacatttcttagaatcgtagggaaaaaaaagggcaattgcgcacgtgtttgttggctgtacatgatagttagagcgggcgggtcactggctctcgggttgcacagggtcgtaacaaattaggcttggctaggctcggacgctcggttagagaaacgagttaaagcgtgagctcgtcttggcttgttttctggcttgagctggcttgtgagcctacctgttgaagcatctcttcatgtataatttgtaatcattaagaaagcaagaacaaattattgacatgtaaaattaaaacaagttcatatattcaattcttcaaaatccagatgataaattacaatttgatatattaataactccactaaaaagtaaaataatccatataagtacatgacgacataggctcataagccaactcgtgctcacgagccaaataagcggctctagagccatcaacgagctgaaaacggaagcttgggcttgactctttggcatagagccgagccgagccatgctcgagctggacccaaacaaactggatggttggatctcgatccaaccgtttaagcctcgctcgtcagtgttgttcgttatcatcggaacaattgaaaaggtaacatatgctgacttgcactttagtgctaacattttcctgttcttgtttgttcaaagaagaattatgaaactgtttcaaaaaaaagaagaattaggaaacagtaacatgttagtagtagtagtagtattatgagcaaaagcatgggcagaaattgcctgagagattgtgtgtgtgtgtttgttattacaaggaggagcagtgtctgacgttaattggagaccatgatggtgccgggcctgctaatgggctggatggcaatgggctaaatcgactggtttgtaattaagattgcctttggttggcggattaagtctactaatcatccctcaactttacgtcgagtttatttgacatcccttgtctcccaacaccagaaatcatcactcctaaactatacaaaccgtgcaatttaggtcctataatagtataggctgtgttaagttcctgaaa

SEQ ID NO: 20190 - DNA, 14353 bp, Oryza sativa
ccgtgcaatttaggtcctataatagtataggctgtgttaagttcctgaaaaaagttggaagttcagaaaaaaagttggaagtttgtgtataggaaagtttgggatgtgatgtgatgtgatggaaagttgaaagtttgtggtagttgggggtgaactaaacacggccatagttatctggtttcgttgacgtggcatactagttaaaaaaaagatatggggcccacaaattagcctattctttcttctcttttcttgccaactatgggagggagggggaggcggaggagtcggccaccggcgggatggccggcgacggcacctccaaggacggcaagctcggcagcaccacgacaaccatctcgccagctcggtgatggtggagaagagaagggtggcggcgaggttgcattcttcccttctcactccttcctcttcctcctgatccggtgtcttcttccttttccctccgtatccggcgtctcggcgaggtcttgtgttggcctcgcccgagggaagccgtcgccagaagtagagatgggccaccatggcgaaggtccgagaggtggcggccgcgggagcccatggccggccacttttggtgtccgtacccgttgcgatgaccgagttgagccggtcgacgatcggctattgggtcggtatcaaccaacgctttgcgcatcaagtgaaagatgcaccatttgactgatgattgggtagcactggtagctggtggcccctatgggagtgggtgggcgtcggcctcagtgtttgcgggcatgcatattagtattattgagaaagacctagcgctagcggctagtgatcgatcagctcatgctgatattgcacggtctgatcgacgaggaaatctcactacgcggctcttcacgaggtggctacagcaagataggtgggcatgcaaatgagtatgcccgccctcagatacccatatatgtgttcattctagaaataaaacccgtttgctaaacctgtattttttcgtacagtatatccaagaagcttcatagaatttttatcctacttactggataaactgaatatttatatgatgatcaaagatagagtacaaatttacaaacatacactacttaaaagaacatttttgcatgcgatcaaaaccattttttctgtgcggttgggccgcctgtctacccaatttattaatgatgaaatttgttaattttcattagtcaaggccgggtcaaaggaagccttcatactgtagaaattcggtttgacaaatttatccaagattgagtaagctccggagaaaacgaaggtgtatcatagtctctattcttgttaatagagttctgagctgatggagtcgtgtgaggttcaaactcggatatgtttaagtaacgattagccgatatgagtcgtttgggagtcgaagtctataataatttccttaattagagatagagttctatatcaatacaatcgtaatagagtcggacttagtattgtatatggatataaatatgtacactcagggtctttgtaaaatatacaactttcggcgcatcaccaccctaatttttctgacgaattcttgttttcgagtttaggatgcatcggttaagttcgatctctggcaaaaaagttagtttcgtcaaaacccattgtttgtatcggtggaattagtacttctcggttaggtccaatatactggttcttcttttgctcgcattgcttaccagatttattggctcttgctttgattgatttgctttcttagttacggtttctatatcaatcgctccggaaagtacttatcaactggttcaaatctatttaagcatcttgttaatcttgaactgtcttggttatttccaatcttatttcttagactaggcgatacctattgctgcgggaattgaagaatacaactttgtagcatgggtgaaagattgagatagaagtcaattaagaccaggcaaattttggctttgttcatgaatcatggggtgtgtagataatagcattaattcaatttgtgatgactaggtagaatggagatacactcttgcccaggtagaatataaatccaagcagtatggatattctcgttgtatgggtagaatcacccatcgtaccaatcaaagtacagaccgtacacttttgattcattgactggttaagaaaagaagaaagaaaggttgggaagcaggcctcctgctattgcatctctgcgaggcggcagagagccatagagcgagaggggagaggaaaccctctattttttctctctattttctttgtcatgagaaaaagattccaaaggatagcattgaagttaatgattccttaatgaatttcttaatgtgtattgactatgggggtgtttagaaagctaaaactttttagcccatgtcacatcggatgtttggacattaatttagaatattaaacatagactaataaaaaaactaatttcataaataagagctaatccgcgagacgaattttttaagcctaattaatccataattatcaaaagtttactgtagcatcacattgtcaaaatcatggcgtaattagactcaaaagattcgtctcgtgaattagtccaaagttatggaatgggttttgtaattagtgtatctttaatactccaagttaatatccaaacatccgatatgacagggacttggaataagtccctagaaaccaaacaagccctatgttccaaaagaactacagaaaaatattgaacacagtgtctgatcattctgcaatagtaactgtcaaaggtgcagcagctgacatcaggtcatctgctgccatacagacatcattatctagatcctcagctttacatgcatatgatgaagaacaaaatgaatcacattaccaagcaagcatttccatgtgaaggaaacaatattagcaattttacacacacagagtatcaaaatcagacatcagtaaacagaaaagtatctttctttgaagttcttgaaatctgaaaagcaaatcttggttcaagatgacaactaatgccactccagtaatatctaattcttggaatgtatgctttgcatccttttgctttccccgtgattattttaccttccatgacatatgaatacactacattagcaaccgagaaaaacctaatacatcttaggtgtgattccactaacacattaatgataactgatgtaacgaactctgtttaacaatatgaggaagaaaacttttttatttttatgtcaccactaacaaatggatcacatctactctaaccatgtgtacgtgtaatgcaagatgtgtagaatcatatgatgattaatctgggtaatgaacaattgtcaaatgtaagtatttgtgaaaatgcagcgtatcgtgtttttgaatgatgaacagatcggtcgcttttaggaggccggttagaccggatgtgtaccgccggtcagacaagtggtgatcgggtggcccgacggtcagaccgatatactccaggttggagccagtttcgggttgtattcatggaacttgtagattgcttcatgttatggtttctagaaggtttctattgatatgtgatactattgtgtgttgatgtgagtcaagttggtataaacttgtactcggatatggagtctttttgttgttcatgtgcagatcttgcttgaaatcatgggagtatggctagtgatggatcgagactaggcttgggtgaagttgaggtccagatgatcaaggatatccttatgtgggatccttaggctagaaagcaatacacgtgaaagtgaaggttttcatatggcatactcatggtgttgtgtgtgtatgaaaataggagtcaaactaggattgaagtccaagtatggaagattgaagaatggaattgtatgagcatgttgtttccctggtttggtatgttttctatatgattaggagtactagttctagttggattcatggctagggaccgcgatgttgtaggtataaataaaagaggagttcaagttagaagatatcgacttcttgggggagaaaaaaatataatttgctttgaggctttggttctagtttatgagttgagagagaagtgctttaggtgcacttcgtaaagttgatctactttaaagtgtttcatcgatatgtgttttttctgaatcttaatagtcatactggctcctggcgagtggtctaaccggcaggatgatggcggtctaaccgatagcaaacaaccggttagactggcggcggtgagaagacagctgacaaggaggtagtggtctaaccggttggataacaccggttagtctagcggcaaaggtgtagtcagaccagtgtgcacacggcggttagacccactacgccgaggacttcatcaggtttgagggttatttccactaaaagttttggtttttgtgtttctaccattcacctttctggtaggcttggttggttcttgtattcgatcctataagtggtgtgaaagccacattttctcttttttctcttaccgatcttgggtttttacccacatgttttttatggagttgattttccttgttggtgcgataagatgaaatcttatatgatggttgtggattatgatatttggttaaaagttgcaaatcattacaaatttctcctcatattaattctactgctttaaatactgaatttgaaagcaattgtaaagctcgggggcacaaagacagtggcctcgggggtgggcggcgccagtgggcttggtgcagattcgccgccccagccctcgggagcggctcctgcacgcggatccggtagtcacgggatggatccgcctcccccaccctcaggagcgatgacgacgcttggaactggcggcctcgggatagggacggtggcggcggcatcggactaggctgatccgccaccggtgctaacggaagcagcagatctgtatccaatctgaatacggggggcgttgcgacggcggcctcaagcggcgagagcaagcaatggcggcggatgtgaggacaacgacggtgacagcggccttaggtgaaggaagcgagcggcggcggctgcgacgacgatgatgacgaggacgacgacagtggtggtggctgtgacgacaatggctagggtttgggatgaatcggggagctagggtttcgaattttatcctgggaatttttattttttttgctgaaattattttcgcgttcgcttgacatagatgaccgcacacaaaaatcctatttttgcatacgtttgctctgctcgcatggaaaattttggttttcacacacctaggttcatgcgggctgtctagccgcatgctaaaatttattttggacgcatacaaaaatcgttgttgtactagtgtaatccggtgcccagagcttagcgtggctgaatacggtggcggtgaggttccggttgcggtggtggaggttgggaagctgacctcctgctattccatctcgcgaggtggccgaaagccagagagtgagaggcggagagaaagagagtgagacgctagagaagggaccatggggagggaaatgtgggagattggtttagtggtaggaccaactcgatgatgcgtcccatatttcatcccacatcgaatgctcgagacgaagcattttcggcaaacaacactcagtaatataagtctgttcttaccaagattaaataacatttaaaagttgacaagacgaattctagggtattacaccactaattttatatattattccattttacggtatggtttatgcaaccttaagtgactagtaaacacgcaagtcaggtaaaatagcaaacgcaaaacaaggagtctagctgtggcatttcccaacctacaaatgcctagcagcgtgcactcatcatatatccgcccccttctgtagctttcttttgcgttaggttgtgttcctcttttgcctcttcctcgattgtgtccattggaggtgttgcggattccatcttggccttcttcagtgtttgcactaaacctgccaggcattcgtccgcgtctctcttcctcttgcaccgtagcatgaagttattggccacgtctgccggcggtgacccatccatctcgtcgtcgagcagcagtcgactgatttcaccgttcctcttgctccttaccatgaggttatcggcaacgtctgccggagtcgtgtcggtctcgtctagcagctgcccgatttcagcgaatagtgagtggtcggtgatgtccaggtagctcttggcgagcaccttgaaggcctcgaagcggcagtatgacatctcgatgtgcttgtccatcctccccggccagattagggccgggtcgagccagtcgatgtggttcgttgtgaacatgaagaccctctcgctgccgcacgccgaccacagcctgttgacgaagctgagcaggcccgacagtgtcactctgctcttctcatcgttcttgtcggcaaactctaccagcatatatatgcttgtcgcggatttcgtcgtcgccgttgactaccttgttgcccttgcgcttggtagtgagttcgtcctcgatcgcgtcaatgtcctctataacgatgatggacttgtccgtcgtgtcaaggaagagcttccgcagctcgctgttgttcttgacggaaattaggtcgaggtcgtagacgtcgtagtcgaggaagttggccatggccccgatcatggtggacttgcccgtgcccggtagcccacgcagaaggtacccgcgcttccacgccttgccgaccttggagtggtactccttccccttctggaacaccgtgagatcctccatgatgtcgaccttcttcgcgtggtccatggcgagcatgtcgaacgtcgcgggtggattgtaagggacgctggtccacacgctcttgttcccctcgctggcgtggtttgtgaacagccgcctctgccggttcttggcggtgagctcgcgccaccgccggacgacgcttggtaggtaggagctgaggacgagctggcggtggcgcttgtggaacaccagccggaagcagcgcggctcgtccgtttcgccggggtagtagctgacggtgatggcccccttgttcttggaggccttggggcacagcctccaccacatgcgcgcgccgtcgaagctgtcgacgacctcctggttctcgtcgagggtgacaaccgggtcgtccttggtgttgttgcagagctcggccttgagcttgcaggcgccaccggcacacacgcggctcaggtaggtggagacggcgccgaacatcttgttccgccggaaccgctcctcgccgtactcggacacggtgatctgctcgtaggggttgaagtaggacatcgccatggggaccaggctgctgatgatgtacctagcctcctcatggacgtgctccggcatccgggaccaaagcaagcccacgccggccatggccgacccgaaccctacccacgtctccacggatgccatgacttgccccttgcaggttgcagccactgctcacctaactagcagccactgcccactgctagctagctctctgcaatgattaattgccgttgtgtggatgtgtgcttgtttaccgttgcttcgtctgtggcggtgtggctcggcttatataattggcgtggtgtggctttaaatggttcccgccgtttcatcgtggaagaaggtgagaacgcgtcgtcgaagtttcgtcgaagcaaagcgagcgaggtgatttgacttactccacatgaaacatgtagatattgcaagtgactcagagaccacaagaggggcggcctatcaccgtatcgggtttagcaattactccttcccttgtaatatatgtgatttatactatctttttaaaaagaaaatacctagttatgatgaatccaaaaaattaactttaataataacaaatataactttcgaacattagtgtgacttatatgcaataatatgcagagaaactcataatcctatggtataggttatatagatgtaaggtatttgaaaattgttataaaaatggaacatgcaatggttggttcaattttaatggaagagccaatttttttatgaacttattacattttctccaaatagttgaatttattccctattgacattttctatttcttgttttattttatacaagttcaaatattagcgttatggatctttaaattattggtttaattatgaatacaacaatagttcgattagaggttacatgtgtagcttaaaagttatgcattgttttaataattttaattatttctcgctataaaaaatagggaggggtagagtggatagctaaagccgagaggggagggggtgggtagtactgtgttgtgcgcatgtgtgggggaggacgaagtggaggggcattttttttctacctttctaaactagaaaaaatgcccgtgcgttgtaacgggtgaagatattttaatcatgtaattgttatacggtttagctatggtgaaattcatcgtggaaattcgcttggatattttagtttagaaaatcatgagatgcagttaggtgcctgacttttatctcaagttagaatgcatgtttttttaaagagatttcttatgcgactcctttcgtatttccaaaagcaaacgaacttaaaatttgactcaaatacatatatgtatttctaaaagcgaacagacttataaaccaactcaaatacgaatgaagtactaaaataccaacaaaaacatcttcaatttttataatagtagagatgatttaagtgaaatctgatgatttgatttttttctcatattttctaatatgtcttctaatctaatatttaagatgtaatacatgttggcttaagctttttttaaaagtatacatattggctaaaaaataatggatccacctattcaagtggaaactgattgtcaaatgtttttttcttccaacttataaggttttatttttatttaagacgtaacacgtgacatgttaagtgcaattctaagaatgtacaacgatttaaggtgaaatagtacttattataattttttataatgttatataccttttgctattttgttaccatgcaaaggatcagtgtctatgttcaaataacatacttttatttttatatgttaatataggtaatacggatcttaaactatttttcttaattataaataaaaaaagttcaaatatactaaaaatcggatataacttaagaattataatcatttggctttctaattatcgatcattttgtattaattagctaaaaattaggagacgaaggaattgaatgagagaagagaggaggagagagttgaaggggagagaattaaattatattgttttatttgttattaatttattaactaaatatagaatagaagctttattgattgattaaaatttatcgtttttattcgtcttttcccatagcttcttattcatagtagatagtaaaaatatgaacattacaaatcaaataatattattttgagttattagaatgttagatgggggagtattattttaaaaacattaattggaattaggttcattttagtttttgtgaagttatatatgctgataaaatctatatcatcgttttgtttaataatgcagaaatcagaaaatacaaccgtaaaatgacatatttcttttcaaagttgaattactgtgcatatgtgtctttaaatgtaaactaatctaaaaatataaggggatcaaatattagtttttgatttagatgttgtagttgcttactttttagcataacttttgctttctactccctcggtcccataatacaacggacttttgacttcttgcttgcactgtttgattagtcgtcttatttaaaaaaaagacacaaatataaaaaataaaaagttgtacttaaagtactttgaattataaagtaagtcacaaataaaataaataataattccaatttttttttaataaaatgaatggttaaacagtgtaaacaaaaagtcaaaatcccttatattatgggatggagggagtaacatattttgggaacattactttttatgattgcagatcttatttaattactatgaagttatgtatgatgataaattatactccctccgtcccaaaatataacaacttttagctctcaggatttatcccaaaatataacaacttctccaccaacatttctcttcccaacctatcacaactctccaccattcacttttcccacctacctccactactcatccagtcataaccctccaccattcatttctacctactttcttaataaccgtgtctaactctaaaacttcttatattctgatacggagggagtatattgttactttatttcatattttttataattgcttgaatggtatgcaaaggttagaagatataaaccaaaataaaatttgttttcaaagttgaattatagtgaatttttgtcgtaaataatttaaagatataagtggacaaaaaaaattctatgatctaagttctatgatttagatattataacttaattgtttaacacaatttttatttttcgtaactaataaaaactaataaagcaagaaaaaataagagaaggaataggtagaaaataggaggaaaaaattgagggaagagcagagagctgacaaatgtgagtaatgtacgtacgtaaaagccctggtgggcctgggtttgagagagaatttattgtttcgaagataaatctaatggtcataaatagtgggtcaccaaatttaataaacattaatagttggatgttttattttttttctcagaattttttatgaatttgtctaactaggaaggtagcccgtcacatgtgtggacatcttatttaatttgtttggatttttattatgaatgtttatcttactttattaaattttttctagataatttatttgggatttatttgaatgctactaatattttttttcctaatggagttgctacctatgaaactatagatcatttgtactaatatcttgtttttcgagcttctaaactgtaactaacatttttttcttgtatactatatattaattgaagatattttctaaattactacatcatataattaaatgagatagatatgttgaactattgatttagttgtaaggacgtagtattgcattagtaaatatttttgctgaatcagagcatcttagaaaaggagacttttactgctctctgtagtttagggctatacactttgaattgaaattatgttagactttatttccaaaataatgccggaaaaatcaattttctgttagattttatttgaaattttaaatattttactcttaaaatgtttgaactttgctatttagaatgggtcaaatccaaaaacaatgttacacttagaaaaaaatgttcagttttaaattattttttccatgttattttttattttgatctttgcaacttggaacgaaaatataagtgggttaaggccatataatttggcataaggttctaaatttctctctctaattaagtcagaaatgttaaaataatagtcatcggtggcgctacgaagcgctcctcaccatttcccccaccaccgaggcaaccaaccttcgtgtggagttaaaatttaacttagatacaattgggtgtgggttgagatgacatcgttgtggagttaaaatttaactttacaacgtgagttatctatcttggagctacgtaaactcaaaaaatggatgagttaactattaactttgaatcgatgtgataataactgacgttaaaaacatttgttttattactaaaaattcataatgttgtacaaaaacttgtacggggactacatatgtagttaaaatttaacttgtagatgtaagattttctaattgtagttaaaaactaaattaagaaatttatgttatgttattattgttggatttaatagttaaaaataacttattgttttaaaaacacctatatgatgtctgaaatacgtagttaaaaaaataacttttagtttaagaaaaaatatgcgtgatcatagggattagtgattcggcgttaatagaaaaaacagttagatgaggtgccgaaaacaggggattttttcgtgcgataattccacttaataaaaccagtgctacgtattcatttgaaaccctttttcatatacatcgtatgcttggtatccttactgagtaaaaaattaacttgatatgacaacaaaatttttactcaacaaaatttaagcataagttaaatttttgttggcgcttgctccggacatcgacggcggcgcatcgtggaggtggccgccgctgctcctccatatccattcgagtccaagcttgccgcggcggaggtcgcgctgtgcgcgtgggggtggagcggcggccggatccgctgccgcctcgcctcctgcccgcagtcagcaatcacagccacgccctccgtcacccgtgcaggatccgcatcggatccaacgtcgcaccgcccgtatcacgccggatacgccccaccttagtggctaagatccgcgcgcgtggggcgttgagcggtgtccggatgcgcagcctcctcaccttccgtcagcagtcgccagtcaccaccacccccgcagccatgccaagccggatccgccgatatcgcacccgccgccagtcggcggtagaggtggagctgccacgcctcctgcccacagtcgcccatcgtcgccccgccagcaaccgtgccatgccagatccgctgaagcggcgcccgacgccgctcggcggtagaggcggcgcagaaaacctgagtggagcatgcaggtgaaggtcgccgtcatccgatcccaagcccgccgctctcgtctaggccccgtcatcgtcaaccctagctcgacaatgtcaccggacagacattactagaaatataactcccagcaatggcgcagaaatactcctggtatattatggttacagagttcattcgcaagcgcacggatataccattgtatcatttcacccgagagtattcgaaggacatcgtatttatttaatcccgtgggaagatcatagtagagacaacctgactaataatttatatgttactggtaataatcatagtctaagcaggggttaagataatccaagggtagaatgacacacaagcagggagctactcattatcatattaaattatctaagctaagtggaaagagaagataaatgaaatctattcctatacttctagtatatatagtatacatacattctagttatctgacatattacctaataccctctatccgaagccctcctggtacttcgagaagccagccctgattgccaagttccttacaacaacccgtcatgaccatacaactggggctaaatacggatgagtaccctccccaggaaattaacttaggactgtatacacgagcggaggaatacccgtactgagttgtcaccatcagcggcccacctctcatccatatcatataaccccaaataatgatatcccgtaatctagacaccacgcctaaactaccagatactactcaaatatcatcgtcatgacatagattagttgcataaacaaacactaaatccgtaccgatgcatctcccagataagctagcagtataatcagtataacatgaacataatgtaaagttggcattcatatacttggaaagtatttcaataccataaatgtataaagaagagtattcgaaataaagtacaaagcttacaaaagagaagagaagagctactagagctatacccgaactcttccgaaagcttccggactccgatttatattctattcctattccactagcttaaaagcactaaactaaacttgagagaatatgagagagctttgcttgaggtgtgtgagtgaagtgagaatggcaactccttttatagtgtggaccctcgtttttataacaggaatcaatcgtgtaaacagtaccatttccctggatcaagtagtttggtacacacgaattcatagctgaaatatcaagtgcacatacacgagtgtctgatacgaattattacatcataggcccgcaggcatagtcttaaatcatcggaccgagaggtccggaatacatccaaaagcagaaatagataaggcagcggaattcaggcagcggcatgccattgccacaggcaacgaccgtactaagacctactggacgccatcgtcttcatctccctcctgatagtaggcatagggatcctccgaggcttcatctcccgcttctgataaattttatatttgcaaggatgagtaccaaccgtactcagcaagccaccacagcaacaatgcatatgaaagggggagttcaaaggatggccatagttcttttgcgcaaagcaagttttgtaattcttttta

SEQ ID NO: 20191 - DNA, 11985 bp, Oryza sativa
aatggctttgggcaactaagtgacttttaaatgctgtttactgcaaaacctaacccctactattatccccttgtacccccttgcattaatcatgcatctgccggtgtggcttgctgaatactgtggttgtactcattcttgctcaatcttttcccccttcagtaagagaagctttggagaagatgtcttaggtggagtcctggcttataccccagttgagcgcctgtgaagatggagccgtaggcccgctagtccgctgccgtttatttttgattgtcaggccttaagtgcctttgtaataatgtaaatattatcgatataataaagatgtgtctttatatcatgtttgtgtggtgtaccccggcttttcctgggacggggattaatacactagcgttcgggaaaaggcaattttcccggtcgcgacattgcccgggggtcgtgtgctcttgcgagcagtgctgagggtgcgaggtcctccaaggaaggtgatgcggggagcaggagcctcatcctctgaaggatcagtgatgtctggctcgatctccggctcggtgtcggtcccctccgtctcggagtcgatctggatcggagtctccaaaccggaacccagctgcggagaaggtgtagggatcagtggagtgtgcaccaactccggaacaggtggctgtgctgctgtagggtccactaggtagggcgctgactcggtagctagcatactagcctctcccagaagagcgtggaacgccggtgggtacggcggggtgaggaagaagtagcggtcacggcctactgctgtggaagtagaggcccctgtggtgctgatcttggctgctcgaagctgctcctccagctggctgacgtgctcctgactctctctcagctgctcctcaagagtatccatcatcccgcggcgatcgttgtactggtcagataactgctggaactggtcgccgtggacctggagctgtgccttcagtgagtctatctcactgccccaagcctggtgctcctcctccaactgaagctgctgtgctgtgaggtcggtcacctcagtctctaactcctccatacgtctctggtggtcgtcaatctccaacagagcctcctcgtagaagtcatctactgcctcagcccatcgtgacaaccgagtcaccatcgggttgtagcagcagggcgtgtcctgaactgtgcaaactgagttgccctcctcccggaacgggtgatgagcaaactcggtactcactaactcagctcggtggatagagctgagtcggaggaaggcctcccgggcggcatcctgcatcgctgtctctggcaggtctcggtggtgacgtgtctggaagctgtagtctaactcggaagggactcgggggtgaatctcgacccgagcctcccaaactgggccacactgcctcactcggtatgacggaaaaccagggtatcgcagacgcctcaacatccgatgcagctcaataacataaccctccgattggggtaagctcaactcccaggtagcgggtgaatccgaatctgccatctaattttaaggaaaacccaaagtcagttgagagtaaaacttgttttgtaaagaaaatagttaagagtaagataaaaattgtgccgagttttgtaaacatagcgtttttatttttgaaagtattactaaatgggaatttctcccttggccaacttagaaaaggggtggggcgccttttggtcttttcctacagtcgtatggctctgataccagctctgtggacccccgtttttataacaggaatcaatcgtgtaaacagtaccatttccctggatcaagtagtttggtacacacgaattcatagctgaaatatcaagtgcacatacacgagtgtctgatacgaattattacatcataggcccgcaggcatagtcttaaatcatcggaccgagaggtccggaatacatccaaaagcagaaatagataaggcagcggaattcaggcagcggcatgccattgccacaggcaacgaccgtactaagacctactggacgccatcgtcttcatctccctcctgatagtaggcatagggatcctccgaggcttcatctcccgcttctgataaattttatatttgcaaggatgagtaccaaccgtactcagcaagccaccacagcaacaatgcatatgaaagggggagttcaaaggatggccatagttcttttgcgcaaagcaagttttgtaattctttttacgagcctaagacctagcattgactgatcaaattttagtaccagagtttgtatttaaacaacgacggttctgtccaccatccattgtgatcccaaggatagcttcccgccattgattcgtcatggttttctgaggacgtccaccttcccgcttctcaggaagtggctccatcagcataaaaaaaaatcatcatgcaatatcccatcccacacaagttaagaatttagagtctagccaagtgtaatacatgtcccggtgctcaataaccgcgagcacggctattcgaatagatttggtttactcacactgcagtggatgtacactttacccgtactccgcaacttgcccaacacatgagcctacgtcccaacgaatgagacttgccacggcaaagcctttcaataacctcactttggcagtatccgctccatgaacttaagccctcatgcactctaggcgtacacggtttttagcagtgagaggagttctggcgctcccgagggggaaaactcacgcacgcctaacatcgcattctgtagttgaacccaatccatgctgtccccttttgggtatctccttgtagtcttgtagtcttgccaagtcagtctctagccatccgtatcgggtatccgccatttggccatccgtatcgggtatccgccagtagactgcttgttcgtccacacacctaagtgaaaccactatgcagggatactgcctccgctcggctatctactccgctaggtctatacccattcgagaagtacggctgtactgaggtcgtttcatgtttaactttatggctcggtccttaactgaccagggacggcactagcctttaccggacaccacccaagtcctccagccgccccagtcgaaaacatttgtttaattttatttctcctttcacaaatcatgtcatcaacatcatggcaatgtggtgctcatgtctccacatgccgcatctcaattaccttcccaaaggtaattgcccaagcatatagcatttgataaatatgagtatgcatgattctagaatagcatttctaagcaattgtcataattgactagggactcatacgtagacatggttacaaagatttaagggtaaacaataatcaaggcatggcataatcccaagtaggatattcatcattgcatgcaattttatttataaacaaaataatttcgcaattgggatcaacatgttcaaggaatagtgatgacttgccttgctcaaagtcttgcgggtcttggccttcgcttggatccgcaactccctcgggctctatagttacgtgcaagaattgatttgaattcggttagaattcaaataaaaatccaaacaaatccaaataaaagtcgcatgcgaaagtcgattcccttttattaatcttcactatccgcgaactacggcaaacccaatttcgatttaaactgttttgcgggtataatattttgttgtcataagtttttaatttaatttacccgagcattatatccatatattagattagaaatttcttctcgcgagctaaatgtcggacggaatcctaaaaatattataccatttaatttagtctatgactaaacgattaaacataatatacgtctaaaattcctatcgattgaatccgaatttctaccgtgaatcgattacttatagggtttacccaaaaatactctataataatctataggaattcgtctatttgtttagttattaatttcatctaaaatactaccgcgaatcgattaccaagaataatccgtaatttatattacatttttgcaattctacgactataattaatctataattaaattctaattattttaaatttcctaaacttccccaaactccctctaatttctatttatttcctttttcctttttctccctttccttttttcttttcttttctcttttcccttttccttttcactttcttctcttctttttctttttctctctcctctcttcttcttttctctgccggcctctcttttcctctccctttctctctcggctctctctctctctcacccgagcggcggcggtggacgcaaggggaaaagagggcggctcaccggcggcggcagcggcgacgacggcggcggcgacggtggcgcacgacggcgtgggagcggcgacacggcggcacgggaacggcggcgcgggaacgacggcgcggcgtcacgggaatgacagcgcggcggcacgggaacggcggcgcggcgacttcgaaggtggcggcgcaacggcacgagaacggcggcgcgtggagaaggggaagagggagaggatggggagatggagtggggagaaatggggaggggtggagttttataggggagaggagggggaaagaaagggaaggggaggggcgacgcgacagcggcgcggcggcgcggggcgcgaggtggcgatgggacgcgcggcgacgggacgttgacggcggcggcgacagcggtggcgcgcggctcggggcgggacgcgacggtagcgcggcgcgacggcgacagggcgagacgacgggcgagcggcgatgggacgggcggctcggggcgcgaggtagcgcggggcttggcgcacggtggtggcgacgggcgacgcgcgggctcgaggcgcgggcgacgatgcgcggcggcaggcgacgatggtgacggcgcggcggctcggggcgcgaggcggcgatgggacgtcgacggcgacggcgacagcggcgacgcgacgggcggcgacagagaggaggcggagcggcgcgcggcgcgcggtgcgcgaggcggcgtggcagaggaggggctagcgctaggggaaccacgtcgaacacttggcggccgatgaacagtgacttttcccatttatcccggttttagtgtattttccatataaatttgattccacgattcctaattttacatatatgcattttactcaatattcatgtaatcttaactaatgaattctccctagattaatattactcatattttatttttatataatttattttaattagggttattccatcgtactaaaatttaattattgctaatatggttgcgatattattttatttatttcaatcccacctaacctttattttaatttatattttaattatttatttagtcaactagattttattttatggtttgttcctagctagttattcattattcgcgattaattagactccgacatcaaaatccaatgaaacaggcgaataaagtcggcatgatgcaattggtttaaaaagtttttgaaagtccgcatttttagagttttgatttcgttggtcgaattttcagggtgttacatatagcctcccaatgatggttgtgacggacggaatggtcggaaataccctccaaccgtcattggagactaatccacactgtccaggcgaagccctggatcggatggtgctgaccctggttgtcacgtcctgataaattcatcccgaaataaaaatcattctctaaatggaataatagaattaattaaaattcgaaaagaaattggcaaacactaaaatacgtacaagaaaaattcaaatgtggcccgaagaatttttattgaattcttcttggtaaaaaaggagccctcaaattttacttgaattttcagaacaacggaaataattattaagcaacaacaacaattatcaaagtttactaaaaagaaaacctaaaataaatcctcctcctcagattgggccctttttggccattcccttccatcctctctctctcccgacgtcgcaacccgagctgcagcagcccctccctctcggccgaagctgtttcccgttcctccttttctttccttttgggccggtcattttccaaagtctactttgcctcccccatgctacagtgcatcttcaacctccagccgccagcctcctcttctctctcccgttaacccttgcaccaattcctccctcaaatccgctcgattcaaatgactaattccaaaattgattagggggaattaatcccctttcccacctctctctttcccccttaattcccccttgattcgtgcttttaatcacctggaacgcccgcaccaatcccggccgctttccatggccgccgggcgacttatccgccgccgttcccacctctcccgtgcccggctccctcccccatcctataaaatggaaccccctcgatccgttctccagtttttgccccctcccgcgctctcccgtggcctcaccacccctccccgccgtcccccttctctttcccccgcgccggccgcctccagccgcctgtgccgccgcgcctgagcatcggtcggccgtgccgtcgcgtcccttggctccgcgacgccgtcctcgtctccggcctcacctcctcctcgctcgaagctcgccggagtggtctcctcgtcggcgtccagtacctcccctcctccgggcggctactgttcctcgccggtgagcagccgacgtcgccgtctcctcctccggcatcgcagaggcaacgacgaagatatcacagtcgcccctgacataagctcgggggctacagaggcagaacgcgccgttgccgacatcgagaccacagacgactggcggaccccacccatcaagttcctgaatagtgacgagttgcccgaggacgacgcagaagccgagaaaataactcgacaagccaagatctactgtatgatcggcaacgatctatacaaaaaggcgccaaacgaagtacttctcaaatgcatttcgttcgacgacggcaactatctcttcctagacatacatgaagggatctgcgggtcacacgccgccggccgcacattagtcggaaaagcttttcgacaaggtttttctggccgaccgcgctcaaagacgcttgtgacatggttcagcggtgtgaagcctgcgaattccacagcaaacacacaagtctaccagcgcaggcgctctagactatccctcttacctggccgttctcgtgctgggggctcgacatactcggaccattcccacgaggacagggcggctacaggttcctattcgtggcgatcgacaagttcaccaagtggattgaagcaacgcccacgggggaaattaaggccgacaacgccatcaaatttatcaaagggatattcggcagatatggattgcctcaccgcatcataatagacaacggctcctagttcatcagtgccgacttccaggattactgcatcggattgggagtcaagatttgctttgcctcggtttctcaccctcagagcaatggacaggtcgagagggcaaacggcatagtactacaagggatcaagacccgtgtctacgacagactcatgtcacacgacaagaagtgggtcgaagaactcccctctgtcctatgggccgtgcgtaccacgctgacaacaaccaacaaggagacacccttcttcctcgtgtatggctcagaagccatgctccccacggagctacgacatcagagcacacgagtttagaagtactccgacgaggatcaggaggagcagcgaagtgatgacgtgaatctactcgaagaacatcgagaaagagttgccgtcagagcagccagctaccagcaggtccttcgccgatgtcacgcccagaaatttagcccaaatttccagactattttgtgtattaaatccctgtccaggaccagccaaggtacacaaaacgacaagtaatatacagttccaaacgtaaataaagcgtcaaatacttacagaaatacttacagaagaggcacttagtcctcacaccgaaacgaaagcagcagcagcggaaaaaggcgatcctagcggggcttcagctccactccacaggcaaaactcaactggggtctgagccttggtcttctaacatcgtcttcaactcagaagcactgcacttctgaaaagggggaataatagcaggctgagtacaaccaccgtactcagcaagccacaccaacgatgcagacgtgcaaggggaacacaaggacagtttgtggctatttgcataaaggcggctgtaaaacattttattgagcaaacagtaaaacaattgagtaattaaagtaacattaaatctccactgatcaacgctacaccacgttgaacaggcccaaccaacccacctgaactacagtgcattgggtcgatttattaagtgtgagactaatcacggtgaatctggtcgaccgcccataaccgcgggcacggctattcgaatagttttactctgatcagaggtgtacaactgtacccacaagacacagccccacgacacgtttccgtgcgccgacatgccaccacgacataccggaaagaggccgtgacaggacccttcgcataaccccctctagccaagcacatcacacctcaggtttcacccccgtccccagcgggcgacgggcagtcccctctcgtgcctaggtgaatccggaagccgtataggccgtcgcagggcccatccaaactccatcacgcccacccttgtctggatgcgtcagctagagaaaagctatactacaagcccagccgttgcccacgctggcttgtggtaagtacgataagttcttctagggcatcccgcgaaccggtccttaattgccatgggtgcgactagcaaaaccatgcacccacagcccaccattcagtcgcattttagttgaataattacgaccatgaagcatggccagatgtctcgagcacgcagctcattctgatactaaaaatgtctaatactgtaattatcccatcaactaagctagtggtaattaagcatggctaagcatatagttctagctaggtcacataagtaacatgagctagtcgatttattacccccggttgacaaaggacagatatcaagtaaacatggcacaagcgagcagataggtaatacccggatcccatgtaattaacaaaacatgcatacttatttgcaaacggtaaaacatttataaaataggctcaatatgctcaaggggaatgtgtgacttgccttgcttcttcactttgatcttccgaactcttttcctcgcgaccgcggacttccgaaacgacggattctacacgccggcacgcaaaacgaggaaaaactctaataaaaaccaagggaacagtacataaaaactaaacaaacatgtagagttcaattttagatgaattttgcaagttgaacggctcaattcggaattcgaatgaattagatatggattttagaaggttttgagccattaaatgaatttctataattattaatgatttattgcgcaattattaatggtttatgacgtcaccgggggggaataggtggcgccgacgagcgggccccacctgtcggtggctcaaaggaggtcggcgcacagtggactcggtccacgcacgtgctacccgcgggcgcaccacgtggcagccacgtggtggccacggcggacggggaggacaaggtggcgccgacgtggcgccacaggggcagcaacgccgggcggcacggggagggtcacgtggacggcccaaatcgacccggggtgaatcgggcggtcgcgggcgagcgggaaccggcccaccggccggccggggagcggtggcgtgtggcccgatggtcaccgatggcgaccactagcgcggcggcacagccgggaggcagcggaggaaggtgaggggttgaaggggagatgctcaccgagcgcccgacggcaaaacgacgaaggaaggcggccggcggagctcaggcggagagggggtggcggcgctccggcgacgccaaggggcgccgtgacctcgcgcggggcagatggcgttccgatgggttttagagccgagggagtggtggccgaggtgctgctccaccccaaaacctggatgtctgagcggcgcggcacgggatggtccccgtcgacggcaatcggtggctggaggtggtagaaatggcggtagctcgggtttgcggcgggaatggtgcttcgggggtggattggaggagtgggccggtggccgggatgcggcgcggagcggcggcgctgtgggaggcagccgcacgaccgggcgaggtcagtatcgccggcggcgagcggctggagacggagggaagagcggcggctcggttttcacggtggggtggtatttcggtggtggtttgggggaaaaggagtggaggccggggccggacggcgaggcgaagccgacggcatacacggcgcggcgcggtggtggctggggcggcgggaaaaagtggccggtgaactccggcgagcggcggctgctcggcttggcgaggggagagcgggcgagggcgccgggagctcgggaaagttggggaaatgggaaggagaccacggggatcgtttttattggctcggggcggagggctcatggccgcggagggcggaatcgaccggcaacggtcttcggagtgggctccggcgacgtgggcgaagtggggtggttcggcgccggttttggagggggaaagtgggggaggagagtggaggaggtggggcgacgcggtcccgcggtcggggcgagcgcgcgggtggaggaggacgcggaatcggcgtcgacgtggggaggccgtggcggcggtttcggctgagggagtcggaggttagggatggccctgacaggtgggacccacctgtcggcggctcggggggaaggagagaggaggagacggttgggggacgccaagtagacttcgagagagagagccgagcgggccgagggagggaaggccggcctgggggggaagggaacttgggccggaagtggcccaaagcaaagaaggaggactttaattcgttttctttttttatttaattggtttaatgaactttgtattattaaaattatttattgagctccgaaaattcacgggaaattttcggagagtatattagggcacagagaatattacaaaatattctcggccaatgatttttaaaggaaaatttcaaattctcccattatttcacttgattaaattgctttaacttttatttaatttccagaaaatgcattattaaatgatttttaattccgaacgaaaatcggggcgttacagccgataccacgagaagcgcatcagagcacgcacactttcgatcggcgattacgtccttcgacgggttcaaagtcaagcagggcgcaacaatctcttacccaagtgggagggaccatacacgatcacgcaagtcttgcgaccaggtgcattcaagattgcagacggcgatggccgcgagttagcaaattcctggaatattgatcaattacgtaaattctatgtataaatcaatagcattcatatttgtaagacatctcatgatttccataaagttgattttaggtaaaaatttcgggcaaaatgttccttcccgacaatcccttaccacgacgacacctagcgttgaaacctatcctcatgtccctttacgccgtcttgacaaggcctctgaggaacctaagggaacttcggctagggacgcccagagcggataaggccttgtcagatcatgtagagacaaacgatcatgtaagatctggtcatgtaagagttctcgctgtgcatattaaccaggccgtgtaatcggaaattgagttttccaacttcacggctgggggctagggtcagtgcttttttcaaccgaggcaggtcaagggtccaagagccttatcctccgagaacaattctccgacgacaaggctgggggctagggagagtgtatgactcaagtgattgattgaagttgcgaaatgagaa

SEQ ID NO: 20192 - DNA, 720 bp, Oryza sativa
caaaatatattacatgtttccttgaggtattttctacaggatacaaaaactaccaggacggccaacaccaatccatggagtgaaagaccttctcggcgagtggcgccatcgacttcgccagaccgtctatctctgcggcagccctccgagaacatgaaaacccttcgtggaggaactcgagatgcagctgtgggcggtgatctcggatacaggccagcacgtgccctccgacaaaccggctcgaccgacgacactcctgcttcagggcctcgtcgctacgcttgccgatgccttcgagctgggcgcaggccccattcaaccacgagatatatctggccgccgactcctcgggattcctgcgaggtacctggagttcccggcagactccagccattgccatatagcagctcctgaggtacgagttgaaccacacctcgcgacctcggagcgcttccacggcttggtcttttttcacttccaccatggtcctctcgagttcggccacctcgaacttcgtccgccagtattggattcgacgatctctgtcagccaactcactctcgaggtctgcccaaacacggaaatgactaagtcaagtcattcttctctctcgagaacacgacatattaagtcaacccgaacaaaagagtaaaggaagtgaaaaccaaggcacgaacctagggaagtcatcgccatgtccgctcccacggacaagcttga

SEQ ID NO: 20193 - DNA, 7114 bp, Oryza sativa
tgctgcccaatgtgttccttgttaaatggccagtgatgaattgctcaataagaacaaattatctacacttgttttttttttatgcacaagaacagattttctgcacttgctcttttttctggattgataagagagactatatacacttgttttctgtcattctttgatgatttatatacccttgctgctgctgcccaatgtgttccttattaaatggccagtgatgaattgctcaataagaacagattatctacacttgttcatttttttgcccctacacttgttcatttatataccactgctgttgctacccctgtggcatatatactcctcctgctgctgttttatgtcaatcatgcaaattctgtacccttgctgctgctgttttttaaatttgcatgattgattcagtggttatatacctctacacttgttctttttttatgcataagaacagattttctgcacttgctctttttttatgcataagaacagattttctgcacttgctcttttcttctggattgataagaggagtatatctagacatgttgttttagttaatttgcccctgctgttgctacccctgtggcatatatactcctcctgctgctgttttatgtcaatcatgcaaattctgtacccttgctgctgctgttttttaaatttgcatgattgattcagtggttatatacctctacacttgttctttttttatgcataagaacagattttctgcacttgctcttttgatgttatgattttctctttttatcccttcatgcaaatgattgtaattgatgcatatttctcagcaaaactgaggccatatctttcatagtataccccgtattacattggatctaatgctatttagtctaatggtaggaaatttataatctttttcgtgaaagttaaaccatgtcaacgcccggcgcaaacccgccctccccaacacctgcgaggatccaggaagaagcaaacccagccacagaggcagttgccgaaggtcatcccgcgacaacggcggtccaacaacccgaaattcatggtaatttataggataaattttcaccacataaccacataaattttagctagcaccccttagcaaatattgccttctgtttgtgctgcagaattgccgcaggaacaacatacgtcgatgtcgggcgagacaagtgcaagtaggtctagtagaaatccgcggtcacaaaatatatggccgaccacagtgcaagttataagagaggttgacgctagtggtaggcccacggcgcccaggaatgtcattggaagatggtctaactgctgcgggatagcggcacgtgagaacttcgggatcctccataaagatatcgggaaggtcacagaagccgagaaagagcgagcttggacggcaatggagaaatggttcacatttccagccgaagcaaaggataggctcaagcggaaggcattccaaaagatgggcaaagcttggaagaattggaagtcgaagctcttcaccgagtatgtcaacccgcccggcaatcatacgccgttcgatgaataccctcaaataactgaagcggtgtgggaggaattctgctctctcaagaccacccaagagtttagggaatccagcgaggcacatcgcgtactgcaacagcggaatgagcacccgcatcggctgggcaccgcagggtacatcggcaaggaggcaatatgggcccaagaagatgcagccgctgcagcagcgaatgtacctgccccgttttcagacatccctgaacaaagagctcgcaactgggcgcgggcaaggggtaaggtcaacccggacggctctgtcacatttgagaacaaaagtgatgccgtcgtctatcaggaactggtgagttcactacttaacctaactaatttccgttcgtataaagtacaagttcgtataaacgactatcttcttttctagttgggcttggttgctgaacaagcttcacaaagcgaggttgagtccgcgccgaagaggcgcgaagatgacatcctcacaaaggcgctcggaaccaaagaacatcctggccgaactcggggaattggtagcgatgtgccctggaagcatggactccctcagtacagctcccaatacaggaaacggaaagtctccaaggaagagagggacgctcgtttgaaggccgaacttaaggttgaggtcattcaagaactagaagctagcatgaatgcaagggtggaagaaagggttaacaaggtgctcgccgacatgaatataccccgagtcacaacacctgctgtgcaaccaactcctcgtgtacaacacgacgcgagtccgtcacagcataggagtagttgtgcatccacagaggtgccggcccctggtctcccgatcgcaccactagctgcagtggaccacatcgaggtaattattgttatccgatccatatctaataaaagacatttacacattccaatattaaattcaaactttcaccttatgcagggcgcagcacagtgtgtcctactagcgagagtccacccaactttcgctcctgaagtcgctgagggcatggctttcaagccctcggttacagacaaggtccacggcgcagacctgctagctgggtatgccaaggtgtccatcgatacagtaaaggacacctggtcaggctatccgctgcccgtgcccccaaatgatgaaatcatgactttgggcgatgcgcgcaagacattcatacaatggcccaaagaagacatagttgtgaagatgactcctcgtccaagtcgaccgacggagcttacacctcccaagtctaagctatcaattgaggctccccgtggaccggcattgtcagtacctcattctcccggtggagctgatatggacttggcagatatagctcaaagcttggctccaataaagaccacaagaaaggccgatagctccccaccacttgtcaagagccagaagcgtgaacgaggcaaggggaaggtcggggagttggcgccggagccaaaaaggggcaagctgcgacgtcgatgccggtgagcaaatcggggaaggtcgtgagggcgccagcccaatttgagctaggcatgccattggtggaggacaatgtgttagctgtgatgggtattgcttgccgagagctacataagcaatacatggagctaagcaatgccaagcggaaaatgagggagtcatccatagttggacatcacgaccaccagccgttcctatcgtcgcctgcctatataactataggctttgatgacctcttcgaccttttcaggatccggaagttggacactggtcttctaaaatgctactccttgtaagtgcataccttctatacttgtgatatgactggactatatctcctaattaaattagttctaatacgtaaatattttaaggttgtgttggatcgagagtcgtcgccatggtaatcaggttgggttccttgatccatccatggtgaatgaggttaatttacaacagagctccactgaggtggttgactatgtcaaccggtgtttatgggcccatcaagacaaggagtacatcatgtgcgcacacaaccaagagtaagaggacaatacccttcgtgtatattgtttttgaagttaaggttcttagtactaacgctacataaccactgcgcaggcgacattggattctcctagtcatcgtacctaagtggagtagggttacctaccttaactccaataagtccaaagattatgatttcagtgaaatcaccaaggccttaaatatggcttggggcccatatgtggaaaagggtggtaggcacaaggagggcaagaacgaactttatcatgacaccaagtttgcatgcgcacaacagatcggagaccaatgtggtttccacgtgtgccacaacatgtcaacacttctaagagaggtgaaagatttcgaccctgaggttgttgctaatggcgaataagctcatttcaatatctacattgctattcaaaacgtgctaattaacctcttatttattaaacagaaaggtagagctggcttcaagatctcacccatcaaccccccgctatcagagacgaattgtgtgcctttattcttgcagaaataatgaacaagaaaggacgttttcatgccaaatagactcatgaacttggctagataatttattgtgatgtaaaaaagatgtttttataatttctggcgatgtaaaaaattatgtttttatagagtgcaatgtaatttactttcatatgtgcaatatttatggtactttactaaattgtcatcacatttgatcaactacgatttatgttgtacgtctcatctgttttctccttttttttttccttattgacaggttgtgcaggtcgatgacatcatggctttaatccatttggtaagtatatatgcggttctatgagcaacgaccgaaattgtggctttcaaggggtgtgaatttgctgtgcaaaattgtggcatttgaactgcatatatgtgttgttggggatctgtgatgttatattgggggggtgatgtatctgtgatggatctgtgactggaatatatctgtgatgtttctatttttcagagggcatggctagcaaatcctgaggctagccaatatttagcatttattttttttctggaattaactcatcagtgacgggtcagaacaaaaatccgtcaaaggtaacataacctgtgacggactagcaaataaaggcccgtcagaggtgacctacctgtgacgggcctttacttttggggccgtcacaggtagatcacctgtgacagcttctaactacggagacctcaacctctgacggcctttatttaaagggccgtcagagatgagtcacctgtgacgggtcctaactcgctcaaggctagcggagaccaacacctctgacggccttctagtaacttgcccgtcagaggtgggtgtcacctgtgacggccggccacccgtcaaaggtgactggactcaccagtgaccactgatcactgaccatgcgcgaagccgtcaaagatgagggtttgggcccgtcacaggtgaccttggccagtgtagtgtgacaatgaaagacatttggcgtgaacaaacaaacagaagggcccaataaataatcactctgtctgtaaatgagagaagaacaaccaaagaaacacagtacagggttgcggcatagttaccttaagacggcggcatattcagaaatcactgtaatagacttctagagcatatattgtctgtcccgagaacaatgtccctcggttgataaaaacaactgacaattcaaaaacatacacagctagcaagggatctattaatctccgttaacaaaagtatttgttcattaagcagaactcaaataaggcatcgctggtacactgcacactagcttggcatgcaagagaactgaactaattgcaaaatcaagagatagcacataagatcaaaataccggagagaagataaatattatttgcatgcttgtattcctaggtcatcaaatatactgctgaagcaaatgcaaatgaagtcatacattactagatatatgaaaggaataattattacagggcttttggatgtttcatacctttgattcttcaaccgcttgttgcggtacaaatctcttttcatctaatacaactctagggatgtgagaaaacaagtgtgaaaacagggcataaataagtgtaagactacatatagcaaacaaattacaaattaatagatctttgaccatacgtggttcagccaataaccatgcacaaatcacacatgtccagaccatagaatgcagatcaaacatggaaagcctgaagaagaggattggttttcaaaaagaaaaaaaaaagaaagcctgaaagaggggatttactgacaggaatagaaaaattactccgtggtgatgggcattttgcccgctgctcagcgacggaggtgctgctttagtgccggccatagagggttaacgctgctatgggatcgggggacggtggctgccagccttagcccctaagcccgacggcggaggggctgcgacacggcccggtaaaggcagtgctgcacctgccggcagaggaggcgttgtgcaatgcggaggcgagcggcggcggcggcagcgggagaagcgtcggaggctgcgacctgcgagggtggtggaggcggcaaatgtgaagaggaaggaggacgggcggtggaggcggcgatggaggggcacgagcgtcggagacgtgggaagcgattggaggtaacggcagaatacaatcgaccgtctgctagggctagcaaacaaaaaattacgattatacccctccgcacattattttatatggacaataatgcccctacacatttctactcccatcaagtatggtggtagtagaaataaatctcaatccttcgatcaaatatgatccgcggttcagattaatttatactgcaagtagagtgtgccggagtggagctcatatatatatatatatacacacacacagagacacgatgatgagaaaacaagtaacaaaagaatgatgtttgcatattttttaaaaaatataataaatggtcaaacgttacaacactatatatacacatttgaaaatggaggttgtattttacaacgacttcacaaaaaattgacaagcgcagcagtatcatcacagaagcggccagcagcttcgagcgttagctggtcttcttcttcggtggcacgcggcagctgtggaatttcctccagggccgccatctccgcgagctccgacgcctcggcggcgtcgcgctgctgcagcagacgctcatagtctgcctccatcgcctccatggccgcctccagagccgcctccgccccctgcccatggccgaggagctcgaccaggcgcgccacggaagcggcgtgctccatggcgccgccgccaccggcgacgacggcgagccgccgcagcgttcgccggacgccggcgcgcgcctactcgaacctgccgctcgccgcgccgaggtccatgccgaggtcgcggatgcggcgcgcgacggacagccgcctggacgtggcgtcgcgcagccgctccacgtgcgccgcccgccgctcccggatcgcgtggcgcgcc

SEQ ID NO: 20194 - DNA, 40839 bp, Oryza sativa
ttatagtaaaaagtttacatatccgttttaagtttaaatttgattcaatttttttatatataatatttctatacataaatacttttcaactttgtgtttttatttttaaaaaatttatgatgtagtaggaagagaagaaggggaataggaaggaagaaaatagtgtataggggatgggggatcacccgcccattagctgcccccaaccattacgggaggcaagcaaaatagggcaaatctgccgaccgctgtgctgccgttagcctcaatttttctttgacccccatcgctctctctttactaatccaacaaactattttccctgagtttagatattgtttttttatgttggaaattagatctgcataggcagctgtgaccggtgagctccaaatataatccatctgcttagtgtaatatgttcatagtaagcaaaaaaaaatattaaacaacttcgattggctgaaaaaaaaaaagagacttactctccctctgtcccataaaaaaaccctagtaccgaatgtgacacatcctaatactatgaatctagatatatatttgtccagattcataataataagatatgtcacatctaatcttcgatcttagatttgtttttttataaaacggagggagtatgctactggggctgctagtagtgtacgttacggctagaaacaaggcagcagaaggccaaaaggcccattaattacatggacatttagttaaactaggaagatagcccgcgcgaatgcgcgggcatgtatcgtagactatgtttgagcatctacaatatatgatttctccaaaaattgttttcattagcattgctttataattttctaacctagctattagttatttttataacatgtcatatttaattaatccctacaagcaattatttataatattcttcatcatctaaaaagtaggtagacatattttgtgttagaaaacatgtattgcaaattaagtgtaaattcaaaagtaaggtgtttttttaattgaatgtaggttgtcattgtttgttgacggatgaattgggtgggatatgaggctccactaaatgcatgggtttatatagtctaatattattgtttagtttgagagagaatccatatgtgaacattctatgtagagtgtgggtgagactccatgcaacttagcatgaataatattggatgaagaaatatagttgtgcaatatattattttggaagatgatgtattatgaatacacacttgtcttttaatatgagataaatctaatggctggaaataatgggttcatcagtttaaaaacgcctaggaggatttatggggtaacatgtagagactttatataaaaaagaaaccatcatcaaaaatcgattagatgatatataaaataaaattataagtgtagcttaaaattatggtctttttaatatttgtttctctctttagtttagtagctgaaaatagggaggagactggagaaaaacgaatagcatagaactcgaatcaggtataagaaagggttcgcagtgtaatagtgttatgtgcatgtgattggagaggcaggtggagggtacattatttttttttcaatctttgtaaacaatctaagtgagaacctatgatgttgttttctcattgtaaggatctttaagacaagacatgtggtggcttaagtttttttataaagacaaaggtgatctaatagttaaaaataatgggtcatcaaattaagtggaaaccaatgtatagatatatactcccttcatccacacatattacttttatcaccaaaaccaagaaaatattaaatcatcttggatgttataaaatcaaggtgtaaatgcaagcatgcaagtatgcaactaatgagtatttagatgactcctccggttctaatcaaacattcagggaaaatttgaaccatgccacataaattttgcaaaatttatgatatgccaccctgacccacatgttattgacttatgtgggacctacatgtcattgagatacgggtggcatatatcaaattttgcaaaattagggtggcatggttccaacaaaccctttaatttatctcttcatttaagtcttaaatacataaagactataaataggaacaacttatttggaaaaactcaaatgtgaaatatgtctaacttttgtggatggagggagtactttatttttttctttgaatttcaatttttttcaaagttttaaaatatcatacgtggtgacttaagagtgctatagagcacgtttaattgatctttactatgtaaaacgattcaagaatatctaatatgcgctgtcatgttttttaatgttttgttgttatttggtaaggagattttttttattgaggtagatttaatgcgttcatctgtttgaattatttatgtctttaaatccaatttttaaaattataactccactgatttaaatgaaaattgatgaaattataagtccaacaatttaattgaaaattgatggttagatttgttttcttcataatattttttataattaatttttttatttataaaaaaggaaggtgagagaaagaattattgaagacggagaaagtgtatatatgtatacttacatgcgtggggtggtcggaagggtgggccagtggggagaggagagttatgccggtgggagacaggcgatggatgtggattgtggttttttttaagaaaaaaaagataaatctaatagtcgaaaatagatggtttaccgatttattataattccacgtggcggtttagttgtgtttataggcgtaccacgtggtagtataggagtgtttgtatacctttagtatataattttttttatttttaaatggtaattaggatgacatgccctagaaattattcttttccgtagaagtttaccacggttgaatcattaagtattttaaagacaccatggatctaaatttaaatatgttcgcaaatttgatgattaagataaatctagtagagcttagcaggatgaaaacatgtgcacaccctcatttgtagcagacctaatgctaattgcattgataatccctagcaagaataggttagtctatttggataaccacattaaagcaagcagcacgcacgttgaaaacatattcaacgttttgatttctctgcatctttatggtttattatactccctccatttcaaaatgtttgacgccgttgaccttttttaagtcatctttgaccattcgtcttattaaaaaaatttaagtaattattaattcttttcctatcatttgaattctatgtatatatatagttttacatatttcataaaattttttgaataagacgaacggccaaacatgtttaaaaaaatcaacgttgttaaatatttagggacagagtgagtataatttagtaacttaagattttatatggggttgctagcaataaagtaggaaattcacgtacttaccacagagagaggagtacgtatatatagagagaggagatttcttttttattgaaaacagatccttgagatatatctaattgttagaaataatagattcattgagatatatctaattgttcgaaataatagattcatcggtttataagttataacggatggtcagatttttttttcttttttctcataatttcaaagattttttctaatttattagagtgcgacatgacagcttaggagagtatataggatgtcacgtggtgactaaagtgcattcgtaggaagtttaatggacttgtgcgtagaatacaacttgaaataacattatatttttttacaactattagctgaaattattaatttggtttttatctctcatgagtgaaaaaaagaaaaaaaagaaaagaagggaaggggggacacgtacgtacgaattatatacgtacatgcacgtacacgtacggatggatcgatatagaacgtggcgctttctaaatataaatctatttggtattttttagttagatgtaatggttagaaaatatgggtcccccagattaaatgaaaatcaatggttagatattttattttttttcctagaatttctctaatttattagagcaccacttggcggcctaggaacatttgtagggatgacatgtggcggcttaagagcgtttgtaggaagtttaatggacttttagtatataataataataataatagatacatcctatttatttcgttgggcatcagctcaaccggatttgacatggtctaacaagcatgctgtttagaaatagaaattcaaacattacgtgctcacatctggaattttggagctgcatgtgtttagatgcaaaaaaaaattcggcataatacgttaactttcggcatttgaattttgtgtagcacttctccaattactcagtatctcaattaatcacggccatctctaatttaatttctacacatattctattatctttactaattacaattatttacggccatccgctactgcagctatcgtcggatccgcccatgggagaagcagccaccgccggatccgccaacaggagccgctgcaccacagtaaatatgcacccgcctccagtggagtggggatgccgccgagcacaaagatgtggtcctctcagtcccgcgcgacaaggaggaggaagaggtggggacggagttggtggcgtaggagaaaggggagaggtagctatcgcatcagtgggaacaccgccgagaacaacgatgcggtcctctccgctccgcacaactacgaggagggggaggaagtggtgggagtcaagttgcgatctgcagcaagccagcaagcatgtgggccaccagtagagatgtgaagcagtccacataccataaagtctatataactccctcatataagaatcaagttcaatttcccttgttcaattgaaataccatatataacacctcctacagctaccaataccggttcaatttgccttcccaaatggttttgatgatggtttcatcctgcatgaaataaaacatatagtcagacccacataaaagtagccacgtttattatttttttcctcacctctcaccaagggtggatccagcgtgggtgctaggggactcgagcccccctacaccgcgagatcaccattgatagaaggagagagaggagggagaaggagagaggggaggaaaagaagggggctgaaggagaaagaaggacatgagtcccccatatatctggatccatccttgcctctcgcctatctctccttggataatggctcggttgcgctgcgatcaacggtatagttttagatgggcgtcaacgaactccaacagacaaaagggcggtcacagatgacactttctattgcccccgtcctgagcatgtagctcaccaaccgcgtgtacgtagcaccaccaccaccagcagcactgccctcaccactgccagcattgcaatgaggcctagtatgtgagcatgcagaggtccaccattttcttcatccccgtcttctcatgcgttcgatgttgtctcggcactacggagcaagcactataaaaaagtctatattactgtttatgcgtttgatgttatctcgccactataggtaatatagaccatttctttctacacataaacctagtcgtcgaccaaaccaccatcgctggcaaactcttctttgcggaggctttgggcactggtcaccctgacgctcatgatgtgatgtctatggtctaacagttgggctcgtgtgtctgataggtggggtcagctggtgtgcttgcaaccatggctacagcttacgtgttgtttgcttgggaacttggcatgtatactcaagtttcgtaagttgttgggcgtaattttgttcctaaaaattaacaattattagtaactaagttagtcgttgctttcaagaaattggtaaattgtttttcaattaaaggcactagcagtccatcgtgctgaataatcgcatatatatattctgttttagcatcgtggtgatggccttttgcatggagtggtattatcactctcaagagtagtacaatgcacataagggaaatgcgcagataactaattcaattgacgtacaacataacttcagtgtgatttcctttttaagctggtgtcccccagccccttattgattttggactgaaaagttttgaaagtttgggctttcaatggctcctgtataatgtgctctgaaaatttggacttgtttagtttgacaaaaaaagtccaaatcctgtggaaattcgttaaagttgaaaaaaaagaattaagggatgtttggttgctagctatacactacaccacactttaccacagtctaccacgcctaaggttaggcaagtttagctaatttggcaactgtttagttgagttgccacagtcacggtaaaattccttatcatcatattaggtctcaaatgtcaatgacttaaaaaaaagtgtaacaaaattctcctaggtttgctaaggcgtgatcaagaatttgatcacctcatgttagacaagtgtgacaatttttatttgcacgtggtgccaaagtctggctaggaaccaaacaacccttagtatttcggtcccctgaaatgtttctatacgtgtgtttcaaaatagtgaatcctagccatctttgtattctcaatctttgtctaaaaactgtagaaccacaaagagtgataccgtttggaatatttgttgttcttgtatttatttctttcacatgtatggcttacataccggttgaaatatttactgttcttgtaatgtgattacagttcacaggaactacacaatactttttacaagacaatatcataaccttattattgtactctcttcgtcccataatataaggtattttgggtggatattatacatactaatactataaatatggacatggtgtcacatccacctaaaattctttatattatggaacagatggattaagtaattattctttatattatggaacagatggattaagtaattgttcgacgtgacatgacctctgtgatggcacattttgtcatttatagaacgacatttaaggtctccttttggtttgagaatcacttcctacaaagtacaaacagtttaatttattcaaattagaaaaaagaaacctttccaaaacccaattcctctccagttaggaggtgtttaaattcaggggtgtaaagttttggcgtgtcacatcgggtattatataaggtgtcgtatggggtgttcgggctctaacaaaaaaaaactaattacaatatccgtcagtaaaccgcgagacgaaattattaagcctaattaatctgttattagcacatgtttactgtagcaccgcattgtcaaattatagagcaattagacttaaaagattcgtccgcaaagtagtcgcaatcggtacaattagttatttttttagactatatttaatgtttcatatatgtgttcaaacattcgatgcgatgtaaaattttaggtgggatctaaacaggcctcatgggtaggatgtgtgtctctggtactggcaatttcacagcctgctataaggtgaaagcctaaaactgtgggcgagtttgctgaacacatcacgtattaacccaccgtttcccaacgcctgacgccctagatcctgcagcatacggaggattcatcctctggagatttgacagccacaacaacacacaagccactctgtcacaagggacaatgtcacggatctcccatacatgcttcagttaattgtttgctccataaaatctccacaaaaaaatatcctctccttgggcggtccagcctcttcttcttcctctgcccaattgcaactcacaagtcacaagcttcgaggtatatctgctactactagtacaacctatgtcaccatgaattccatgtcctttgtctccctttccaactgttcctatgcaagaactaagaagtcacggtacattccaaacgatgatgcttccagaacaccggatccaaatattctttttcaaaatttctcacgggtagagcccgtgacaaaagtttgtgtgtgtgtgagagagagagtgcttgaaaccctgaaaaagaattcaagagtttttgtaccctcctgttaattggtagctagagcaatggcacaaaaggtccagatgcccttcacatgttcttgtttcatgtgagttggattggagtgatgtgtcccacccccctcccaatccctttctctctggcctcaggagtcagcatgcatgagcaatgccctgctcaattacacattttcccttaatttgatcatctcccaaccactagtttaggttttcgctacgcgtacaaccgggttttcggtgtattcttccctcgacggtcactgacatgtggggtctctattgtgccggagtatacagggcccacctgtcagcgagagcgagcgggttttcaggacatttgtctttgtgtttgtggatgccactctcacaaactcagcctgaaatggacatgctactacactctatagaccttgggtataaagctggagtagaggcctatcagcttctccagctcttgcagaagctcaccactcgagctctgtctgaactctgaagatggaggagcactacaccatgaagaagccgaggttgcttcttctttccttggaggtgatactgattgctcttcttcttcctctccgtggtgcacattgtgagagctctactcaaggtgaaggcggcggtggcggcgccggcgccggcgcggcgaacctgacggtgaccggcacggtgttctgcgacgcctgctcctccagctccttctccaaccacagctacttcttgccaggtactactgtacttcagttatcatcaggcattcagcctgaagtcaatggtgatgtgtcccctaattaattttggaggattactttgttgtttagatttctgataatattttggtagaagactattgtcagaaatttcattcttctaaacctttgtggaatgtttgggtggacataatctgtttcttggaattcaaaattcccttttttttttctgattgatgtcatttcaaaccatttcatttttttataaatttgttcaaaatgtacatacatttatttttttaccaaattttggtaaatacacaagaaattttgataaaatttcttggtaactacacattagtggctatcctatcaaaacttaataatattatcaacttatcaaaatttcagtaggtttattttggatataatctgaacaatctatttttcctccattagttggaagaagcttggaacttgggagctctgttttttattagtttgtgtctgtcacgtatggaatttctcctgtacttttcgtaataattttagagaacgtagtatgataaacaacttgcaatctgcaggtgtgcactgacatgctacttgcacatcccaccaaaataaatattagccaagtagcccaaggtttacagtataacaatattaaactgtttagaatggtgctaagtttggaacctaggaaatgttatggtaccttttactaaaaataatagaaaatatttcacatatccgatttatccattttgtaatagatgcaggggccggattttatccattttgtaaaaaaacagactggctatatttatgacgtttcaaacaaatatagttaaatcatttttacagtatacactaaaattattgcatatgtaatttggtgacttgcaatgtacaaatatatactgattatttttctataaaaaatatggagtcatgaatatagctactcaaaaaaaataccattatcccaaaaacctcacaacaatcaaccatttaataatccggtcgaatacaaattgcagataattaatctgatgttgaattgcttggttgttcatcacaggtgtcaaagtgagaatcgactgcatgatcagcgtgaaatcggcgtccaaggaggagatcaagatcaccgccgagaaggtgaccaacaccttcggcgcgtaccagctcgacatcccggcgatcgacggcttcgagtgcgccacctccgccgccgccgccgccgactccttctgccgcgccgcgtcatcgacaacccctcgccgctctgcaacgtgccggcggtcaccaccaccgtcggccacatctcctcctcctcctccggccacgaccacgaccagcccaacgcctgcctctacaacctcaactccctctactaccgccccggcggcgccaagaacggcggccagtgcggcggcaccggcggcggaggcgacgtgccccccgccgcgctgaacacgtcgctgttctactgcccgccgtggccgtggccgccgatcccgttctgcacgccgcgcccgtggttcccgcccatcccgttcctcacgccgccgccgccgccgttcctcccgttcccgctcccgccgatcccgttcctcacgccgccgtcgccgccgccgccggcgttcccgttcccgctcccgccatggccgtgggcgccgccgccggcgttcccgttcccgcacctcccgccaatcttctcgccgccgtcaccgcccccgccgccgccaccggcgttcccgttcccgttcccgcagctgccgcctctcccgcacttcccaccgctgccatcattctacccatcgccacctccgcctccgccgccgccgccgccaccgccgccatcgttcccgtggccgttcccgccattggcgccgcttttcccgccatatccatctcctccaccgtcgatgtattctcgcaaagatccgagcacttggtcgtcgtcttccaaacagcagccatgagtaaaaaatacattttgcttgtgctggaaattgtattgtgtactatgtatatgagcttttttttatggattgtttagtgtaagagtgcatttggctatttgcactctgtatacaaatatttgtagattttaggtttaaaagaatgaagattaggttaatcctactttgtgactatgaaagggtaaaataatcgcggcttgtgctctctctgtcttcgactgtttggtagtgtggaaatttggcatacaggttaatatcaaacagtgagtctcaacttatgttttgaactttttgtggaaatatatattgtatatagaagttgttaatgatttccaacacaaaagatatccatggtttaccatgttttgaacttcagattgctcctgtggtatatttttgccattgtcaaagctgaatcttgggttgctgagtgcagagtacttggtgtgttctccccaattctggccttttttatttggcattgtgctctgattgaataaccaaggctgtaatattttttccaaacaattttacgacaacagtgacaatttaaacttcatgcatttgctttcacctatcgccagtcaccctacaggtaaagcagaggaaatggggaaaatataaagggaacggagattatctgtcctgaaattatttgttctttttcgtgtttcctgtcaaatttcctgttttaccctcgcaaaatacagaatttttatgtttattttttttagggggaggtcaattccgcagccaaactagacggttctttttctttataaaaaaatgtagaaatttcagctagtattttttttgcatttatatttgtaacctgacgaactgattttgaagtagaaaaataaaaaatttcatgtagaaaaccatatttcaacttgattgtgacttaaatttcaaatccaactgtttttccttgcaaaacaaaaaatctcagatatttgtaagagaaattttatggcccttgaaaaaaaaactaagaggtacaaaatcctacagtgtaaaatttggtacctgtgttactttctcattcattttgaaaatgccaacccaaaactttcgtagttgcaaattataatttggcagtggccttggtgtttatgatatattagagagaaataaggatccataatgcatctattattcatgagaaaaatacaaattcttaaacatttacttacactcatatattttagtatacagagtttcaacaaaaaaaatcatttgcaggaatggaaatcgtatagtataattatagagtaaatttcaaaaaactgcaactatagtaacaaaactatcagtttactacaatattagtgatctatttcagtttgctacaacaattgcgtgggaaattatcacaaaactacaacttttgtcatgtagcagcatatcacgtaaaacttacagttttatgataatttcccatgctattgttgcatcaaactgaaataggttactaatgttatagcaaactatcatagttatagttttctggaatttactcataattatatgctctcaagcttgcaatattaagtatgccataaagctgggttcccttaccggcatgtaagggttttaccgccaccaagacagcaaccatgcagttaccgtgcaagaccacacaagattcatcttcaaatctcttagggcttatttgtaacaaaggaaaagatgatttttgtaggattgaaattctatggaaatttttcctaagtgctcatttgaaacaaaggaatgggcacttgaaattcccacaaaatccctatggaatgacttgattcatagcaaatttggaggttttttaacatgagattggacctcatgagaaacttttcttggtctatctctccaaaaatcttgtacttttcttatggagcgtccaagcaacaagttttgcacaattcctgcattttagaattcctaaggatcaactagatatgccacctctatttctacatttttcatgttcctgtttttaaatttctttgttctaaagagccattggtcatggtaactgcactaacccaaagttacctcttggtaagccacggtaatcataatactattttttaaaagagttatttgcaaaaaaaggaaaccatataaaaaaccttagaaaaagttttaaacatttcagaaaaatattttgttgagtgagagagtgaatgagtgaaagagaagatatctctctgttgggtctaaatgggctttatgaatagtactcatgttggcctactcgagttccttttttttttctattttcatttccactttggtttggctcgaaaaaaaataaagttaacttagtatttttcacacaagtttttcaccatatatcactagaattgatgttccacttatagattttttcggtctttttcaaatttgcattcaatcaaattttaacaaatcataccggcggtttaccctaccaagcccccacagtaattatctttttgaggggaacccccgcagtaactgaataacctccagtattgtcaaccctcgtctaaagggctgtgtaatgctgctcttatatgttcggaaactctaaattgaagagtgactattactctttcatcaaggaagagtgactaagttctggtcttcaactgtattgagtattgcaatcccaagtgattacctgcaaagaaataactctttaattttactcgcaaaagggaactctttaatttatttgaaaatgataatttgtaccaacttattactgcattttttttctcggttccctttatattttccccatttcctctgctttacctgtagggtgactggtgataggtgaaagcaaatgcatgaagtttacattgtcactgttgtcgtaaaattgtttggaaaaaatattacagccttggttgttcaatcagagcacaatgccaaaccaaaaaggaactgagaaaacggggaaaagtctctgcactctgcaaccaagcgctttgagcctttgacagtggcaaccatacattactggagtatattctgaagttccaaacaagataaactatggatcttttttggtgttggaaaccatttaacaacttctatgtactatattttcacaaaaagttcaaaacacaagttgagcctcactgtttgatattaaactggatgccaaatttccacactgccaatgagtcaaaagacagagagcacaagctgcgataattttaccctttcatagttacaaagtaggattaacctaaatgggcttcatgagtagtgctcaggttggcctatttctatttccattttggtttagctcgaaaaaattaagttaactttagtaattcacacaagatttttttactagatagcactagaactgattttttacttatatatgttttttgatcttctttaaattttagtccaaacaaattttatcaaaccatataccaacggtttaccaaaccgaacacctgcagtaactgaccatgcagtaaccactgttattgtcaaccctggtcaaaagctctgcgcactgctgctcttatgctcggagactctacattgaaggaaatgctatccttctaaatgcaatatgtaaaattactctttcatcaaggaagggtgactagttctgatcttcaattgtattgtaaatttgtaagcctcggtgattacctgcaaataaagaagtctttaattttactcgcaaaaaggaactcaatagtttcattggaaaatgatatttcctgcaaaaaacttgactacatttttttatccccaaatttcattcgaatgctatatagcaatcccctttctcaaatcatgttcctgtaacttttctttgttctgcttcgatggtctctttaaataaccagtgagtctgtgagtgcacaagcagcagcgagcgacggcgagtgaagctcgttccccttttcttttttccttttctttttttttctttttttttctaccgagagatcagcgtaccgtcaatataggacagttactatcgatcatatttgagctaatttcttctttttctcacggttttgaacactaatattgttctgataaattgtctatatctagctagttaactctcaatatttttatataacattgaagaggtaatctcacctaactaaataaagaattaactacacccaaatttatacaaccaactaaacaaaaacatcttctaaaccgtatctctcatttatgcaactaaacaaaatctcatactaaccagacaaaatcaatacaaggaaacaaacaactttatatgtatctttttatctggagaactgctagaccacggtatcccgtgtaacgggatagattataatgagttaatgatgagtcgttgcccccaccaaccatgcgcatgtgtccccacgcgtctgtatctcttcctcccacacgtacgcatcgctctcccagacccttcacgtgtccattgcgctcccccacacatccatgcactcgcattgagtccccacacaacttttaggtatcagatctgatagttgatacctgaggtaccagatctggttggtacccgtatcagatctgatagttgatacctgaggtaccagatctggttggtacccgtatcagatccgatacttgatacctgaggttccagatctagttggtatccgtatcagatctaatacctatggtatcggatccggtacttgatacctgaggtaccagatccagttggtacccatatcttgaaaatgatacctgaggtatcagatttggttggtacctgtaacggatctggtaccataggtatcagatccgatacttgggatattagattcgatacttgaggtatcagacctggtacccatgttactatggttggtggtacctggtctggtatcggtacttgatatctgaggtaccagatcgggttgatacccaaggtatcagtctggtaccataggtatcagatccgatacttaggatattagattcagtatttggggtatcagacatgggctgttacccatggttctaaggttggtggtacctggtctggtatccacgaggtatcaagacctgtagttgcatattaggcttggtaacaacaaaaaaaatatatcaaagcctggtacccagaggtaccattttgtaccaaataagtcatcttcttcctctctccaacacactatatcctcatccacctgttgattccttagcatgaaatcgaagcaacagcaacaacaagaacaataaaaagagatgagattgtgagtagatgcaggcgacgaactactagaaaagccatatcctcatattcttccttcttcctgtggacatctaaccccatgcaggctctgccattgttgcactcatgttgaattgctggggacatcgccgatggccggctcagatggtgttacggtcgatgcggcgagaaaacggctcccggtggccagcggctagtggtcgtgggcgtagagagggggacagaggatggagggagtaacttgtgcgtggtgggtggtggacgacgctgcatagacgagtcaagaagataaggtgtagggcgttgatcattactctactccgttcaaacggtatgtagttctatagattttctgttttatctggaccaaactcagtcgagaactgggttaggccactacccgtgcaaccaaacacatccataatgaagtgtctggccactacccgtgcatgatacgtacattggcacttcctgtccaacaagaagtcaagaacagagttacagccgacacttctgcaaacaatccattttacacgcttgaggtgaaactacgtggtatttaccgtattttcttacgctaatttataatacatcgtgttaacttagcacttctgaatttgtttccaaatccgagactatccaagccaatatattctgtttctaagaattgtttgggtcgatcagaaactatctgatccgttttcacgcatactacttacctcatagagaccatatataaaaggcctctgcacaagtagctgtactacaatatactatactacaccgtggaataaacactcagctggagttccatttcagatagttttgtctctgaagttcctgcattattccaagcaatatcaatgggtcaagctaaaactaccatcaactatatgccgctaatttttgggtcatgcttatgacaaaaatgtcggcatgtcttcacttagaaaaggagcaaaagcgtaatgtttatgtactatagtactactaataatcatctatccaaagttgcattcatgaaattgttggagcagttcagatttcagccatgaatcgcgtgatttggtcttctcttgacaaatcaccaaactgattaataattaattaaccaatcttaacttagtcatcaacagcaaacatgtagggccatggtgtgggttatcctgtgcccccaaagctgcacaggtccggtgttaattaactggttttcaatcgatcgatcaggttcaggtcgcctacccagcaattagcatatttcggactccggaaagtgacgcgataaaagacgcatgcatatgcatgctgatatgaatatgcgaagcacgcacgcatggctcgtttgtccactgctgcaacttttgttctcgtggaaagaagggcggttcttgtcaattgttcgtcatgatcagaggctatgcatgcactaccagcattaggtacacgaaaatggagggagtagatagatgtaaaaaagaagtataggattgatagaatgttactcttctactgtactctactctctctgtaaaaaaaaaaaaaaaaaaaaaactcctgcatacttaggagtgggttttcttacggagggagtacatgtcattaggccgagtttagttccaaaaattttttttaaactttcaatttttctatctcatcaaaatttttctacacacacaaacttctaacttttccgttacatcgttccaatttcaaccaaactttcaattttggcgtgagctaagcacacccttagttattttccttttttgcaaagtttgcacaatgtgatcatacatgagaatgatatggagtactactatgagactccatataagtttctctctcaaaaaaaaaagactccatatgttagtaggtattttccgactccgacatttttacatggttctttcaaagtagagatccgcgattccatttgtcccttcaatcttgataataattgcagagttggtgtggtacgtgccctagttagtactgtacttgttgttcatctcgtcagaaattgccaatactttgttcggagtggtaaaacattagttgtgcaataaccagctcactccctgctgtgtatactactgatctgatgtttatagagactcactttgaggtctaactttgagattgttttcttttccttactttcccatcttcaccctttgtttttcgtgcgctcgtttttcaaaccgttaaacggtacattttttaaaaaaaattctatagaaattattttagaaaacatattaatttatttttaaattttttttagactattacttaattcattacacgctaatgggtaacaccgttttcggtgactaagaaagaggttcccaacctctccactaaaaggttcgttgatgaaaagtttcgggacataacagacgagactagatagtgctactcccagtttggagtatttttatggagtaactacataaagtttggtgttatctttagcaaccatattgttggtgtttgtgcagacaagtttagctttgccctaattgtgaggcgacagttgattaactttttgacaaatgaaagacaagtgagctgaccagattctcttgctggcttgcttctttgtccagcagtgcgaaaaaggtttgcttccactgctactaccatcacattaccaatcatcatatgctcagcttaacgtcatcccagattctacttacacactaaccgaggttaggctactggtacttcctcgattagtaataatactagtactaataggagtactaattaagattataaaatgaggaatacacgcaagcgtatcccagaagaatgcaaacttgcttctctgcaacaatggaatgtgtgtctgtgcaaaagatcttgagaagatcacttggcttcagagcgatcacttgttcaggcttcaggcttcagaggttcagagcaagcaggatacgtgccgctaggagtagcattcctataacttgcagggcaatggttgccaaactgctactgggagtagtagtagagctaaaagtttgctgatttgactgactgaagtgattgagagggattttgtgcatctttttctactgggagagataattgcacaaagccctatttttgactgagcaggcagtacctctttttctgtatttgggacagcttcaacaccatcagaatcttggggtttcgtatattttcgttcgtgctagattacccctgtcaccctccctccctcaaaaattgttgctgtgtatttatacagaaactatgttcaaataccaggttagcccccctttgattcaaaggaaattcataggattctataggatccattcccttgatttaaagggctatatttaaaaaattcctatagaaataaaatcatctaaaattcctataaatttcctttgaatcaaaaggagcctgagcctttatctctcctcaaattcctttgtttttcttgcggattaatcaaacggtctttcttatatttttcctatattttacatttgtattcatgtcagaatcctatattttttctattcctccgttttctaagataaagtaaatacaaccttcgaaagagaataacttgtatccttaaatctagacatgaggtatgctcagattcataattgaaagtttaatttattttacggaaggaacatagtaggcttcttattcaaaatcttgtggagatttaaccatctgctttttttttgtctcatactaagggcatgtttgggggagctttagattctgagaagcagctgtttggtagccagcttctaaaaatctggaaaagctctgaaacccagcttatccagcttctggcttcttagttcatttttcagaatctgtaactatagattctcagaagctgtggactatttagggcagcttctagcagaagccaaaagctgcagctgggagaagctcccccaaacaggacctaagatgtggctaattcgatcctaagggcattaccattgcaagctacaccaattgagtttctttgtaaaaagaaaacaattctacataggagaaaacactaataagacacatatcccacaggacagagtatccctaccaggctgacaaggaatgtttagtttcagcccatagaattttctatttcagtcctcataaaccctaaatttataaataaatccagaatttgttaaaaaaaacctaaaaacaaaaggcacaactacctttgaccaagtcatttccttatttttatctcttaccaccatccaccattcattcttatctatggcctagtacaggggaggttaagattccaagaatcagccggtgaaaatctggagaagctggaatatcagcttctggcttttttttttttgaaattagcttctggcttttaatttattttatggattctacaactacatcttctcaaaatctgagtgaaaatctgtattgtctaggggagcttttggcagctgtagcttctagaagaatcttcagctaccagaagctcccccaaatagaccctgctactcgttcactcattgtcacctatggccatcgatgaatcgcagcagctcctcctctgaccaacacctcttctccctgccagcgtcgctgtccctcagccggcgcccctctcctccttcctgactagcacgcctcctttcctagccgatgcccctcccgcttccgtgggcttgccggatttagaccaagcagagttcggaggagacggctcggtccagcaagctcggcaatgacaccagcaacaagctccccctaccaggtcaacggcagcaacaagcccaacggggagcagctcatcagctggtttcaagccaatgtcgttccctccccctcctcctgtccttcgcttgtcgcaacctttgctggcggcagttgctagtggggcgaagcggtggtggaagaagggtgacaaagatctaggcgcggggcttggagcagcggtggtggcgcagttcttggcagagggccacgagctccaccgacggtggccgacgactcctcgagctcccctatcccactccactggccgctctacccctcctcctctagagctaaggcggcgtagattgacctccagcaattctggatgatgagggaccatgtcgttattggattgtggggcaccgtgcgtcgcagcggagcactcatgccctaattgagtatcggaaaaccttgcatgggaacgaaagagcatggcatgaaaagaatctttgacatggcacctcgaatccataaagccatgttgctgcactgttatatttttttggaatataggatcacgttggaatggggaaattttagtttggaacaagtacgaattacccaacccccccccaccccccgccggaactatcacggtcaactgaattaccccccataaacccgaaaacaagacatcgttcaccctaaactttcaatacagtcaaattacccccttcgacccaatctagaatcacctacgtggcatgcacgtggcagtcccgtcagcattttatttataaaaaaatatgggacccacctgtcatgctcctcttccactctcttatctctctctatcactctctctcatctctctctctatcactctctctcttctctctctcttactcttcctctctctctcttgcgggttggcggcaggcggtgggcggcgccgcaggacacggaggcggcgacggtaggggacgcggaggcggcgacgatgcgggacacagaggagggagtggcgaactctgagagggagtgggagggaactccgtcgaactccctccgcgtctcgcgctgccgcccacggttggtttacggactgcaatcagctcggaccaccagcctgcgcgcgccgaccgcccgcctctccaccacagtctctgccgtgccgtgtgtgtcacctccgtgttcgccgtccacacccgcccaccgcctgtccctgcctccgtccatcaccgcactgagggggcagccgccttggcgtcctgcgccaccgcctcctccacatcccacggctcgacccaccacccgcgcgccgtgcatgcggaacacgtgccgctgctcggcccgcacgcgagagagaggaagagtgagtgaaagagagagagaagagaaaggaagagtgagagagaaaagagatggaagagggaagaggagtatgataggtgggttccactttttttataaataaaatgctgactggattgccacgcgcacgccacgtaggacaaaaccgctctggattgggtcgagggaggtaatttgtccggtattaaaagttcagggtgagcaatatctggtttttgggttaaggggtaattcggtcaaccgcgatagttcagggataattcgttcttttttcctttttgtctagaggaatataaagttgtacggtatttcacacgagaaaacagcattgcaactattttaggaagcattatcgagggtcgaagcggattttgtgaagaataatttcgtacctattaaaatgtaaaattaattcctgtaaattctctctaatctcctcctttatcccttcattttatggacaacagaataggcccttaagaagtgggagtttgtcggaacgtttataatttgatttattctgcgaggaggacttgttctcgtggtacagcctcaaattttctcaagcgcgaaactctcttttgatcctttgagttttttttttttctaagcaagcctgtttcaagttgcacaggtaatacctcaattcacgttccaaggtagttttgccactgctagaattattttggattaatggatccatgctattataaatttttaggattaggcatatgacattataattcatgtatttattacaatgccatagttttagagctcattacatatcctttcactacagttaaaaataaaattggaccaaatgacccacttctgccttcctacctacgttgaaaatttaaagaatatgtgcaaaaactaaagaaatataattcataagtttctaatacttcgtgcatcttagaacgtactagaatgatttagttttgttataagtcaaactattttatgtttgattaagtttataaaaaataacaactttaaaacacaaaatcaattcattaactccactatcgctctaaaaaatgaaactccattattgaatagtatatttttataatatatttgttctactccctttgtctcataataagtccagttgtgggtttcagtgtcaccgtccgtcttattttttattattattattattattattattattattattattattattattattattattattattattattattattattattattatcatcattattattattatataaaatatgaatagttctttatgcgtgacttaatttttaaaaatttatcataaattttttaaataagatggatgatcaaatattggaaaaaaaacgtatgactacacttaaaatgggacggtacttggaacgggaccaagggaagggagtacgttaaaatgttgccacttaaggaaaaaaaacaaaatacctttactccattctacgaaacgaagggccggagcaggaacctaggccctgtttaggacccacataaaaattgtacacctgtcacatcgaacgtttgaacacatgtataaatattaaataaagacttaaaaaactaattgcacagattgcgactaatttgcgagacgaatcttttaagcctaattgcttcatgatttgacaatgtagcgttacagtaaacatttgctaatgatggattaactaggcttaataaatttgtctcccgatttaacgagggattttataattagttttttattagtgtccgaatagcctatgcgacaccttatataatatccgatgtgacacgtcaaaattttataccactactccctccataaaaaaaaaagacaacctaggaggggtcaccctctagtacaatgaatctggtccagatttgttgtacaataaatctggtccaaattcgttgtactaggagggatcatatcttcttctagattatttatttttgggacggagggagtagatctaaacacccccaatcgtttgataccgcataggagtacactgactgcattatgttgtagccgacagacagatgaccacgccgccgtcggcgcatgcaaagagaaaccaccggacggaccgacggtggccggccagacaacacgacgaagcactggaaaggtaaagctacaaggaaagaaccggtactggagcagccgtggcctgtcacgtgtgggtgggtcccacctcccgacacggctctcgtcccatctccaaagcacaggtttgctagaatgatactatcctgtattttggttttgttaaattgctactctcaattaaatccatataaaaaatgtcataaaaacaaaaatatccttgactcctaccttcctctaacatgccggaggtgctttgcctgtggccaccgaactccatgaccgccgcctaggctcactggctctggcatgcgctccattgccaccagcttagagcaaccacaatgtataaaaaagatgaccttaagataatgattacacttgtaaagtaagctatatacattgtggaaagtagcattaacttagggtgcaccttatgcttaagatctaccacaagcaaaaagaaaatattttttttctctctcattcacttcatgaacaagagatgaaacaattatttttccattctatgtgggcccatcttgtggctaaattctaaccttagcattgtgggtatggctttaacaatggctcactattcatagggccaccttaaggttacactacaccacaaacattgaggatgcccttaacccaccatcacttaattccctccacccgccaaaccctagttgtgccgcctaatcaaagccgccgtcgttgtacatctatcgtcgtcctgtgaccctcttgtcctcggccctcttcagcagcccgcaggtcatggtggtctgtcgtcgcgccgatgcagaaggagtgaggaagatagaagagctaggcatgatgtactcatccgtgtccctcttcgacgaggtgcatttcaaattttcagttcactcatatgtcaaagggtattctagcatgtaactttttttttttgtgaatatcaatgttgaatagttctacattgattgtgaaagggtaaatgatctaagatataagttggggaacccctcacctcaatggctggcttttggggtgggaaatgccctttacgatcctacaattgatatcagagcctggctagtttaacatctctagcctgatggacccaggctagtttaacatctctagcctgatggacccagtgtgtgaaggcctgatggaccatgggtgcctgtggagcccatatacctgatggaccgtgggcggggcccgtatacggtaaaggggcgatgaagggctgagggacacattggcccgatgaacacagtgtgtgaaggcctgatggaccgtgggtgcctgcggggcccgtatacctgatgaaccgtgggtggggcccgtatacggtgaaggtgcggtgaagggctgagggattccaatgtgtgaaggaggagattgttgaatagtcctacattggttgtggaagggcaaatgacctaatatataagtgggggagcccctcacctcattggctcaatgtctagtttttggggtgagaaatgccctttacgatactacaatcaatttaacaaagccgaattttagcgtgtactacataatattttttgggaatatcaatttaacaaaatactccctccattccaaattaatctatatatttcataggtacaccaagaccaagaaaagctaataactctctctcatactatatttactatagcaacaaactcaatgcatgcaccatccccactattttctagccaatagcaaatcaaaatattgcatgtgggttataaatacatgtgtgcatggatgcatgcatcaatgtccatttagagcaagtttaatagtatagccaactactagctccaattcatctatagtcaatctaatagctcattcatacaatagttacatactccctccatctacttttgatagtcatatttcatcttggcacacagaccaaggataagtaattctacttatcatccatttaaacatgctattagttattcatcgtaaacaagcgattcattaatatttacatttctcaatgcccatgtagccaatcatgtgtgaaagaatagagagtcatgcattaaattcgagaaagtcattaagatgataggttgttggattgaaatatgcctatcaaaaataaaattttcagatttggaaatatgactatcaaaagtagatggagggagtactacactattaatacctggtcccacctgtcataaacacgctgcgtcttggagtccgtactatagctggctattaatctgtagcccgctgcccatctctctccttatttatctccttaaaatatatttgcatttggcttatagcctgctattgtccctgctcttactccaatacacaaataacgaatagacctaataaatgaatataaatatgtagatcatttagaaataaccttaaaaaaactatatgtagattaatttggaatggagggagtactatttggcatactacaagatagtattctcacaagtcagaagtcagaaaacccctgttgaatgatggcaaactagcaattttctcctcgatgaaagccatcggtagtggcccgtgctagctacacggaggaattaaactcggcctcgttccccgaggtcaaggcgtcacgcacgtactcagccgcggccgtccattccagctcctgccgcgcatcgatctccgtccagccccccaagtgtagtgtcaaccccgcccctgctgctgccttgcgcccagcgtactccttccgtttcggtccgtgtgctgcagcagcacagcctacccgtaggttgtacatctagccctgctgcccctgttacgcaccggatcctcctcctctaggctgtgtttagatccagtttggatccaaacttctgtagtttttcatcacatcaacctgtcatacacacacaaattttcagtcacatcatctctaatttcaaccaaaatccaaactttgcgtgaactaaacacagccctagtagtggtgtgtttaaagatcctcgggtaaagtttacattaggccgtgtttagttttaaagtttttcttcaaacttttaactttttcatcgtatcaaaactttcctacatagtagtaaactttcaacttttccgagtttagcttatgccgtgtttagttttaaagtttttcttcaaatttccaacttttccatcacatcaaaacttttctacacatatagtagtaaacttttaacttttccgtcacatcgtttcaatttcaaccaaacttccaattttggcgtgaactaaacacagccttaccgcatcggatattatatagagtaccttatggtgtattcagcactaacaaaaaaacctattcattaaacaacgagataaatttattaagcctaattaatccgttattagtatatgtttactgtagcaccacattgtcaaagatttgtatcgcaaagtagtcgtaatctgtgcaattagttatttctttagcctatatttaatacttcatgcatacatatgttcaaacgttcgatgtgatggagtgtaaaattttggggtgtactggcctagtctcagcatgcacatacacacaagtcatccgggagaagaaaaaaaaagacacaaggcagcaagagagatcagagatgtgcaagtcgcatgtagttgtatactactagtactagactgtcactgtagagatggagatcgaggagctcaaccagtagagggatggccgttgtcactgttcaccacattccggaacgggactcccgcgacatgccactccggcgagatcgctaccctgcgcccacaattcggggctttcatttttcctaggccgtccgatccgatcgtgcctactctctccctctcctctgttgaccgcccacttgctgtcacccgggccccccccccccccccccccgttttccgttgaggagtgcaccattctagtactgccactactgtacacatcactgttactacctcctcgctccaaagtggtagtgttcccggtgttcaatggcgttcacatgcttcaatgcgccggctgatttggcaagttcacgaacgccttcatccgcattcactacctctgcccagggcccccccatcacacgaatgaaatttcgctctccttggattggattttgcatcgatccttcctgcattccttccttcgcctggccatctccttcaattcaattcaattcatatgccagtgtctgaactcacatctcaattctcacaccattcttctacacagagctagttggagcttggaggaagaggaaccccgtaacagtaaatgccagtacacgtgtaaacccaacgccagggcccctacaccaaccaccaacaatcctagtagcagcagcatcatgaaccatccctacaatacgaggctactgctgctactactactccgcccttcacatcccaagaaaagagggcaccggcatcacatcgcatcacataaacactcccttctccaattaatgccacacgcaggcaaaggcacaaagccccatcgcgtcgcgtccatcgcatatctgtcaacaacacagacttcatgcagaggaccacggtcttttgcacaaaacaccacccccacccctacctttgcctccgccgtatacatgcacgccaccaccagattgccagcatcagcatcgcagcggcatgattcacccatcaaccacacacgacacgagccacacggtgtggggaggcagcaatggttgccattgcccttttgccaagatggcattccgttccacatgacatggaactgggacctcctcctcactgcctcacagggctcagcacaggggccaaaccacatgcaaaagcttgagccaaaaggagaaagcaagcaagcatgcatgctttgttgctgcaacgaacagtgtagcaaacctgcaatcgtagcagaagcaacaagacgaagggcgaaggttgaaggacatgtctacagttgttaacttgacccgggcctgagacgagccagagggggggagagaaagagaagattccattttagcctcaaaagtgcaattaattccacttccgacgagctgtcacccatgcatgcaccgattgtacttacacgtgacctgattcattcccggttttgctacaaccaaccaccacctcaaagcacagtaccacgagagggaagcacaaccaaagagtgacaaaaataaacttgttccatccgcgccaaaaccacccgagagatttgagtaaaacagggttaattacactttggtctgcctgacaggcaacttaacaacaacattaagctgcatgcaagaagcaggaactactgctaacgctatactgcaggtctagtagtagtataatgagggtttcatacatgttgggaggagtacgcactgcgtgaggcgtagcaaatggtgagctgttgttctgtgagtgatactgacatggggtcaaaaaaaaagaaaagaacaaaaaaactagtaaggcaagagatgtcactagtactactgtttctctttcgtttcttttgttttgtctactttttccttgcggcgattgacggcggctatggggcggcggggtcgacgacgcaggttgcgacggagacggagagcttgtaggggaaggagttggtgtactcgaaggagacggtctcgccggcgaggagcgggcggccgtcgttgaggaggcagtcgtcgtggccgagccggcggaacacgcgcgggtccaccaggctcaccgagctgaaccacccgcaccgcacgtggatccccgcgatggcgcactcctcgtcgccgccgccgccgccggcgcaccggttcatcacgtccaccgtgtacgccggcaccccgctcggcagcggcgtcgccctcccctggtagatcgcgatgtcgtccgcccccgcgcacccgtcgtccacccggcgcgtccgtactccgtctcctcctcctccgccgccgctgccggagacgaaaccgacgccgacgacgtccgcgcctgcaaaaagggtgaaagcaagcgggccccaccggtcagtcactgcatgcatgcggcgacgaaaaactgagagcaccgcagacacgggcccacatgtcatgctccgatacgacagaatggaatgtgagggcgacggaatcatggcgcgccaaagggatcgtctcgtctccgaggacaaaacaggaggcgtctccgtggaccccacatatcaggctcccccccctctggcccccacggcctgcgtcagaggcttgtcggagaaagcgccggccgcgtgggccaagcagcagccgtccgatcggtcaatcggacggcgagataagcatcgccgagggaatcggggataggaagcttgcttttaccttgcgggcggaggagcttgcggggggagaggacggcgggaggcgtcgccggggccggagaaaccgccgcgggaaccggggcggcgagcggcggcggcggcatcaacggcgagagacctgcacaaaaaaacgcccgcacgattagacccccgccacacggcgacagacacgtgggaccaacccggagtgggccccaccccgtcagcgacacacaaaagcccaaaaacttcaccccacgcgacaaatccacgacgcggcggcggcagtagcacacagtgggagaacagcgatacgaacagagcgaaatcaaccaaccaaccaaaaaaaaaacatttcgaatccatgggaatggatggatgggtgggggtgggtgggttggtggtgggcccaccgcgctgcgcctctccttgttcgtatcccaatcttggaaaggaaggcgcaggtcgacgtggaggcatgaacacgatgaacagtagcagtacaatgcaaattccagaaaccgcacggatggagggagagagagagagatctcgtccgtaattattaatgatgctcctagtgatgcaaaactaatggtgcaaatccattgcacccgtgcggtatttcgagaattttattcatacaaaaatttttagggagaatgatctcatcgaaacggagccaaaacgcagagagatttgacgaggaaaggagtgcgatttttttttcagaaatatatgtgcagacaaaaaaaactggcgaatcatgtgtgggagaatcaagcagcagcgcacaggatgaagcggggtggttttggaatggtgcgtcacctgtgtcgtcgttggaggatgcggcggcggcgagggcgacgtcggagcggagcatggcgagcagcaccaccgcccacgccgcggccgcgaacgccggcggcggcggcgtactggacgccgaggagaccctcatcgcgcggaaacccgtgcgcacgaacgcctgaaacaaaaaactccggggggtcacgagacagatctgccacctccatggctccatctgcaacgaaaatactacacagaaaaggatgcgacgaactagagcatcggcggagaaaccaaaaaggcccgcagaaagcttgcgagagagaggacacgcagcggcgccgcctcgggccacgcgcccccttcccccgctcctccgcctccgcccaaaccgacgcggacaccatccctcccacccaccggagcacgcgtctccgggagggagacgagaccacactcgcacacctcggaaccctcgcccgcgtaggctcgagaaggagaaagaggaggaggaggtcggcgcctaccttctggtggatgacgaggcggaggcggcgacggaggccggcgacgagtggccggcgaggacgcggaggaggaggaggagtagtagtagggtttgggcgcggcgtcgctatccccctctcccctctcgcacgtgcgcgcgcgcggcggaagcgggcggcgaaacgaaacgaaaagaggcggtgtgaatggacccagaggcctacataggcggcgcggccggagcggatcgggaggaggcgtggcgtcgcgtgttgtggtcgagtcgaaccgggccggcgcggtggagagagagagggagagggaggaggggaccgacccgacagggaccagaaggaagtgatccggtctggcccggttctggtcaaggctgctgcacacagcctgcacagggagggagggagagagaggctgggtaccggtacatggcactgtgtagtgtggattggcctttggaaagtttggggatttttgggcaaactttttgttggtttgaattctgggtttcttttttgggggattgggtttttggtggccttctctgcctcctcctcctttcttcctcttgtgcttttggaagcagagagaatgttgaatcggtagaggagcgcagccatctctgggaggaaacaaaatagaaggaatattatgttagagtgctcgttggaggttaatttaccaccctcatgcttcacttgtcacaccaaattcagtaaatcaacagtccgacctgtagtatgataagtgaaatattacgcagttgagatgtaggctgtgtttaattcacgtcaaaattggaagtttggttgaaattggaacgatgtgacggaaaagttggaagtttgtgtgtgtaggatagttttgatgtgatgaaaaagttgaaaatttgaagaaaaactttggatctaaacacggccgtagtaaagggtgcatttatgggtgcacgcgtgtgaagaaagagactccggtagcgacaaatatcatgctaatcttgtagctgatgattaccgcgcacagttggcctcgtttgttgcttttgttccattcgtgtgtcttcattcctcccatcatgtaccactaacactaacgattgcatacgtggggctttttagaacacaaacaaaaaaaatgttggagtgccttttggaagcttaatactaacattgctaacttgtaatgctagccacctattaagcaaatcaaaagtttgaggctggactatatcgtaaagataaaaatcacatggaaatgcgataaaaccatgcattcatgggtgcatgcatgtgaagaaaaggaattaggaagtgacaaatatcgagtttatgactatggttgaactgttgtatccttgcaccacctgttgtaccctcatttgttaaatgcttggcatgcatcatcataggaaaccttgtccatgattatggattaaatggttccagacttatggaacaacacacgattcataagtacgacacaaatttttagattaatttggttgacgatcctaaccaataagatcgattatgggattacaccattcatttttgttcttagtttcttgaattaggttaagtctaatttaccacacgactattgtgaaaaatatgatttaccctcctaactataatttcagacatttgacaccctcaatctatttaatctagacgaattaccaagcacgcaaacaaatagttatataacatgtgaaaaacaaacgatcatatctacaatcactgtctaaaaaaccagcgtgatatttatcacttttaggttccttttctctatatacatgcactcacgaatgcacactttgtcatatttccatgtaatattgaccttctacactacaggtcagcctctaccttgatttgccaagaggttgctagagtgacgttagcaatgagcgataaacctccaaccataacttcaacatttttctacaatcttcaaacaaataaggtaatacggatgtgatcgttggcggtacgtacacgatcggtacagtgaagacacgtgggcatatttgagaggcggtgactagtgacttggttgttttggatgtcgatccaacggtttagggcctgatggcctgttccgctttagtgttaaaatgaaccattttaaaatttggtaatactaaaattttaataaattagcagtattacgaagtagtaaatgtgttactgtcaaaatttcttagtagtagtaatactacaattttcttcctgcattccacccaaagcatagacaaatcttgggcagaaattcagcgagtgattgtgtgtgtgtttgtttacaaggaggagcagtgtctgacgttaattagaagccatcatggtgccggccttcgctgcccctgcccctgcccacgtggaggaacggttcgggccaaagcgtgcatgcaacctgaaccaaagcttgccaaaaatgtggcaacgagagaatcctctcccacgaacgggtgcgtcgctggagacacaccgtcaataatagtagcagcgtgtttcatcggattttgcttaaactctgtggggattgtcttgatcagttggttggttagttcaaccaagttttattttagaggggcaaaatcagttggtttctctttgtgagtttgaagacgtgtgaattaatttggtctgcacgtgctgagatgttcagggtgcctgccatttggtctgcctcttgctagctccgagtgattggattttgcacgatgttgggaaggtgagggtggatttgaagtagtgcagccattttcacgaggaatatgtgggagtgcttttttggaggttaattcagtaaatcaagactcagacctatactcctatagtaacatatggaagatgggacaaagcgtgcatttattactgtatacatgtgaagaaaagaaatccagtagcgacaaatatcatgctgatcttaccgcactataaaaaacaatttttctgtacgagaccctcgttaggttacaacggaccataactgactacgtctgcaaaaatcgaccaccattttcgcatatggtttcttaagataacataagcacccgcacacaaaaatagtgtcttttgcagacttttggcgcgtgcggtaggactaaccgcacgcggaaacctgtttctgaccgcgtggaaaaatgtctattgtaatagtgtcgttggtgactaccgcgcacggttggtcttgtttgttgcgtttattccattcgtatctcttcattcctctcaccatgcaccactaacaatcgcacctgtacatagaataaaaagaaatgttggagtgtcttatggaggcttaacactaaaattactaacttgtcacgttagccacctgtcaagaaaaatcaaaagtaaaggctggaccactggtggagaaaccctttgtagtcccggttcgtaaccctctttagtcccggtttccaaaccgggagtaccaatccgggactaaagatcgctatctttagtcccgggtgaaataaccgggagtaaagatcgatctttagtcccggttggtaacaccaaccgggactaaagatcgagctgaccttttttttttttttgcatgcccctgttgctgcatggtttatatatatatatatatatatatatatatatatatatatatatatataaaccatgcatatatatgtttcaatacatatatatgcatacatatatatatatgtatatatatatatattatattatattatatgtatatacatgcataatatatatgtatttatacatatatatgttatgcaaatgcatatgtatatagatatatatatgaacaaaatatatttacattatagaaaatgtgtacacatgcatatagaaacatatgtagtcatgtattaattacaatccattatatgtcctagctagctacgatttcgacgtagtagtactcgctgctagctcagaagctaaggaccggtgaattgtgtttccgtcgtagtagaattcacccttgggatcaaggatttcttcgttgatgaatcccatgagttgttcttgaaacgccgcgataaattccttgtgtgtggtcaggttatccctcatgcgaataaactatatgaatgtatgaaattgattagtaattaaacaagaaatcgctacgtaatgaaattttgaatttatttgtacgtacatcgagctctcttgtggtgatgatttggtctgcaaggcagtggcaatactcgcacacgtaatagccgcacaagttagttccctgcttttgctttgcgcactacaaataaatgacaaacaacgagagatctaattaatatacacttgtatgtatttgaatcggagaaatataaatgtagagcatgtgtactcacaggaaatttgaacttccgcctaagtctttctctccatttgccgcggaccaaatgacggaaccgataccaagccctacatggagtttaaagctatgattcgtagtagcaattaacataacaagattttcttaattaacaaaggaacttatgacggtacctgtctataagttcgaaaaccttgtcaaacgtagactcttttttatccattgagtcatatacgttgacggtgcaggcctccaggtcgatgagtaaaagcacccagtggaatctgcaatgtgcgtgggatgcattacatatgaaacacttagcaagttcgtacgggaatgaaatttggtatgtaggaagacagtaaaattaaactaactctgtgttgtatggcaacagtatgaacgtcttgtaatgctgcgccttcaggagatggacgagattgtcctctgtttcttgtggatattggtcgagcattgcgacgtttactttccgagggtcgatgaatccagtatcgaaaaccctccgccgtcgggccctttgaatctccattctacaacgataaatgggagtatattattttctatggtctacttatatacaaggacctaattaattaaaggagacgtatagtaagaaatctaactgaacgatatacttacaaaatccagcaactcataatagagacgtcgagggcgtccagctggtatagttcgtagattcccctgaaattgatccagagaatgtcatctccttgcaagaagtccgtgtccctgatcctcgctccgatcatctctctaccggtggcgctcatctccatgtacagctgatggaacttgtacatttgtgtgggtagggactgcagcagctcaggcttgacaagcggtttaccgagttcgtacatgtatttcacttccaccttttcgattggtgcgactcttagcaattgatccgtagttagaccggtgtcagtaataaattgttctatcgtcatttctttaccggtcaccaacggctcgatctcctggtttggttgctctccaagctgagggactggtttggactttccagaagatgctttcttcagcgttcgctcatagtccgatagcttgatggcctccttgacagatgcagacatacccctgaagaagttcctgacactggggtctataggaatattcttttctggacttcgaggcttgaattgtctcttgacttctgatgcaacgtaagcgtcaagctcctcttgcgtgcaatcgtaccccgggtccttgttcttggcggcgtcaactttcgccttctttgttgcccttgtgtgggcaagcggtggagctgggggggcccttgactttgaaggtgccggaagaggagcttgcgggggagtaggtgtaggagcacgaggaggagtcggtgcaggatcctgaggaggagtcgatgctggagcctgcggtggagacggtgctggcggagcatgaggaggagacggtgcaggatcctgaggaggagatggcagagccggaggagatggtacacgagacgccgcttgtcgcccagggaggatgatgtaccgcctgcgccatagaataatggcatggcatgtgtctcgtagatgcgtctcaccgtctcctccagggtaatccagctcgaggtcctcgtacgcgccttcgaccaactcaacttcgaccttggagtatcctgctggaatcggcctgcagtggtaagtacctgaagggtccgttgggatggccatgcccgacgccaccttcatgttgtgagagattatttattagtaatcaacatatataagcagcaactagcggaatggctaaatcttacctttattgataagttcttgaaaggaatatgcagctcacatggtgtccgctgagtgatgtcatcaacgggacaggtcgattcgtcctgtgtttgcatggcgtccatgctctgcgatcctacctgccccgttgaggcgcagctgctacggtttcctgacgggctcaccattgcaggaggaatggtcggctggggatcatgggaccgatgtgcggccatgcgttcatcaaccttccttgccacctcctcttgcatgttgagttcgtagctcgatacccggaactctaggtctgcaatcttcgcctcggtatctctcttgctcctcatccgactcctgtacgtgtggatgtcctccttgaaaccaatcttccaaggaatcacccctttccctcgagttcgtcctggatgctctggagtctgcagggcgagtgtcagctcgtccctatctctgtctggtcggaacgtgccctgagaggaggcttccactgcatctgttagtcgtcgcgcagcctcttgtatctgatagccgaagaccagtgagccatcagctgggttgagcgttccaccgtgagcatagtaccagaacttcgatcgttccggccaattggctgttgccggttcgatacccctctcaatcaagctagcctccatctgctcccacttcggcatcgcgacgctatagcctcctgaccccaagtggtgatggtacttcttcttggcggcattttctttgtttctttccatcatcacctgcccttgttcacctgtcttatatgcaacgaactcgtcccagtgatcccttagctttgggaatgtgtcgaagttcggtgtctgccccttcagtatatacttctggtacagatctcccttgaagctctgaaactgttctgccattttcttcagagtccaccttttcactttgtcctctgtacccgcaggaagggtgaatgtctcgagcattgtggtccacagcatctctttctccgaatctgggacaaagctctcatgatctccgcgtgcccttgttcttcgccagtacaccgtactgacaggcacgttatcccgcacaacccaaccgctgtgacgtacatagttcttggcggcttcggccggggcactaggacgtccatcttcttccacttccgttatgatgtgccgaccctcaagcttcttcgctgcacctcgttgcccgcgtgccctcttctgtccaacggagggttgactaccactagcctcctcctcctggttcccctccacatccctttccacgtgcccctgctggttcccctccgcatccctctccacgttcccttcctcgttcaagtactggtttggatcctcgttcccctcttcttcattccagtactggctgcttccctccgcgattgtatcgtacaatatctgttcctcatcgcggtcagccatctgttgatacaagaaacatctgctaagtcacgagacatttatgttttaacaatctaagtcatgtatgctaagtgtaaatgtcgtacattagaaccctacacaaccttacatgctaagtctaattacaaatcgtgatataagctaagtctaggtgacgtatattatacaaccctagctagtaaataattatatactaagtctaattacaaataaaataatcttatattaaaactcaaataatattacatgctaagactaaaatagtcatgtatatgctaagtgtttcgtgcgtatatgctaagtctaattaagactacaatagtcaattgctacttgtcgcaccaattccgtagtcaataattacatactaagtctaattacaaataaagtaatcttatattaaaactcaaataatattacatgctaagactaaaatagtcatgtatgctaagtgtttcgtgcgtatatgctaagtctaattaagactacaatagtcaattgctacttgtcgcaccaattccgtagtcaataattacataccaagtctaattacaaataaagtaatattatattaaaactcaaataatattacatgctaagactaaaatagtaatgtatgctaagtgtttcgtgcgtatatgctaagtctaattaagactacaatagtcaattgctaggagtcgcaccaattccgtagtcaataatgtcatactaagtctaatttgcaataaaataatcttatattaaaactcaaataatattagaacactacacaatcttatatgataagtctaattgcaggtctaataatcttaattaattgcattacaaatataacaatcatttatattattacgtcacttgcctgctcgaattccttctagggctagctcttccactcaggcttgacggacgactccgacaacacgtcttttctgcaagatacaaaaaaatgtattaggataaatgcgaagtaacatatatatatatatatatatatatatatatatatatatatatatatatatatacatatatacatatatatacatatatatacatatatatacatatatatatatattgcatttcacgttaacgttcgtcctcgttcgttcgctcgttcacgttccctagctcgttcacgttcgttcgctcgttctcattcacgttcgttcgattgttctcattcacgttcgttccctcgttctcgcttgcttcgttcgatcgttctcgttctcgctctcgttcgttcgatagttctcgttctcgttcacgttgtcgcggcaacgtacgttgacgtgttcgttctcgctctcgttcgttcgatcgttctcgttctcgttcgttaacggcggtgtg

SEQ ID NO: 20195 - DNA, 1414 bp, Oryza sativa
aagggagatctggcggcggcggctttcacctcagagatgcggcggcagcggaggaggcggaggcggcggcgaggacgacgagctcgagacgacggcgagatacggcggcgtcggcgcggggatttgccctaggcagtggcggcgaaggagagaggccgagagagatcgatcggccgaaaacgtttaagtgttggtgaagaagacgagggcgcaccgggaatatatatacccctggatctttactcccggttgttctcaacaaccgggagtaaatatcttttcccgctatttcgaaattctttttaaacccggttagggttaagaaccgggactaaagattatagcactgcatatgattttcgcttacatatgtgtttataaaatagaagttaatgcattaacattatgtaaagtacaaagattaatgacaattacttcgaaaaattatttttggctgtaataaattaagtggataaatcgtaataagcaaatataattaataaaaattccaataatcatatatacttagcatatatatgaatgatattattatattggtaaaaactctaattaagatatgtatgtacatactgcatgatttaaaattaataaaaattgtaatcatcatatgtacttagcgtaggaattatattaaattaaatgctaaaaactctaattaacatatgtaaatgccacatgcatgattttaaccttttaaaaattcgaatagtcatatataagtagcatatgaaagatagtaaattaaattgtgaaaaactctaatatatgaatgatagttttaaaaatatattaaatttaatacttttaaaaattctccagtcaattataattagcatatgaatgatagtaaattaaatgttaaaaactctaattaacatatgaaattgccacttgcgtgatttaaaacttttaaaaatcctctagtcaattataattagcatatgaatgctagtaaattaaatgttaaaaactctaattaacatacatatgaaattgccacctgtgtgatttaaaacttttaaaaattgtaagtatcacatataactagcatatacatgatttaaacttgttgaaacctctaataatcgtaatcctcgtcagtcttgtcctcaactccgacgatttttcttttgcctgggagaaccacttgacgcttaggctcatcaggccctctgcccttctttcctttgctagacatgtccttcacgaaaaagacttgcgttacatcattggcaaggacaaaaggttcgtccgagtatccaaccttgttaaggtcaacagttgtcatcccactgtcatcaatcattacgcctccaccagtcaacctaacccattggcaccggaacagaggaaccttgagaggaccatagtcaagttcccatatgtcctcgat

SEQ ID NO: 20196 - DNA, 12003 bp, Oryza sativa
atttcggaatccatggtttgatttgcgcggatttggaggaggaattcgcacgggagggagagaaggccgtgcgggaggaggaagaaggcgacggcgccctggcgcgtgggccccaccggtcaggcggcggcgtcagcgcgcgcacggcgcggacgtgcgggaggggagcggctcgggggctggggcggcttgggccgagcggccggcccaagaggagaggaggggaggcggcatgggccgagcaggccgggagggaagaggggggggaaaaggcagcccgagagagagagggaggagggagtgggccgagagggggagaggcccaagaggaggagggagagaaggagagggagagaaagagagggaggactttgggccaaatttggcccaaaagaaagaagaggattatttttagatttttctttttaataaactttgacaattgttgttgttgtttaataaatatttccggtgctctgaaaattcaagtaaaatttgagggctcattttagaccaaggagaatttaacaaaaattctccgggccacattcgaatttttcttgcacgtattttagtgtttgccgatttcttttcgaattttaattaattctattattccttttagcgaatgaatttttaattttgggatgaatttatcaggacgtgacaaatccaccctccttacaagaatctcgtccccgagattcgaggaggctagcaagaagataggttgggcggtcttctcttattgtctgacttcttccgctccgtcttctataacaaacttgcctaacaaaacttcttcactctggactgcttggctcgatctcctgttgcagatggaatcttctcttcacctgacttgtccctggttgaacctttagctgacttcgactgggttgcggcacttgaagatggggcttcagttccagaactttgcatagttcatatctttggagtcaacctcatacaagttacccacttcatgtcatgcgtcgagatcagctcgtcattactaagataccatgcttgtcatcatttagcattcaaagtattcctttacacattcagccctgacgtattctttttagatttctcttatcaatcacctttcgacctacttctttgcctggtaataaacatctttttcgatatcttctatcagtcatcttttgacctctggagaaacttctcttgtttgtcttcatccgtttccacatcttctggtgcatagtgagccaaacgatagaactcgtgccggtactctgtgacggtcaaatctccttgcttcaggtagcgaaactctcgttttcttagtgtgatcattcctgcgggaacatgtgatctcctgaatacagaggaaaactcgttccaggtgatggtatgtccttctggccgtgatgcctcgtagctatcccaccactctgaagccggtccaaccaactgatgagttgcgaagccaacccgctcctggtcggtgcactgaatcacccctagcttcttctcgactgtgcgcaaccaatcattggcttccataggatcgacggccatggcaaaggttggaggccccgttttgagaaattctgataacttgcactgttgctggactgtaggtacttgaacgttggttgcccctgctgggttgttccgattctgtaatagttgaaaggcggttgccaacatgttggtttggttaaccacaacttggattagctctggtgaggtttcgttgatgcttctctcattcccattggcttgggttcttgagtcatcggatccatcattcccatagcctttgttaccaatgttatccatctgtcacaaggtagaggttgagaggggaagcatacaaggaaagaatagaccagagctagggacaggaccttaaaggaactaactctttttgttgatgtgttgtttgtttcatttattctgcaagttgattaagcaaacaacctagcatggttacatcaccacccaccgatgcaaaccacgcgctacacacacaagcaaggaaacacacgacaaacgaaacactagagggtggcttaggttctgcgacgggttctccaagatcttcactcctgcttcacagctggcttcactgcttccttcgcttcgctggcggatcctgcagtcttccggagcttcggcaaacaactgacgacatcttcttcttcgcaaagctgaccatctagtacttagttgaaatccgaagaaagaaaagagtaaaccttttgcaaatagcattaggggaaggagaaaaagaggaactttcgcaaataattttatttataaaatatgtccttaggttttatccatttggcttatcctacagtcgagatggctctgataccagcttgtcgcgaccgggaaaattgccttttcccgaacgctagtgtattaatccccgtcccaggaaaagccggggtacaccacacaaacatgatataaaagacacatctttattatatcgataatatttacattattacaaaggcacttaaggcctgacaatcaaaaataaacggcagcggactagcgggcctacggctccatcttcacaggcgctcaactggggtataagccaggactccacctaagacatcttctccaaagcttctcttactgaagggggaaaagattgagcaagaatgagtacaaccacagtactcagcaagccacaccggcagatgcatgattaatgcaagggggtacaaggggataatagtaggggttaggttttgcagtaaacagcatttaaaagtcacttagttgcccaaagccattttgtaaagacgatcctagagctacacagtattattaaacaaggccgtgaaccctcacgaacctgccttaacccaaggcctacgatgatttggaccgaactggcaacccgacctgggttccagctcgtcccaagccaacccaggccaaccattccatattttagttgtggagcaaattttaagaattaaaacactgacttgggtacattgctaggcttgcccatatccgagggctcggctattcgaatagatttactctgatcagaggtgtacatctttacccacaagacacatctttactccgcattccatggccttggaacccgtcgtaaagatgtgacatagtttccaacccatcctagccttagacaagagtaccgacccaatcctacctacggccgggatacccgggacaggcaggcagaactgagcccctagcattgggcaccaaccctccgccgtacgacatctcgactaccgggccgcagctcgtgtagccttcatttgccctggagaatgtccatcgacgcccgacttcatccatctccaatccgtgtacttttgtttatgactagactgagccacaaactaagccttacccattagacatgtggaagtacggtagtgctttgcaacagaggcccgagctttagtccttatagtggccggggtgctacttcccacaactggcatgcacccaaaccccaccgaaaacaggttttaggggttttgaaagaggaagagaggtgtttgtccaattccaacataagccaaccattccaaagtgtccaaatgatatgagaattcccaaagtctaaagttataaaaccacctaatgttgcctaattaatcagcgaagcatctacctaaattcatactagtggaaccatgaatagagtacccactagttgaggttttgtttaatctagggtgaacaaggtaataataataacaataacaataataatatggtcataacaaaggtaaataagcatggctaaataaaacagtggtaacgcgggaatttaaataaagcgataatgcaataatttaaatcaacataattttataaaatgggattcaatatgctcaaggatgatgtgacttgccttgctcagaaagaacggccttccgaacctttggcgacgaccacgaaccacgcttcgggaacctccggaacgacgaaagctacgcgaagcacacaagcaaagctacaagcctataaagaagcaataacaatacataaaaacaaagcacagggttctttaggttataacaaacattaggagacttgaacgggtcgattcagagttcgtatgaccgagatatgatcatccgaagtttaatgctgttatatggagatttgcggattattataattaagctttgcaattataaaacatgtgtaagcgctggcctggaaaagacaggaaggctgcgccgttgacatgcggaccccacatgtcaacctaaaggaccgcggtagaccgagtacacagaggcggtccacggtcgacggaagcggatcccgtgtgtcaaccgaggcgagtggccgacaaacggactccactagacaccacacggtcactacccgcacacgtgaacgaccaccgacaccggtacacgggtaccggggccgacaaccgcacaacgggcacgggcgacaccgaaaggacgaggacagggcagcgagggagagggaaccttaccaccacgcgacgaggcgtgggaacgacaacgacgaacgggcgcggcggagacagacgggcacaacggagacgaacggcgaggggacggcttcggcggcgatccttggacgaaggcgagacgcggccggcacgaggcttgacgacgcggagccgaggacaaagacgaggacggggctgcagcggctcgcttgacgaacgcggacgacggacgagaacggctcgacggagggacgaacgccacgacgaccggaaacgacgagaggacgacgacggcgacgaccggggccggcgaggaggcgacgaggacagccggcagcggctgcacggggacgaggatgacgtggaacacgccgctgcgatgacgatgacggaggcggcgccgcgagacgacgagccgggcgagagggaacggtgaagacgacgacgggcaccggcggtgttcggtcggaggggaggcgaggccgaggacgacgtcgcagctgcgatgccgaagatgatgggggtgtggccgaccggtgcacggcgaggagggacgggcggccgaacaactccggcgaggcggacggagaggttcgcggcgacgttccggcgaaaccgagggcaggccggggtggagggcgatgcggcgtcgccgagggaggagacggcgacgtcggccgacgctctggcgcggcgaccggggcagccggaggagatgtcgacgaggaggaaggtgaggccggcgcgggcgacggtgttccggcgatgttcgggcgaggaggaggtgatgccggggatgagagcggcgtcgtggagccgaggaaggtggtggcgacgtcggccggcgctccggggacgcggcagaggcggccggaggcgaaatcgtggcggcaacaccactggacgccggcgaggacgcgtctccggtgctttacccgcgaaacggagggctgaccgagggagagggggcagctgcgaggccgagggagaagacggcgcggccgggcggcgctcgggcgaggagaggaaggcggctggaggtggccggcgcgaaggaaggaggagggcgacggcgggaacgtagttccgggggtctcctcgcgaaacggagggcaggccggcgtggaggaggtggcggcgacgctggaggaggcgatggcgcggccggccggcgcacgggcgaggcggcacaggcggctggaggtcgccggcggtgtgggagagagagggcgacggcggggatggggctagagaccacggggaggctcgggatggggttaaaacgagagaacgcacggagggggttgcattttataggatgggggagggagccgggcacgggagagggcggaacggcgacgggaatggcggccggcggcaatggagggcggccgaggaagacgcgggcgttcccggcgattgggggcgccattcaagggggaaattagggggaattgaagaggagtcaatggggattaaaaccccccaattaatttcggaatccatggtttgatttgcgcggatttggaggaggaattcgcacgggagggagagaaggccgtgcgggaggaggaagaaggcgacggcgccctggcgcgtgggccccaccggtcaggcggcggcgtcagcgcgcgcacgcgcgcggcacgtgcgggaggggagcggctcgggggctggggcggcttgggccgagcggccggcccaagaggagaggaggggaggcggcatgggccgagcaggccgggagggaagagggggggggaaaaggcagcccgagagagagagggaggagggagtgggccgagagggggagaggcccaagaggaggagggagagaaggagagggagagaaagagagggaggactttgggccaaatttggcccaaaagaaagaagaggattatttttagatttttctttttaataaactttgacaattgttgttgttgtttaataaatatttccggtgctctgaaaattcaagtaaaatttgagggctcattttagaccaaggagaatttaacaaaaattctccgggccacattcgaatttttcttgcacgtattttagtgtttgccgatttcttttcgaattttaattaattctattattccttttagcgaatgaatttttaattttgggatgaatttatcaggacgtgacaggcaagaggcctaagccagatccagaggccactacctctgagccgtggggactccggtttgcgcgagccagcgactaccctctacctgccccgggatcctgcggatggctggaggattagactgacggactccttgcagcttcgatctcgtatcagatggtttttggatagtatgcgagacacccccttcccttacctagattgacgagtagtttgatgattggtttgatgtatcgtttggatgaaccttatttggactgcgtatgtatgcagtcaattgcatcatgatttatgtaccatttgtgaaactctgtgatgttatctatgatatctattgttgttgtgttgtaaatgagtttattccaccatgcttgcgaaacaaagtcatatcgacacaactcccttaatgggataaagccataggagctagttagaaaattaggatgcttactccatcaacctacacagatggcaagccgacgtcgggcaacaaccagcaatgacgaaactcagacacccgacttaaacactctggccggaattatggccacccaaactcaacttctgcaagctatcgcgagcaaccaaggcaaccgcggagggtcaagctttggagagtttatgaggaccaagccgcccacgttcgctacggccgatgagcccatggaagcagaagactggctacgcatcatagaaaagaaactgactctagtcagggtacgcgaagccgacaaggtgatcttcgcagtgaaccagctggaaggacccgctggtgattggtgggatacctacaaggaggcccgagaagacggtgctggagaacccacctgggaggagttcactgcagcgtttcgcgagaatttcgtacctactgcagtgatgcgcatgaagaagaacgagtttagaagactgcggcaagggaatacaacggtgcaggagtatctaaacaagttcactcagttggctcgctacgcaattggagacctggcggatgaagaagaaaagatcgacaagttcatagaagggctgaatgatgaattgcgtggacctatgatcgggcaggatcacgagagtttccagagcctgatcaacaaggtcgtcaggctagagaacgatcaaaggacggtggaacacaaccgcaagaggaggcttgctatgagtcgcccacctcagacaatgcctcagcgacttaagggagccactccgtccggatggaagccccctgtcatggtgaccaaccgtcccgctgcacttagcaacttcaacaggccagttgcacttcagaaccgcacccctacaccaactttggctgcccctggggccaagaagaatgtggactgcttcaactgtgggaaatacgggcactacgctaacaactgccctcatccacgcaaaacccctgtccgaactggcgcgaacgcaatgactgttcgcggcactactacccctgctgtcgggcgaggcctattcaagactccgcaaccgaacaggaccaccactggatttgggcgcgggcaagtgaaccatgttcgagctgaagaggcccaggaagatcaaggcgtactgatgggtatgttttcactcaactccactccaattaaagttctcttcgattcaggagcattgcattcatttatatctttgaaagcaagtcaacaacacaatttaaccagagttaaattaagacaaccaatgttagtacattcgcctgggggtgagatagcagtggatacagcttgcattgacgtacccatccgccttagggatgtggtatttccctccaatcttatggtgctaataccccaaactcttgatgtcattttgggtatggattggttagcaaagcatagaggagtaattgactgtagacgtagagaagttaccctgaccacaccctggggatcggatatgagagcaaccatggatcaagatcctaggctaaccgaacgtgccggaggtatatttaccatgctacccctaaagggaatgccagtagtgcagcgatttcctgatgtgttcccagaagatttacctggaatgccaccagatcgtgacatagagttcattattgacctgatacccggaactgcccccatatccaagagaccatatcggatgccggtcaatgagttagaagaacttaaaaagcaaattagggagttgcaagagaagggatttgtacgccccagttcgtcaccttggggagccccagtgttatttgttaaaaagaaagacggtagcatgagaatgtgtgtagactaccgatcactgaacgaagtgactatcaaaaataagtatcccctaccacggattgatgacctcttcgaccaacttaagggagctaaggtgttttcaaagatagaccttcgatcaggataccaccaactgaagattaggaccgaggatatccccaaaaccgcgttttcaacacgctatgggttgtatgaattcacagtaatgtcgtttggtctaaccaatgccccagcatacttcatgaatcttatgaacaaagtattcatggattacttggataagtttgtggtggtattcattgatgacattctaatctactccaaagatgaggaagaacatgcggaacacttaagattggttctccagaaactccgaaagcacaagttatacgcaaaattcagcaagtgcgaattttggttgaaggaagtcgcttttctgggtcacgtaatctcagccggtggagtagcagtggaccctgctaaagtggaggctgtcacggaatggaaagcacccaaatcggtgactgaaatccggagttttctaggcttggctggatactaccgaaggttcattgaagggttctctaagatagcccgaccaatgacacaattactcaagaaggaaaagaagtttgcatggtcggaacagtgtcaaggaagctttgagcagctcaaagaaaagctgacctcagcacctattttagttcttcccgacatcaggaaagactttgttgtatattgtgatgcgtcgaggcaaggactaggaggtgtactgatgcaggagggaaaagtggtggcctatgcgtcgcgacaattgcgaccacatgaggaaaactaccctacccatgacctagaactcgcagctgtggttcatgcactaaagatttggagacattatctgattggaaaccattgcgatatctacactgaccacaagagtctaaagtatatcttcacccagtcagatctcaacttgaggcaaaggcgatggttagaattaatcaaggactatgatttagaggttcattatcacccaggcaaagcaaacgtcgtagccgacgctctgagtcgtaagagccattgcaatcatctgagaacggaagggatggtccctgagcttagggaggaaatggcgcagctgaacctacatatagtaccccatggacagataaacaccctggatattcaacctcttttgagaacccaaatagaagaagcccagaaggacaatgaggaagtccgagaggtgaaggaacgcttagctgccggacgtgcaaaggaattttcaaccgacgaaaaagatgttctatggtataaaaagagaatttacgtacccgaacagggtggactgaggggattaattttaaaggaagctcacgaatcggcatattcattgcaccccggaagtacgaagatgtaccaagatctgaaggaaggatactggtggcccaacatgaagagagatgtggccgaatacgtagcactctgcgacgtatgccagaaggtgaaggctgaacaccagaggccggcaggtttgttgcaacctctcaggattcccgaatggaaatgggatgagataggtatggatttcattgttggattgcccaagaccgcaacaggatatgattccatttgggtaatcgtggatcgactcaccaagacggcgagattcattcccgttaagacaaattatagcagtgcaaaactcgccgagttgtatatgaccaggatagtgtgtcttcatggtatacctaagaagattatatctgatcgaggcacacagtttacctcacatttctgggagaaagtccatgaagccctgggaagttacctcgcatttagcaccgcttatcatccacagacagatggccagacggagagaaccaaccaggtcctggaggacatgctgagggcttgtgctctggattttagcaaggactgggagaggtgtttgccctacgccgaattctcttacaacaacagctttcaagcaagcctaaagatgtcacccaatgaggcattgtttggtcgacgatgtcgtaccccgctaatgtggtccgagactggagaacgggcggtatttggacctgacattattcaagaagccgaagaaaaggttcgcttgatccgtgatcgtctaaaagtagcacaatcacgacaaaagagttacgccgacactcgaagaagaaacctggaatttaaggaaggagattacgtttatctaaaggtttctccgatgaggggaacaaaaaggtttaaggttaaaggaaaactggcaccaagatatgtggggccattccagatcatcgccaggcgaggagaagtcgcatatcagttacagctaccagaatatatcgccgatgtgcacccagtcttccatgtgtcccaattaaagaaatgcttacgagtgccggaagaacaagccccgctggaagagattcacattagcaatgatctcacatatccagaacacccgatccggatattggatgaagcagaaaagaggactaggagcaaagtgtggcgtatgtacaaggtacaatggagtaatcacactgaggacgaagccacctgggaaggcgaagaattcttgaggacggagtacccgcatctattcggcaactggtaagaaaatctcgggacgagatttatttaaggggggtaggtttgtaacaccctgaaaattcgaccaacgaaatcaaaactctaaaaatgcggactttcaaaaactttttaaaccaattgcatcatgccgactttattcgcctgtttcattggattttgatgtcggagtctaattaatcgcgaataatgaataactagctaggaacaaaccataaaataaaatctagttgactaaataaataattaaaatataaattaaaataaaggttaggtgggattgaaataaataaaataatatcgcaaccatattagcaataattaaattttagtacgatggaataaccctaattaaaataaattatataaaaataaaatatgagtaatattaatctagggagaattcattagttaagattacatgaatattgagtaaaatgcatatatgtaaaattaggaatcgtggaatcaaatttatatggaaaata

SEQ ID NO: 20197 - DNA, 23678 bp, Oryza sativa
atgggacgggtcatacctacttccactccgcctgttacagaagcgacgtgggggcacggccgcccgttcaatcggatgtgaccggcaacaggccggtcacagactggttacatccgattgacgtgggtcagctaggcggcaccgcacatctgcccttaccgcataaatgcggtgagggacagttgaggcgctgcgcattgatggctgttcagcctcggcccccttcctgctcgctccccccgccacatggtagctgggcgagggcctcgggacaaggcagcgggagagcccgaggggcacgacatggcaccccgaggccccccggccgcttttgtgactcgcgaggcgcgggagtagggctaggctgtagagccacgcggctggatggaaaggtaactttcccccacttcgcatacccccaggcccatctccgacagtagcccctggcaccatattggacactgacctcctgaggtcggtctgatgtggtgcctcacgacttcccaagctggggttgtgggcccgacagggaatctaaggaaatgtcgccgagtggccaggttggcatattaaccacggcagcagtttgccgccactgaccacgctgatgatggggatgtttaaggcgtgaaaatcggggggtcggtcaggccacgcctcgattctcttgcccgctactcatgcggcggtagtggtgacggttcactcaggttgtgtccgtgaccgttgtgcgccctactccgagtgtgccgctgataggcgcactaaatgcagggcgtggattcaatgggcgacgtgatgagttgacgcgggaaacgaagagacaaccgtgggcgcgagaatcgtgggggcaaccgtgagggcgtgaaacgaggaggtgagcgtgggtgaggcgaggataaaaggatacggaggcaaggatgttgtctccttcctttcgccaactgcccactcgtcttctcgctccttaagccctaacattctcaccacttcacactattccgcgcgccaagccctccgccgcttctccgccggccatcatggctcaagacgctggcgacacggtgctcccggcatcacgcattatggcggatagacaccttagcctcccccgcaagatcatgccggaaggcgccgtcgtgagggcgggggagttgcggccgcggccgctgtatccggagcgatccgtgcacctcttgtccttcgctatggcggggttgattccgccgttctccggattcttccatgaggttttggatttctatgaaatccatgccttgcatctcgcacccaacgccgtgatgacgctggccatcttcgcgcatctgtgcgagatgttcatcggggtgcggctgacgatgcggctgttccagtctttcttcatcccacagctgctgcaaggtgcggtggtggggggatgttacttccagccccggccaggcacggcggggcaatacatcgagagtcatctccgcaagaaatgggaggactggaagaaggactggttctacaccgtgttgccggaccacccgcgacttcggcttcctgccggtcctcccgaaagatccgccgtatggctggcggtttcgtaactgggcgaagagtacgacgcggtgtgggatcgccttaggggcctgcgaagcctgggcctcacaggggcgatggtctttggtgactatttccgccgccgcatcgcacctctccaggatcgatcccgtggcgcgtgggagtacactggtcccaacaaccccatgcgcacgcatgtgggtgagcgctgggactgggaggaggaggacgcgaagatggtgattcggcgggtactgggcttggactccgccgagcaaacactgattccagacgggatcctttccctatggtgcgaccgcgaccgggagagcatcctggccgtgtcggttgttggcaccggcaggagcaggtccagccgggacggcaccggtggtagcgctgccgatgttgctggcggtggcgcgacagcaggcgggagtcggacaagcggacccggcgggggtgggagctctaggtctcccggcccaaaccgcggacccggggacgactcggccagcgacccgaaagggaagcggaagatgtccgaatctcgaccgccctctcccccgcgtggagggggcgccgagcgcgtggatcgtccgctagcgggccacaagagccctgccgggaccgaggccggacggaagaagaaacggctccggaagataggacaaatggagccgtgtcgggggagcttcattgagcccccgaagtggactttcaaccgccctccccgcaggtacgatcgccggcacccacctcggtgcttttatccagcttggtctcttgttccctccttttctttttatttgttaacgcgatctgggttctcttgtagcgagattccttcccagggggtcacgcggtccgacccttcgcgggggaccaaatccgaatgatcggagcggcccaggcttggccgatccaaggccgcggggccttcacagcccctcggcagggcccacgggccgcataccgggtccggccccgagcgaaccccagccgggactcgtcccgccgcgggcgatagcggcggtgacgtccctcctgggggcgactccgagaccagggttcatgcggagcgccacccgggatcggggggcgaaggaggtcgtggctcggatgccgaggccggaggcggccttgagctcgaggtcaaggccgaaatcgggggcgggcccgagccggaggccgagtccgaaattgggggcgggcccaagcctgaggccgaggccgaatctacccgaggacccgaggcggggggcgagagggacggccgctcccccttgcacttggggcgccctcaaggctggtcgtgtagaaggggggccgagagcatcccccagtctcgcgggggatccagcggcactccgtcgtcccgggggcgggccgcaactttttcttctccgactccggcaagtatggagccgctcctgcaggtgctcgctgccgccgattccaccgttcgggaggggctcaacgcccaagttcaagccctggcggaagagcgagcggccctggaggctgcatgggcacagctcgcgtgcgagttgacgaggggcgtcgcgccgtggacgacatggtgagggtgggacgcaaaatgcgccaagcccaactagccaaaatccaggcgcgcgaggagtcgctggactccgtcatgcgagaggtggaggaagagcggcaggcggcgctgattgcctcgagcgtcctggacgaagcactgggtgacatcgccttcagtacgaggcccatgccgaggatctggcgaagaggatcaaggacgcccgcggtatcctcgacgcagctgctgcccaagagcagcgggtatcggaggccgatgcctcgctgcgggctcggacagcggcgctcgaggccgaacgcagggccttggatgagcgtgtccgctccacgcaggagttcgagaccacgattcgccggcgaatcgaggtcctcgatcagagccagcgtgagcaaaacgcgcgtggccaggagcaggcgcagcgagcccaggagctgtagaggcggactcaggcgctggaggagcgagcgcgtctgctcgatctgcgggagtccaccttggccgcccacgagagaacagcagcggaggtggaggcctcccttcaccttcgtgaagaggccgcagctgagcgtgaccggatcaccctcgccgcgaaagcttcagtggaccgccacgcagaggagctacggctctgggaagaggcgtgccgagaacgggacgttgtactcgccgagcgcgaagctgaggtgaaccgccatgaggtggcctcgcgccggctgggcgagcagctcgcaaaacgcgaggaggctgttgccgggcgcgatgctcggcatctggagagtgctcgcgccgagcgcgcggcgatagcggcgagggcttctgagctggaggcccgtgagaaggacctggcggcgggcgggcagcccggcggcgcggagttggggagccagcttgccatggctcagagcactctcgccgatatagagcgcttggtgcaagatcaggccagggagattgcggccctccgcctcaccaacgggatcggacccgggaagctctccgacgccgtcgaccggctggagcgcgcggggcgccgagtcggcatttccgtgcaccgggatagtaagcttccgcccacacgccggcagtcgcactccggctggacgggctggcggcggatctggagaggctggagaaggaggtcggcgagactgtgaaatcgtcgtcggctttcttggcgcgggacgcggtggaactggtcctcgcgagccaccaagcgcgtgaccccgacttcgtcccatggcgcgcactcgaggattttcctccagggaccgaggcaagggctcgggagcaagtccgggaggcggccgacgcgatcgtctctaacttcgaggggtcggccccccggttcaccttcgggcttgcctcggacaaggagagcgggagcggggacgatgatgacgacttcggcggcgaggactgggacgacgtctgtcacgcccagaaatttaacccaaatttccggactattttgtgtattaaatccctgtccaggacaagccagggtacacaaaacgacaagtaatatacagttccaaacataaataaagcgtaaatacttacagaagaggcacttagtcctcacaccgaaagaaaatgacaacagcgggaaaaggcgatcctagcggggcttcagctccactcacaggcaaaacttaactggggtctgaaccttggtcttctaacttcgtcttcagctcagaagcactacacttctgaaaaaaggggaataatagcaaggctgagtacaaccaccatactcagcaagccacaccaatgatgcagacgtgcaacgggattcaagaatggcttgtggctatttgtataaaggcggttgtaaaacattttattgagcaaaacagtaaaactattgagtaattaaggtactattaaatctccactgatcaacgctataccacgttgaacaggcccaaccaacccacctgaactacagtgcattgggtcgatttattaggggtgagactaatcacggtgaatctggtcgaccgaccataaccgcgggcacggctattcgaatagttttactctgatcagaggtgtacaactgtacccacaagacatagccccacgacacgtttccgtgcgctgacatgccaccacgacatactggaaagaggtcgtgataggacccttctcataactccctctaaccaagcacaccacacctcagatttcacccccactcctcgcaaggcagcgggcagtcccctctcgtgcctaggtgaatccggaagccgcataggccgtcgcagggcccatccaaattccatcacacccacccttgcctggatgcgtcggctagaggaaagctacactacaagcccagctgttgcccacgctggcttgtggtaagcacgataaattcttccagggtttcccgtgaaccggttcttaattgccatgggcacgactagcaaaaccatgcacccacagcccaccatgaagtcacattttagttgggtaattacgaccatgaagcatggccagatgtctcgagcatgcagctcattctgacactaaaaaggtctaatactataattatcccatcaaccgggctagtggtaattaagcatggctaagcatatagttctagctaggtcacataagtaacatgagctagttgatttattacccaaggttgacaaaggacagatatcaagtaaatatggcacaagcaagcagataggtaatacccggatcccatgtaattagcaagacatgcaattttatttgtaaacgataaaacatttgtaaattaggatcaaaattctcaaggggaatgtgtgacttgccttgcttcttcactttgatcttctgaactcttttcctcgcgactacgaacttccgaaacaacggaaactacaccttggcacgcaaaacgaggaaaaactctaataaaaaccaaggaaacagtacataaaaagtaaacaaacatgtagagctcaattttagatgaattttgcaagttgaatggctcaatttggagttcgaatgaattagatatgatttttagaagctttgagccatttaatcaatttctataattaaaccgaattattgagcaattattaattattttctgaagggataagctcatcgctgacatcagcaaagagccggcgccgacgggcgggcccaatgagtcagcgggccaaaggatttggtccatcgtggacttggtccacggtagtggtgcgcagcagagaggcgggttggctcgccggccaacccgactgggtagcggcggcgcacgaccggacggccaccggcgccaacactggcggtgcaaggaacggcggcgcacagcacaggaggcggcggggaaggaagagggatgatcaccagagggcacgacggcgagatgaccacgaggaggcggtcggcgacggaagcgatggcggtggtcggcacgggatgaggcgggaacggcattccggcgactcccgaccacgccggaggcacggccgagggccggcgggatctggcgaacggggaggatgggttagctgcagggaaaggggcacgaggagactcccggcggcgtgaatcaccggccggaagcaagaaaagcggcgggtgctcaccggtgtgcgatggaggtggagttccgacgggattcgggcgacggggagcagtggccgaggacctcctcgtccttgcggagccgagggaggcgacggcgtggattggcgacgaccaaagcagcaggacgacgcggttggagtcggcaaatggagttggtggctcaggttggtggtggcagcggcgtttcggcggcggtttggggaggggaagtggtagccgggcttgcccttgagacggcgaagccggtggaggttgtcgcgtggcacaccggtggctaggacggcggcgatgtgcggctggaggcggtacaggtggcggtagcttggcaccacgatgggaatggtgctgcgggggtggagggggcgaacggagtggatgccggggtgcggcacgatgcggcggagcttttggctgcagcggcgcagcgcggcattggctagagtggcggtggcgggcggctggaggcgttggaaggggcggcggctcggtttcatggtggagatggagtttcgacgatggaatggggaaacggagtggaggctgaggcacggcgaggcacggcgaagctggcggtgcaagcggagtggcgcggcggtggctagtgcggcggctagaggcggctggagctcgccggagagcggcggcgcgtgggctcggcgcggggagagcaagggagggcgcggcggcttgggaaaaatggaggaaacggatgaggggaagacgggagggaaggcgggatcgagcccgagagaggtggaaaccggccggcgacgtggagctcgacgtgggggtggtggcagcggttcggtgccgattccgtggggagagtgggggaagaggaggtggggatcgagtccacgcgctcacgggacggggtggggcgcgggaggcgcggcgtcgtggggcggaaccagcggccatggcagtttcagccggccggatggaggtagggggagaagctgacgagtgggccctgcggtcctacttgtcggccggagtgagagagaggaggctgaggaggacgtgaagcggacttttacaaggggaaaggggaacaggccgacggcccaagaatggagggggaaggccggcctggccggggaaggagggggaagggattgggctgagcccaaggaaggaggggagggattttatttgtttttcatttaatttaattggtttaaatgaactttgtattattataattactccttgagctccgaaaatttgctgaaaaatccggagagtattttagggcaaagagaatattacaaaatatttccggccaatgatttttaaaggaaatttttaatttcctctataatttcacttgattaaattgatttaacttttatttaatttctagaaaatgcattattaattgatttttattcccgaacaaaaatcggggcattacaacgtcgttagcggcaccggcctcgggggcccgagcactccgtgattacccgcgctttcaatttcccattgttgtgtgcctgtagcagacacttcttgtatttaggccatcgtgtcttcctgtcttgttctgcaattaaaacttccttttcgcactttttacccctttgctttttccattgaatgcctgcggcatagaaagaggaaaaaacaagagcaaaagtatataattaatctgcctgtgatcgaaatgccgcttttaccccatcctccccccccccctcgggcttgttctagcgaaaaggcaaacccgcgctcggtccgtggtacctaagtggtgaaaggcaaaaccgacgccctgaggaagccgcccagcgggacttgccagaccggggctacgacgacaaggggtcggggacggccgagtgtaggcccttccgagcccccagggttcggcgcaacccggggcgcggcccgcgtttgtgctccctttgggcggttttcaggtcgccccacggcacttagggttcagagtaagcgcgaactatcctttgaaccaggacaagccaaaggaaagagagagaaaaggggggcataacgggcttcacactaagtagaaaaattcattgcttgtaaagggaaaaggatacacagtggtagcccccgaccaagcccgcacaaaccgaggggttgtgcgggggttggcccgagctcctagaaagcaaaaaatctcgacgctatggatagaagcgacggaggtgttcgatattccaggggttaggcaactcggtgccgtcctccctggttagtcgaatagagcctagccggggaacaccgatcaatttgtatggcccttcccacattggcgagagcttgctcagcccagacgcgattggacgcggcgtaggacgagatcgccaacttgcagtgactgggcccggacgaggcgctgatggtagcgccacaggctttgttggtagcacgcggcacgcagggccacacgccttctccattcttcaagataaacgagatcgtcgcggcgaagatcatcctggttggcctcattgtacagcgcgacgcgaggcgatcccagggaaagctccgagggtaggaccgcttcggcgccatacactaggaaaaatggtgtttcccccgtggcacgacttggagtggtccgatttgcccacaacacggtgggcaactcctcgagcctcgaatccccgtgtttctttaggacgttgtacatcttggtcttaaggcctttgaggatttcggcgttggctcgctcgacttggccgttgctcttagggtgggcgggtgaggcaaagcacaatttgatgcccatgtcgttgcaatagtcgccgaacagctcactggtgaactgggtgccgttatctgtaatgatgcggttgggcactccgaatcgtgacgtgatgcccctgatgaacttgagggcggaatgcttgttgatcttgacgatcgggtaagcttcgggccacttggtgaacttgtcgatggcgacgtacaaggtgttgatacccgcctcgagcagccttgaatggtccaaggatgtctagcccctagaccacaaaaggccaagagagcgggatgacctgcaaggcttgggccggctggtggatttgcttggcgggatgatctgggttgcccttgctcgggggccccgggggggtctcgagtcatgtcgggatcataggccttaggaccactcgccaaagcctcccttcctcccacgggggcctcgggctccgggcctttgggagacgtagggccatcgcgagttaaaggggcctccggttcgccctcttcgcactcgactactagggcggtactcaccacatggggggttgcggccaagtagagtagcaacggttcctccggccccggggctaccaagatgggggggaggtgaggtaagctttcaactggttgagagcttgctcagcttcctccgtccacacaaacggcctagagcgcttgaggagcttgaataggggtagcgccctctctcccagcctcgatatgaatcgacttagggcggccatgcatccagtgacgcactgcacatccctaagtttgtaggggggcccatcctctctatcgcgtgtattttctcgggatttgcttctatgcctcggaaggagactagaaaaccgagaagtttgcccgccggcacaccgaacacacttatcgggattcagtttcacgcgtgtggacctaagactatcgaaagtctcagccaaatcctgcagcaacgtgtcctagtggcgcgtctttaccaccaggtcatcgacatacgcctctacattgcgccctatttgattactcaaaataatacgagtcatgcgctgaaaagtaggtcctgaattttttaacccaaaaggcatagttgtataacaaaaggtgcccacaggagtaatgaaggcagttttttccttatcttccctagccatgcgaatctagtgatacccagagtaggcatctagaaaacacaaaaggtcacaccccgcagtggagtcgactatctgatctatgtgtggtagatggaagggatctttagggcatgccttgttgaggtccgtgtagtcgatgcacatccggagcttgccgttggccttcggggcgaccaccaggttcgccagccactccggatggataacctcgcggatgaagtcagcctccaggagccacgccacttcctctcggatgaaggcctgtcgctccagggcttgacgccgcactttttgccggacggcaaagcggtgctcgatcacctccttgaggaccctgggcatatctgacagcttccatgcgaagacgtcagaatttgcccgaaggaaggagacaagcgcgccttcctatttggcgcccaggtttccgccaattttggcggtcttggacacatcatcgccaagggggatctccttgacgggcacctcatcagccgaggtgaggcgcttcttggaggcgggacgcggaggcctccggggcctgcggctccgtggccaccgccaggttgtcggcgcattgctccgcgcaggtgagggcaactttgacatcgccaaagacggtgatgggaccagcagggccctgcatcttcatctggaggtaggcatagtgggtggcggccatgaacttcaccaacgtgggtctgcccaggaccgcgttgtagggcagattgaggtccgccacatcgaagtcgtttcgctcggtgcggaagttggtggagtcgccgaaggtcatcgggagctcgacgtggccaagaggccacgtatgtcccggagtcacgccgatgatcggcagcgacggctggagcttcatccccggggccttgagtgcgtcgaaggcggctggggagatgatgctcaggctggctctccattcaaccaggacacgcttcatcctgacgttgtgaatggtcggggagaccacaagggccaacttccctcctcgagcgagcactgtcggatggtcgctctggtcaaaggtgagcttcacctccgaccagcgcgccttccgagccgcctcgtgcgtgggaacagcggccaaaagctctcgcctcatggccttgaagccccggcgagaggtgtgagcgcacgccccccccccccccccccgtcgagcgtggcgacggttccctgaggtatctggaaatccagatcctcactgtcaccgccatcatcggcgggggccttgttcttggcctcttctcgccggttaccggttgaggtggcgggggctttgccctcccgtcgaccctgccgcttctcctcatcggcctttcggaatcgctcagccaaattcttgaccgagcggcagtcggcgagactgtgccgataagtgttgtgcaccgagcaccacttgtctgccgaccggccctcgccggatggagcagtggagatcgtcttgtcgccggtgtcctttcccttgcacggggcccgtgcgggcccatctgccgcaaggacatggccctcgtcatcggagcgggccggtttccttttgcctctcctatctcgccacttagagtggggggcagactcgggggcagccgtggccgccgcaccggtgccgggagagttccaggcccacgcctcctccttccgagccaccttgtccgccagctcaaaaagctcggcggtggtcttgggctccttggaggcgatcttctctagcatgcagttatgctgcacgccattccgaaacgcatacacgaccgcgtgggccggaatgcaccgaatagtgttgcggacctaacaaaagcgttgtatgtacgagcggagggactcgtcgtccttccgccgtatagcgtgcaggtccgcctcttctcccggacggggatatgtgccctggaagttcgtaacgaactgctggcacagatcctcccaggagtggatggagtcggggggctgggtcatcaaccagccacgcgcctgatccttcagggccatggggaagtaattcgccatgacccgatagtcaccccctgccaccacaataatcgtggtgtagatctggaggaactcggagggattgatgctgccatcatacttctccgtgaggttggggcgaaacttcaggggccacaggacattctggagactcaccacgaaggccttacaacccgtccctccaggggagagcgtgggggagggccgcctcgtgaggaggaacgtggcactccagatgaggaggcgcctttccccatgcgggcagctcagcgctcgtccctgcgtcgctcgatgttgatccgagcgtcctgctccccgtagagaccgtcatgacgcctccggcttcctgaggcccctgacgatgttggcgccgtggaccgccttgaggcggtggccgagcgacgggccctcctccttgccgacgaggagagggtaacaggggtacgcgacgtaccggtggcggcaggtcggtcgccagcagccaactgccgctgggcagaggtgaccaagttggccaagtcgtctagccagcgctgaacaggggtctctggctccgagtttacggggggatgccacagaagggcacccgccgcctgaagcgcgcctcggggcgaatcgtcgtcgccgtaagtgaggcggcgacgtgccccgacgcgtcgtggcctccccccgcccgggggcgaagagagggccgaaccacccgaacgggtggtatcctccctccgcgagggttcgcggcggggaggagttggggagtcgcggcggcggtgacgagggccgcggctcccactagaatactcactcccggacggggtgggggtaaacgccaccgcctcctccacctccaggatctcgaccatggtcgtcaagggcccagggaaacttggggcggaagaaaacgacttcacttcagagcgcgcgaccttccccctacctggcgcgccagctgtcgagggaaggccctcgatagcgggaggtcgtgagacccccctttcgtgagttcggccgggggaagaggctcgcctcttagaaatcgcgtatccgcccctaaggctactagctagcttgcacagaatcggattatacaggttcgggccgctgtggagcataataccctactcctgtgtttgagattatggttaagagttacaagggttccttaactccggagagctttctccccttcttctcctagagttcaggttttctgagagtcgtccctttgctcggtgggcaaggtcctccttttatagttcaaggggataccacatgcaccgcctctacctatccttccctgggagggggacccaccttaccttgaccgggccacgatccgtgccttcgctcggaagctaagcagcagcctgtccttgagtgggacccagcgccacccctcgcctgacacaggggacagccctgtcattccctcataaatgagtgaagacttgtggtgttccttctctcatggagggaaccccgaatgacaccatgataggacgggtcatacctacttccactccgcctgttacagaggtgacgtgggggcacggccacccgttcaatcggatgtgaccggcaacaggccggtcacagactggttacatccgattgacgtggatcagctaggcggcaccgcacgtctgcccttaccgcattaaatgcggtgagggacagttggggcgctgcgcattgatggttgttcagcctgggcccccttcctgctcgctccccccgccatatggcagctgggcgagggcctcggggcgaggcagcgggagagcctgaggggcacgacgtggcaccccgaggccccccggccacttctgtgactcgcgaggcgtgggagtagggccaggctgtagagccacgcggctggatagaaaggtaactttccctcacttcgcatacctctgggcccatacctccgacagatatagttgtagatttcaaatacgcgctgcatttcaagtttgtagtcacattgcagtggtttaaaatttcacatttcatctaaaatagaaataaaataatttatgtaaatattattgacgtaatcaaatattcagatccaaagatctaaagttatgctgatccggccttatatgtactgaacacaacatacccatgcattcgagcctccatgggtacggtccagcaacgatgtcagggaccacaggaatagcggtggcgatggtgacatgcttcggaggggcacgtacggcgatggtgatgacaacgagcttttagatgtgatgaacacaacaatagttgcctcgtcttcattgatggtaacagggaagataagcgacgcagacatcaccaccacaacatgagcgcgccaacatgtagacctacaacggagatatgtatttttgattttataccatgtagatcatttgtcttatttaaaagatgtataaattaaaaataaataaaacgtacataagtgcctttagtcatagaatagattaaaagatatagttttcgaataagataaatggtcaaacgtacatctattatatctatctattatatactaaaatcaattaaactttctacaaacactcctaggttgccatgtggtatcctataaacgctctcgagtcaccatgtgacactctaataaaatagtaaaaatctgaccattaattttcatttaaattgatgggcccattaatttttatcgttagatttatttcacgtggaaaaaaaatctccgtccggagtccggatgtcagccttcatgcgcacgtacgtacaatccccgcaaggctccaaccaccgttcctctcttttttctataatccccataacaattaaagttaaatactttcttatgggcctaaaaagcccatcaacatattatatctagccaactcttcatatatactctcctaataaaattcaacatcatacaaatatttgtaaatacatttccagattcgttgttcttaaatatgtcatatcatattctaatttgagtttttatggaacggagggaatatatagcactcttaaattagaggaaatcttaaaaaaaataaaacattcgacaatcgatttacattattttaggttattagatcgatctttttcaacaaaaaaacatcccaaatcttcctccgcgctcccatgcggcgtcaaaacatattaaccatcttataaatgtttctaaaccacccagggacacactaggggtctctcttaagttaaaaaaatcgtacaaaattatgtgaggaaaagcaaaacatccgaccattagtttcgcttaaacatccaacacattattttaggttgttagatcaatctttttttatgaaaaaacaccctctccctctctctctctccccgtgcggtgtgtatcgttccttttctcttatttttatgtttatttatgataattaaaattaaaattatctttatggagaaaaaaccacaaatgaaccctccacatataaggtctagccaggtatcccactgtccctattcttctctttctcctcttagaactaatagaaacaatataaataaaaataattataacttttcaaatcatatattcaacttatgatctatttgaactattatatttttagtgaaatcatatattcatattgactatatttaaatgccaacataaaaagtacattccggacccacatccaccttgaggccaacactaaatataaaatatattaaaattcgtcattgaaaatcggaatatcgcaccttaatttttaataaagctggtatacccattagttatatcctgatagacacctaacaactttctatcaacttaattattttttctcaacatgtatatgggggctatttgcctatacaatttgatcttggagctttttatcaataaatgattgacttaggagataaataaataatctttaggtggtcatagcatctaaattatatatatgatcaatgaagtcactaataaattagagaaaaactttaaatgatattgtttttagtcataatgtgtagcccatctagcgttaattttttatagacaacataatgaaaataaaaacatgctcggttgaacatcatattgatcgtacaagcaagtgggttgcaacaaagaatcttatcagtgaaacaatgatgaggtggccttaccaatataatgagtcactttcatataggaattaaaaatcatgttcatttatttctttttgtagaacttgctacaatacgttgtaaatttctaacatttagtgtagaacaatctagaaatgtgtatttattacatgacctctattttaatattcttactctactgaagtgagataatttagaagagaaaactttaccccatatcaggttgtaggctcaacccacttatgttttcaacccaaattgcagagatcaaataatttcaaaagatgcttcatagaatagaattctccaaatttctttaaaaaatggacatgaaaacaaataaaatttatctattttttttataaaaaattggttttaaaacccattctaaatagaaatattcaaacttttagcagcgctaatggaatgaaaatatgtaaaacttcaaatagcataaaaaaaattagacattttgagcaaatgtttgggggtaagatatctctgtaggaagtcaaaattcccaaaatttactcataggaactacacatattgtttcgacataatattttctcataaattaagaagtgtacgttcacaagtaattttagtttagaatttatgcgctgtaaaggtaatcagaagaaaattataaccagcattcaaaacacattaaataagttcaattcttatttagatatagtaaaagaatattttaaaacaaagtcacacacacatggacattcataataaaattttacgtacattaaataaggtgcacgcgcatgtgcgcgggctaccttcctagttatatatatactaaaagtccattaaactttctacaaacgctcctaagcctccacgtgacatcctataaacactcctaagtcgccatgtggcactgtaatttatagaaatttataaaaattctctagccattgatcttcattaaattaggtggacccaatatttaccaccattaaatttattaaaaaagattgcctaacccccaaaccgggtccaccttgagcctgtacgtattaccatatgtataggtatgttttttttaagatagtacttatgtacgtacttccaccccttcttccctcaatttcttcatatttttgcacacatttattcttctattatcatactttttagaaaaaaaaaaacttttgtgctgaacaattccgcaactatacatctaaaaatcataccacaaatttttaacctaccattgacaataaagtttaactggcctacttatagataaaattatggtctacgcttatcttgaggagcgcgactatatcacgggacccatgaataaggcattagagaaaactccttagtaactatagtcggcttcacccgatcgttacaggagcattcgtatataagtttaattttgttttatcctattaattggtagaagtggtgtttttaaatatttacatataaatttggacatctacgagacatgggcacttgggtatgatgtggagattaactttttatggtattaatgatgtatttggttttttgtctgcaattccatctattaaaaagacactcatgtttcaagacaatgaaaataagttatggtgaatgctgaatttatatataaccggaataaagtgatttttgattggatatgatagccattctgattatttagtacataccaaaatctatggtctataagagtctatttcttatagtgaatagccattccggtgagatattgcttcttttaacattgtttttatagacaataaataaattggccgcgcatctagcgcgggcatccgtcctagttaagagaaacagagtaactacgttacaacggctctacaaaacattcaatgagcacagtaagatcagctctcaagcggtcatcagcttccctgaggagttggtcgtcttctttcctgccacgggctacctgtggaatgtcctccagcgccgaaatctccgtgagctcggcgacctcggcagcttcgcgctgcagcagcagccgccggtgacgcgccttcatcgcctccatggccaccgcgagagccgcctccgccccctgcgcacgggcgaggcgctccacgagggacaccaccgcgccgacgtcggcctcctcggcgacggcgccggacagcagcagcagccgccgctgcgttcgacggacgacggcctcctcctccccgagccgcttccccgccgcgtcgatgccggcggcgaggtcgcggatcgggccctcgacagcgaggcgctgggacgcggcgcggcgcagccgctcctcgtgccccgcccgcctcgaccgcgccgcgtcgcgcgccagcgccgccatcggcgcgctcccctcggagtagagcgcctccaggtcgtcgagcgccgccgtgacggccgcggggaagctggcggcgacgacgccgcgggggcgtcgccggagcaggaggcggatgcggccggtgtcgctggcggtgtcgcgggatagcagctgctctatgacaaggcggatgtacgccgccgcctgtggttggtcggcggcggcggcggccggagaagaagggaggtgatcttgcgtagctgcagccatgggttcttctacaggtttcgattggtgtgtgtgcgtcgccatggatggatcatggatggcgagctatatggcgcgtggaaactgtttgatcgagtccgattagcagtcggagaagaacgagggactgatcggatgagaactgaacattccgattaagcaccggaatcggacttcctaatggagcagataattttctggttcgaagcagggtttccgaaatttttggaatttcagtacttctttccctaattattttttgaaagtttgacgaattttgaatgaatttgaataaattttaaacaaattcacaaaaactgaaaaaagataatcggaaactttcgtgtgaaatatgtgcttgccggtgggggcgaaattaccgaagtttcagaatttcgttccggaattgtaatctcaggttcaaagctatcgacggttccgagaactagtacaatagaatataaaaaaatattgatttcattactaaaccactgagacgaaatatagatttgcattgcacgaagtgcctcaatggacatactctgtttttacatgtaagcaacaaagagtaggtcctgaaaatctatgaaaaatatgtagtgcaaaccacgtatacactaaaaatctgaaaacggtcgttagatctaaaaatagacatatgagttttatccacgtcaaccaaagtaatgctgggagtaaaatttttactctagttgacgtggacaaatctcatgcgttcatttttagatacagcgatagtttttagtttccactacatatttttcctaggtataaatgcagttcatccgtataagcaatccatatatgttgtttatataggcggacttggtgacggcgagtcaccatgagcccaacgctggatgaagtgattcttattatgaaactataggtgaatgacatagacaatgtactttttatgtgaaaaaacataacaaagaaaaccatagctaggcatgcatcgaatagtgatcatcactgttgatgcgttccttacaaatatacaaatatagacgatatataacaatatgccatcgcaccctactcatcatatagatttgtagttctagtgaaaaactacacccgctatctaaaaatataactaccttaagataatatagctatattttaatatggagatagtaattcaaatatgttgcatactaaaatcccaattacatatctaacaattttaactaattttcaacattacctatctgcgatcctcctagatattccatcaaccttgcatgttctttacaatctagatagcctttaatagtaaagcttttctcaaaaccaaaaatatagaatcaggattatgaccatgaaaagaaaaaaataaacagaccaacgaatggacacatatatgattttcgcaactttaatatgaatatttataaagataattgtattcaaagtttgacttacatgtctgacatgttcaaaacgccatgcatgtttctgtgaaccaagggaagtaaaatacatactcaatctaattttaaatttacgacgttatttatttttatatgtggcattcgaccatgagtgttatgtatatatatatagagggacgctccggtgctttttactgaaagtattatacttcaagtagaaataatctaaaccgtttattttaaatggtagattagtaatgtactgatataaactgggggtaattttggcaccagttgttttgtccgtctatgggctgtgcagactctgggcctgtgcggactcgtgtggaccaactaatgacgtgggcccaggtgtgtatgtgattaagaaagaacgtacgtccgatcagaaaagaacgtgtcagattaggctatgctatagcgtcaagaaaactggattaaagtttttaaacacaataaaattcggtttcaatttcagaccaaatttatcatgatttcatctggatggtctggatcgggttgacaacggaaaaaaggaaaaatatttacgtctgcaattcattcggttagtccagagtccagacaggcttaccaacaaaaacacatggtttttcatagtgcacacatagattagagcagtactagtattttagataaaatatgttacttccaaaattcattcgggactattcgggccgggtcgataacaaaagcacgtggtttttttgtcgtgaacacatagattagaggagaactactattttatcacaaaatatgtgggactcgagaaacacccaacggtattctagctagctccgcaagatggtgggttaggcctaactttgaagcctcacccattctatttatttgatattatgtcctttgctaatatttgtgtttttcatatgtggggctcagtcaaaatcgttttaaccgaatttatctgaaattcaaatgggactgtccgtcttaatcataaacaactcgattaaagtttttgaaataatttaacatccaaaatcgtttctatttttagatgaattttatccaaatttcaaacgagactgtctggaccgggcctaaatccaaatttcaatcgaaacactccaatccaactatgatagatacagggcaacggaagaataaaccggtatgtttttttatagggacttcacaattgcaataacaagtagtatacattcagccaaaaaagctatgatatacacagatcgacactttcagaaccacaaacttctcttttcaatattttgcgacgccataaccttgttagcatgacgggttttaactgcaccaaagataatataagatgctgatttataggtgaacaaagcgagaacatataacagtgaatattcagaagtcatggaatagacatgtagagtttttctttgtcttgccactcttctatatattctctgtccgagaagaatgtgcctcactctaccttgttctgcagaagttatgacatatcgatcacacattgtgctgaaaatatcatcacaagctgaaaaagtttttctttgtattgcctcactctgccttgttctgcagaaattatgacatattaatcacacacattgtgctgaaaaatatcatcaaattgataaaaacaactgacactacgccagatcctcacacctctgacgggatacctgtgacaggcaaacgaattggtcagtagtgaccgttacctttgacgggttatacgggatgccgtcaccggtgaggcatctggccgcggcccgtcacaggtatccgctcacctgtgacgggccgaaaggaaaacccgtcagaggtataccagtgacgagtttttcttccaacccgtcactggtatcccctcacctgtgacgggccgatacattagaagccgtcagaggtgatgggccgccacctgtgacggctttcatttgtggcccgtcacaggtgagcggataccagtgacgggccattgaatagaagcccgtcaaaggtatgagcaatacctttgacgggctttttttatctaacccgtttgaggtgtgttggctctataaatacccccaaactgccaactgctttccatcccgaccattgtactgttcacaaatcggttgggagggcaaggggggcgattttttgctaaaatttaaggtaaaaaacacattattctccattcattctcaacatatcgatcatcatttatttttcttcgtatgttgttgatttcagatggatcgtagatggatgtactatgcgcatcgttcgtctaccgagtatagagagggggtcactgaatttgtcacatttgcggataatgacagaaaaagtaggatgagcatgcacatgttgtgcccatgtagggactgtaagaatgaacagatgatcgaagacaaggatgaagtgcatgctcatttgataatgaatggattcatgaagaaatatacctgctggaccaagcatggagagcaagaggcgcctgatgtcgcagctgaagaagtgttagatcaggatgtagagaacaccgccgcagctcgagaaggcatgttcgtaccttctcctttaggtggagagaccatagatttggacactcaatgtctatctacaatgttgcatgacattgaagacgcagaggacaacgacagagattatgagaagtttagtaagttggtggaagattgccagatgccgttgtatgatgaatgcaagtcgaagcacagcaagttgtcatgcgtgttggaactcatgaagcttaaggctagtaatggctggtcggacaagagttttacagaactccttgagctgttaaaggatctgttgccagaggggaacaatttacctcagacgacatatgaagcgaagcaagtattatgtccgttgggcctggaggtcagaagaat

SEQ ID NO: 20198 - DNA, 6647 bp, Oryza sativa
cctcttcccccagtcaccgccgcgcgctcgcctccgacagtgacggcgccatggcgtgcagtggcgccaccccttctccccccatcgccaccgctgtcctcccccatcaacgccgtcatcttccttccccgtcgcaacatgccccagcacgctcgccaccgtcgcgcgctcgcctccagcagtggcggcacccatggcgtgcggtggcggcggcgcgttcgcgtgcgccacgcgtgcccatagaggagaggagagggcagcggctcggttgtgaaggagggagaaaaaaaagaaagaagggagaaaaaaattccatgtcatcatccacatggcgtgctacgtaggcaagaccacggtcaaacgcagttttggaccgggatgatacctcgatgtgcgctttgtaagttcgtggacctaagtgaaaccttctgacaactttaaggaccgctggtgtattttactctttaaagaatatagcaatctaagctctccattgttgctatcaatgtgaataacatgtttaaacttaacacaaatggtattatagtggaattaacatgttcattcactagttgtggtatgaatataagtgaaatatcgctaaactcttcattatcacttgaaacaacaaacaaattattttgtgacaaaggtatttcatcaattgtttccattatgggttgctttaatatagcataagaacaagacatatttagcacatcataactatgcacgccttgagtaaatgtagtaccattatcattatcaatgttctcatcttcagaaattgtaggtgctagctcaattaaactttcttgaagcatgcatagaacaacgggtaggtcgtcctgttgtatgtctttcttcacttccttattaccttggttgttatcagatacctgccaaatgttagaaacagatcggccaatccaaaactcatgctccaagtggcggttgacgcgctgtagtagtggcggaggatggtcgtgtgctcgctggcggtggcgtagtatgaaaagttgtggatggcttagcttgtgcaatcatggtcgatgttcttcgcatgagggagttgctaatcttgcttttgttcttttgctagtgtacctgcaactctttctctgcaatcataggaagctagaacaaagattgacaatagtatattctttataataaacaatatcttgaatttcatgcctccacccacgataaaaatgacaaattttatcctttatttcctctactaccccgcaacatttaataccctaattgagctcttcatagtattcatgaacaatcaaattaccatgttctagtcattgaaatctcttacgcaaatcacacaggtaggaaggaggaacaaatgtaccaggttgtaagtgggaactacctgttaatggcatcactagctcggatatgaccttggcccttatgtattcatcaaacaaaggtgcatgctttctatgtgagatttacgtattatatatttgaataaacattattacatcatgagttttgtgtgttctcgtttgcaaaggtacatgcttgggtaaaaggagagagaccaagcgcaaggcataataaatggctgatcgaataagttgattggggaccaaaccaagatctttcccaagtcttatcctacagtacaacgtcactttctgtcaatggaagtcaagatataaagttcggcatgttttggattcagattcggacttcgtgatagcgccaacttctaatggacctagccgctaatctagaaggaatctcggggcccatgagtacttgttggaaagcatatggaatctactttcagatggtttggtcccacatcaaaactcctatcaagctgtcaagaatctgcaaaacaagccacgaagctcatcaagtccgattctaatttgggccttgattcttgtaatggtgccctgagctaagcccaaggggtgtacgcccgagggctaaccctaggatgtccttaatcatatttatttagtagctgtcatattatagtctgatttttcttagattatttttgccattgtagtttcaccgctagtttggtttgtggaagcccaactttgagatcttaatcattcatctgcaaattgagttgcaatctaccttgttcttacttgtgttcttcgattctcatgcaatgattagtcttctcggtgaggcaaactgagcggcgcacggttgatgaccagaggagcgtggtattgcaattgcactgaacggatcgtgctgatcgaaagctgtaccatatgtgtcaagtttccaccaaatcgagagttattaatacctatcagaaggttgggaccctagttcactacctagatcattccaccaaattatcgcaaagtccttcaacacaccagtagcttgactaaccctatgtacctatggaactaggtgtgaattaaacttctgttgtactgtcatccccgaatcaaaatatgcctcaacatcataagcaatagaaaataatggaatactaaacttgacattagcaaaattattacctcccatacattgatgattgcagcgaaggcattgacatagtcattcatcttatgttgcttgctggtgaacctctccatgttcatgggtaccatctcgaaggagtagacggcccttcaactcgtcaagtatgtcgttaagactagctaaccgtcattccaaaagctcaatgaaattggttatgtctaaattggccatagcatcatccaaccttttcatcatttggtctattgttccctacctctgagtgcgaaaacctttggactattttctcctgttgacattgttagcgaaaacatataatagaaaacaaaaactcaaaaggattatccctatcagctactagacaaggatcgcagtggaggctagcaaatgaaagcatcttaccaagctcttacaagtgttttaccaattatgctaagtatggtataaccgatggctggttcgtgatactggagggcatgatctggcgattgaaaagggtcgaagctgtactgagcgagaagcatgtatgtggagcttaggaggccaaatttattgaagcaaaggaaagcaattgtgccaatcagaaaaatgtataataatagttcaaagtactagtaaatgtgttggtctagcctagactcaaactctagctcaagcaagcaccaaacaacactaagggtgtgtttgaggaggagattgggaagatacgcaaaacgaggtgagccattagcgaatgattaattgagtattaactattttaaatttcaaaaatggattaatatgatttttaaagcaactttcctatagttgcaaaaaacgcaccgtttagtagtttgggaagcgtgcgtgcggaaacgaggtgctttgtcaccctatctcacacaaacgaacgcagcctaaggactagatataaatcaatgcacaactctacactctaaacacaaaatcaaaggagtcactgaaattttctttttcacttttttcttttcgttcttttctttctttcttatttggtgcaccttttttttctttttttttcaactttctatctttttctatttgctttttttccctaattttttaacaggaactaaccaaatatctaaatcaggaaccaaaagttactgtgaggaaaacaatggtctcggccgcctttctggagtagactggcttgcaaaaaaaaaagaaaaatcgaatattaattctatctatgtactgaagctggtgtagatctatctgttttcctagtccttctcatcctaactcccaacacatataagcacggactatgttacatggaaatcgtaacacttgatgccacttcacaaccgaccgaaagaaactcttgcaaactgcaaaaaggggaacccgatgatgatagggttcaattttctagttgcagatgaatgattacgaattcgatgttggggttcttcaaattgactaacagcgaaatagcatgacgacatattaatctaagcaaaatttgactatggctgctactaaatatatatgattagagacgtcctagagttaggcgtttaccccttgggcttagtccacaacacaattataagacccacagacaaatcagacttggactggataagatacgtggcctgttttgcagattcctgacaactcaggaggaattttaatgtgggaacttgaccatctgaaagtagatttaataagctttccaacaagtattcatgggtcccgaaagtccttctggatcaacggctaggtgtgtttgaagttgatattttcgaaggcttgaatcctaatctagaatatgcagaacttaacctcttcccataaatggaccaaaagtgatgtggtggtgaaggagtagacttgaggaaagttttggttttatccccaatcaacttttttgatcatccatgcataccttgctctcggtctgttttccatcacccaagatagtacatctacaacgagaacacaaaaaactcatggtgcagtaaagtttgttcaaatatataacacataaatcttccgtagaaagcatgctccttggattgatgaatacatagggcctcctggaaacatttcaaagcgtaaaccaaacgtccattggttatgcattttgttgtagaagcgtgaagaggataataaatagtaataaatactacaatactccctccgtactcgtaaaggaagtctttttggacaatgtttaagtcaaaccttgggaatataaatcttgaataactctcaagttgttgagtttggaaatgtaaaaattatatgaatatatttttcttgaaaaataatttcataaaagtatacatatatcacttttctataaatatttttatagaaacaagaagtcaaagttgtgttttggagaccatgtcgctgtccaaaacaacttccattacgagtacggagagagcatagctttttgccagccatggatgaagatttggcagcatagtttgcttttgaaaatttcttgtcattcaatcgaatcgtgttggtgttactatgttttatggatgctgatggttgtgatgtaaactttgtaataatttagctttacttttttagattagttggatctatgccattacagatttactggttttgaaaaatactatcaaaattcgttaaaccagctatgtgtcaccgagattttctaaaattcaaacaggccattgaccgccattattgttaagtttcctgtcaccttctcccctaatctcattccatctggatgtgagaccgagtgtgtgtgcatgggggggaggggtggggggggatcgccggtgacgatcagtgtcccatcgttgtcagcgagcttcgaccaactggttctctaattttccaatcatggtttgggcactcaaaatctgaagaacattctttcttttttacttttccgccgttggcttgtgaaaaacattatcttcctttgtatggccttcaattattttatatcataatagaggatgtctcagaaaagtaaactcaaataattgaccattatagttccataatatttcttcaatgtagtagctctcttttctgtactccttgaggtaatggtggtggcagtgaatctattttggcaaaactaattttaaaactattttggcaactgtgaatataatttaagaacaacaaacagcagaaattaaatatccatttaagttcctaaccttttaatacaagtaaaggaactatagcattaaacatatacattaaaagtagaaattaaacttactatcttcacctgactttgaataaaataaaataaaaagctgaatccttgatagattaaccaagtatcaaaagctcgactaatgggaaaaaaggaatcgaatatcactccaaatgaccaatgggagattaattttaccctctaaaatgccatgaaactacctaaatgaaattcccaaagtttgtaaagtatttatctcccaataaatctggaactctcaaataaatgaagcattagaaatgaataagtctttctttggaggaaatatgaaaatatgtatccaaatttgaaggagttaatatcttcaaatccaagttacctgtgtcttctagcatctccatattttttatttagacctttttaataaataatttagaaattaaccattgcaaaacttatttcaatgatctgaacattttggccaacccagcccacctcgccatcccaccagctgctgtggctaaaaaatgttggcatgcaagctaggtaatcgtggcaaccatcgccacacaggaggtcgttccccgctcggagtcaaccacattctgacatggcattgtgcttgaaatgccagcgcaagtggtgtcgcacttcttgttgtcaacggtatttacgttggtaatgttgtggtcataatgtcatatatgtgagggaatgcatttgtagttatatcttttttttctaatttggacgtgtagatcgtgcgtacaatgtctatgtctccttgtgtgtagaagtcgttggtttgcttggatcgattgacaagttatacttattttgcatgtcaatattattttgttgtagatggatcgtgtactgcacgtagggaaaatatgtggtggaaaccatatatgcaatagaaacttgtaaactaccgttggatcgaaaaatg

SEQ ID NO: 20199 - DNA, 29783 bp, Oryza sativa
actcatgatgacatggacgaatctcggacgtccatttttcgatccaacggtagttttcaaattttcaccacatatttgcatgtgcatgtacattagggtggaacaatttgttgtgatggacaatttacaaatatgaaagttgatgtggtagtatttgaggccacacttacatagttaggattattctatcggatttgttctaaatttccttctttagaacccattggtgcgttaagcatggaagggatgtacgatgcaggcatgtgatcaagggagcacttttttttatcatacccatatcacgtgagttggagttgtcgacatatgttgcatgtgttcaagatttgcatgtacgctaagtacatgttgttgcatcaatgtttgggatacttcgtgcaacggtagatccgatttcagtcgattatacaaatattttggaaagacctcaagaatatagatacttcaacacaggtggacccatagtcgaggtagatgaacatgccaatgagggtattgttcaattaagtgagcataataataccccaatttatatggatattaaaaccgttggtcagggtaataggcatgtcaatggaaccaatgttgtactaatcccatgtggcactatgcaccatcggctaggcttgaatcagacctagcccacagtgcactccttctccctcttggcccagctattgtctctgccccactcaccatctttcctagcagtacaacgtacgaccccagcaggagaagaaaggcaggccatccctgcgaccattgcaacctggccgtcaccttctcgcccgctacgccaccagctgcctgccactgccgatgcacgccaagccaggctgcgtgcaggtcaagggatcgatccctcctcccaattcatggaatttgatttttctagaaaatagcatagggcagccggactgctttgaggttttatgtaaaacagggtggtttaaactctttttaccagctcatatgcatccctggtttcttaattggatcagactaaacttaggcctggttctggtttttagctaggttaaaccagtggtccactccggctttaataactactccctccgttccttaatacagggcgtggctgttgtagttgcaaagaccaataaaaccatttaaatagcagttacgatgattaattctctccgttcgaatagcaacgtttcagtagttgcgcgatagatacgctagcattaattaaccaccatgcatgcagcgtgcgctcgacctgcactttccgcgcgaatagccagcatgtatgcagatgcatttaaaagacaaaccaagtcatcagttaattctgcaggcaccagtagtacaggagccgaggaatactaattaattcatgcatgcaccgaggagctaccaccttgtattatgaaatccagttgaaaagaagttacgccctgtatttaggaacggagggagtatgttattacccacttccaggccagtcgagcataaccacaccatgctagaagcaacagttaggctagcgtgttagacttatgggcttccgatttgtttctctgggtgtcatataatccttaatgtcatccttgcatgcataagttggacagcgcatagctgatatatgagtatattctactcttactgaaaagaacgcatatttttttctttcatattttatagtgtctcgatttttttaaccaatttatatttctatgcaaaagcaatcagtattgcaaactcaaataatccggttacaagacgaatctccggcatggctattggttggtgcttgtagacaagctatctgctattatttaaatactttaaaattattgaaaatatcttctattataatatgtgttttatccgggctaatcaaattatgaaactctagtacatatgaattatctcttttggaagttgaatagcttaagtgagaatccgaaaaggatggcaaaaagaattgcaaatgacacaacggccatagcagccacccataacaagtcaagattgtaaccaaagtagctctcaacaaagtcagatacacgcacaccgttatcaaacttgtcatctacatccccaaactgtgaagtaaccaacccattgattgtccatgcaacagggcaaatccaatagtaccatctccaccatattggaattctctgcagataaaaggagccatatttaggaaaactaggagtgaagtttggtagtacttcttaattttttttctagtcttggctttgagataatttggctaggaaccttgtatacattgatatttgagaaaagctagtatacttaactgtttttggtattagaaatccagagaaaaggtgccatatggcatagaaagttgtggaaacaatagaggacatggtgtagtttggagttagacctgccgccatcatgccataaaatgtgaagtatgatagagtgaagtacatgaagaacatgtaccaaaaaaacttggtgcatgtccactcgtatcccatcatagaatacactatcacaccatatatcaaggtttggaggaagatgtaaggaagttcaactacaacctgcaatagaactagatgttaacaaagcttattcatttatcatttctgtccacttaccaagggttttagttttgtagaaattgaacacaatcttgaaacattatatctagcctcatgtgtaaacactatgatgccaaagaaccatacctgccccaaggcatatggcaaaggcgagtacatgtgagatgctctttccctgtaaaagaccgtgcgttcaatattgacaactggttgaactgaagaagagttctgcactcctagagtgaaacatgtggaatacatggaacccatggcactgagcaaggcttgttgactttgcctatgagaaaggaatatttagggtaagcatggtccaatggcaacctttaaaatctgtaaagaaaatcacaaatataaaatatttccttgtgtttattgttatatatatttacctttttctaccaacgccccagaacattgttccaaacaatagtgcaattacaacggtgaagaagaaattcacagcaatatatggaggattcctccaatatgacaaacgttgcttccagaggcaagccaaacattgtataacaaaggtctgtgaatatttagttggaaacaataagtcgcttgaaccgtcatggggtgtgcttaactcctttatcaaatttttgttcctcctgtagggaaaacaaagcactaatatcatcaaacaataacattacctattaaatttttcatatatttgaaacattcattataaaagtgtaaattgcagatcttttgaagcatctgtagtttagcattatgatatcatcacaatatatgattcatgtagggatattttttgcttttgccactaccttgtattgttatttcatttctttactaatattgaaaaaaacttatattattgttttttcagaatatcatatttgtaattttagttgtttccccagcttgttgaaaattgtttagacatgcataaaaggacaccattgtcttctcttttttcaacctatacttaagtaactaatgatagaacaaagtattttctacataccacaaacatggacacatttatcacatataccattatggaaccagacatcttgcacatcacacaaagtttgattttcatctaggttttctgttgctggagcaacgattaaaggtatatagtcagactattaactaaaggatgaccccatccctacctatatagttcagaattcttgtatacttgagtaaagttaaccccagttatctgttcctgcaatgtacaagtcacttccagcatccatgttgaaggattgtagccatgttttatcttcctgacaccttcaatagactttaaaaatgaaagcagttcaatagcatgtttctgagtgcaaaaattcaagcatgtattacattatgcgatttttttctaacctcaaaatatttgatcaattcacatgaatgttgtcctaatggacctacataaattgcttcacctcctcttttcattaggaagagctgtaaatatgaacaataccagaaggaattgagtgggatgcaaataatgttaatccaccagtgatttacttttttcttgtatacccattaaatctgtgtgagaaaatgcactatattgctataattttgttcacctcatcaaatgattcaaatatatcaatactaggttggtggattgtgcaaacaacagttcttcccatgtccacaatattccttactgtcctcatgacaatggctgctgctcgtgcatcaagtccagatgttggttcatccatgaatatgatagatgggtttgcaactagttccactgctattgttagccgtttcctttgttcagttgataatccactcaagccaagcaatccaaccaatgcatcttttaagggaaagagctccacaagctccatgaactcatcaataaatctctacaaaccaagcacacgaaaaaagactagcatgtcatgtcatgatacgtacttatatactacttgacgttcaaaaaagtgtttctttcatgtctaacctttcttgccatagaatcaatttcggctggtaatctaagccatgctgagaacataagggattcatagacagttagatttggtgaatggatatcattttgttcacaatatcctgaaactcgagaaaatgtttcttgcttcttcggatagccagatacagtaatattaccatgtatgtgtccactggtcttcctcccagctaacacatccaacaatgttgtcttgcctgcaccactgatacccataagtgctgtaagcactcctggcctaaatgaaccactaagatccttcagtagttccaaccgactccctgccataccctgtactttcagtgcctacatgttttgttggataaagacaattatatatggagtttgctcataaatgttatgtttataggcgatttatagatagaacatgcatgtcaagaccagacaaaggaatatttgtgtacctttggcatgtctatactgtatcttatatcttcaaatgtcatgtaaacgggtacaaaaggcaggatacttcctttcctggctggactagaattatgatttgcattgcttgaagttgcttcatcattgttgccaccctcagtgtctagtagacataacacagaagaaagttatataatttattaaattaaatctcattgtgatatatagtattttatattggtgaatataaaattacatcttttatcattggtaactcggcctccagatgatggctcttgatcataaccggttaaattttctagttttatctgcaatgtttcctgagacatttctcgcacatttcttttaagtactgcagagaacatggtgcataaatttagaatgtatagcccctttttaaaacaacaatagcttttactaatataagaaattcatttttttctctaactcacatgtgagaattgagaggcagatggtgtagaggatattgaacagaagcacatatccaagcaaggcaccaagaccaatccaataccatttggcctccgggaaaaccccacgagattccagaactaaccttccaagtggttctctaaaaccaggtagtgcctgataacaaaatgtttttaatggacatattatgatatatggatttcgattgattccataagtttttttttacctcattccagctgggacttaggaattcatttactgctaaggcatttagtgcatacatcaggggtgatgtccagtactcccatatcagccattttttaacttcatctgttaaatcaaacaaacatatcatacaatatgtatacaagtaccaacacatgtggaaataatatcagaagtaatgccaatatcatgtcgtgttttgtcagatagtttgtgtacctcttgataggatgaatccgcttgaaaccataactattagtatacagaattcactcacggtgcttgcaacaactggatgccttgtaagagcagcaatgaaacggaaaagtccacatattgcctcggacattacaaaaagcacaaggaattgtctaaaacatctacaagattgcattgttttcattaatctttgcaatatattcattacaagaatttgtccgatgtattgaattttgtttttcttacctctctatatttggatcaaatccaataacatagtatgttatggagacccaaattattgtattaaggaaggagattggagtcttaatgatccatgatggcaaggaatatgtccatgctggatagaagagtagatccctttgcttgaaaaaaactgggagatttgcaagagctgctcccatttctgccaaccctttaaacattattgccaacgtaccaaagaactgcactcccatgtacatcctcccgttttctatcgagtcatgatgcatatttgtatggataaagacactcattgcaattatcgccactagtgttaactgaacaagtcaaagaaataatgtaagagaggccaattagcttcaattgttccaaagaaattgtgggttgttttgctataatataatataaaatgtctcagattgtcagaatcacctgaagtgcattgaatatatatagaaatgattttcttttcaacagcaatatctctctgtcaatgttagctttaagtatttttttcaagttgacaccatgctttgatgttttcagcgctgcaatatggctcttgctgttatcaaatgggattgccaactcacttcttattgcctggccgacatggaaacactgaaatgcctcggcaatcactgtaacaggaatatatcgatatgtgtcatcgccatgtatccagtattgtttctgatctttccttgatgtaacctatcacatttcactcatatttagtaacaattatacactgcaaccaaatttaatcatctgatactaccatgattgaacatagtgagaaaactcacttcttgcaagaagtcagctacacctattctttctaggcatttgaatcccaacgatttaaagaactcaagcacatgatcacgagggccactatagacaacttgaccatctgagaggagaattatatcatcaaataattcatatgtctcgggtgcaggctgtagcaaagcaatgacagctgttccaccaagaacatgaatggtttgttggatggtgttcactatctggaatgttgttgagctatcaagtccatttgatatctcgtccatgaaaagagctcgtcctagtgtgacaagcatctcagctgcagaatcaacattaggggctgtatgagcatccaaacatcttaagtaaatccaattctaaattacctgtagttagtcaccttttttgccctccagatatgcctctcaacatattatcacctacaattgtgtcggcgcatatatccaaccgcaaaatcttcaaatgataaaaaaataaagtaaaagaattattatcgcgtatacatgtgaacttacacatgaatgagaagaaattttcaacagataattttttttaccaggcctataagtagggttctagcagtatccagggacaaagggtggtaatttatttacctcagggaggtagtaagtttttagtggaccaaatggtaggatgaggaagcggaatagaaaaataagaaaagggagggtgctgctctctgagacacgctacatattatgttgttctctgaggggcgttctatagcattgtatataagtagatagtgctcatatacctttagtatgtgatttgtaactatctcagctttctcctctcctgttgtagctgcctgcatatgcaaaatgagacattgatgttcatcaaaccttatactggaacattaatagatggtaaaaacatgaagagattgctcaacatactggataaggtgagttgtgatttaagaactccattgtaccttcaaatatatatcagtttcaggatctggtgtaatgttttcttcctcttctcttctcaatagttctagaaacagatctgaaaattttccataaaatgttagtttttcatatgatatgacactatgataagtttaaactccccatttcctgtcttaccatagtgatggccaactccttgacactttgcagagaaattgattgtctcacgaactgtcagttcagccatatgcagatcatgttggctaacataagctgcggatctttggggtataaatttgtccattgtatgcccattgtaagttatcatccccgataccttttgtaattgcattgtagtatttccttatattagtacggcaagcatactagattatatatactgaagacaaccagtaggccaaccaagtagcatggtaaaaaaattgaaaaacataaatgaaagtacttttacggttgatgggagtgttccagccaaggccaacaacagtgatgtttttccagagccaggagaacctaatagcaaggtcattctgaaaacagcaggataaaagttatatatagcatcgagataatttagacattgtcaattgctgagatgttatgacctgtgaggcttgatgatcccactagcattgtgaaggacagatattttttgcttacttcttgttgtcatgtgaagagtattcgccaggccctgtttagaggtgattgtcaatttttcaccatgtcactacacatggaatatagtaaaataagggagccatatgcagtaaatatttaggctgctgcaaaagtaatgtcatcttctaactaaaaacaatcgactatgcacagattccttgagttagagctacttgaattcggaagtaatggctatgaaccagtatttggtgtggggcgcaattttattcaaattggtatacgctggttctccaacatacagataggtattatttttattagaccttatttaccatctttatacctcttgcttcatttttttttcttttacattcattgcaactgtattatctcttccaccattaaaaaaaattgcacttctctcctttatcattcttcctccagtgcatagttttgcttctccatcacaaaaattctaacatatccaaaaataaatatacgtgtcacatgaattatggcttagctttgccataatccctaggggtggccgatatttatactcgtaggtcctttgagttcctcagcgaccttgctaaataattgaggctaatcagcttgtgcgaaggctcttgtctgactaggagtaagtactcttccttaatcagactctgttaccttgtctgttgcacatggccgtgtcgctaatgtttaggaactgttacaagatatgatacggtatatgtatttttggtatggtatatgtacgccaatacagtataccatatggagtagacgatcaccaccaccaccaccatcatcatcataattaaattcaccatgaaaatgatttggttcttaaatgtttcatgagataatatttaccgtggaattatgtgcatggatattattaaatatttgtggaaaatggtaaccatggtatatttatttttggatatggtagaatattttccttttataaacatctaattttgaaggtacagaggaaacctttcaatctaactgagaattttcctactgttgtatgtgatgtaaatttatagtgaagctatgactataacttctgttctattgtgatacggtattttcgaggttgtattcatgtagttcaacttttgatattttctagtacttcagtggtagcgatgtttttttttaattgtagctctagcatttcaactccatgtcctgaaaaaaaaacatggttgcggaaatggtttgagtatcttttccaatcatgttttatccctacctcctggtacctgcacctactcaaggatggtaaaaagactccttttattaataagatagtaagtttaacaaagtatgtaaataccttcaatatgttggcataggtattgagaatggtgggaaggcccctgctgccaacatatgactctgcttctacattcaggttcttgtacctcacctcaattgtcggcagtttaataccaaccctgtacaaacggaacatctttaaaattgagaaatggaaataagtttctaaatgaaactagcataattgaaaacattgcttttcccttatatttaagcatgcttgataaaataattatacgtgggcacgatatcaaatgaacacaactcaaaccatgcacacatgcacaaactccagtctaaccatccgatccatgatgggcgctcccacctcgcactaacatgaaatattgcaaaaagaaaaaaaccgcagagggaatacattttgcaaacaacctctatccttaggttcatatatcgacattgtcatccacacgaaatatgagcacgtgtggtatatatgatttaaaccttagacctctcactgatccatatatatccttcatgccatctcacctgtgaagcactttgtgactaggatcgatgctatttttgttgacttcacctctcttctaaactagtaacacacatttggcactttaaatgacattaaatgaaaatgtcgccaactacaacattgtaaaccttgttgagctctacaactatgacataaagcatgtctccataaaagttcatttgaaaaactgaaaaacattttttaaatagacctaagatattataataaatatttgtgccgtaaatgatctcaaattaaaaaaaatcaactacaaattttcatataaaatttatcatcatgtgacttcatatgaaaagttacaattttttcatgaaataattattctcccacttttaagggcgattttattaacacatccatctttgaaaatcaactttcacaggcttttccttatgagaaccacctatattgttcttagaagtggttccttaataagtccacatgtgaaaagatatttccttatttgtttgaaattgaccgattgaggtgtacaaatttcattatgatctttaagatattctctttattaaagccaggtccatatttcttcaaaacatttcttttaatattaatgaatgaccctactaaagaaaatatgaaccagctagttatattaaaagtgtcgacgggtttggtttgtttggaggatgtaggcatcggttggtatgaggatgccaaccaagttgtaaagtgagtaaggagatagtgatttttatacaggtttgggtccccctactgacgggtaatagcactactcctattgaccggagccgatgttgcctttatatatcaatctctcgtgaatacaacacgaagaaaaacctaatataatctaccaatatatgtgtgtgaagctcgttcatgtggtcgatggctagctattatcggttttcttgggaagtaactttttgagattggaggtggcttgtattgatttgtacctctcacgggttgtcttggctttgaaggcttgtgctggcctcgtttcatgtccccctcatgagaccttgtatttataccctcaggtgtcctcttgtctaagtaaaactaaagaggcaagtttagatacgatccatgttacttcgagggcccaaataggactcaattcttttttttcttttttgagattcctttcttattaactcaggacttttgccatacgtacgagccttgattccataggaagacttggtatcatgacttggtatataggtgtcgccaatcttggtacacaagtatatggtatctcatatttcgaatactaacagaaatgtaaaattataatgttctcacaaaactttggttcacctcaatcaaatttcaaataaatcatcaatgtttggacatcgtaaaaaactcactagtaaaagtagatattagagcttgtaacgaatatttagacacttaaacaatctcatatgtacaaagttgtaaataccgttgtcctctacaatgttgttatagattgcatatctccattcaaggttgtttggaaaactcaaaaaatgaagcttttaataaatatctggggcctaaatgatctcaaaagaaaaaccagttgaaagttgtagatagcattgatagccaatataaaatattatgtaatccaacttgatatgaaaaagttacaagatcttttttaaaaatagtattgctctcatttttcaccaagtttaattttgacttctacaagattctgcattgccggtaaaaatcaccccacttccaattaaaaaaaaagacctgtatatacagttttcttaaagacttgaaaattgcttcttatcgagcgcccaatccggcgctgagagattgggcggccatatactcagcgcccatatgcaacactacaagaagccctccactgcgtggagttgtgctcctcctcttatctactctatttttaacatttgaaacgatctttcttctaaactgctcatgcgatctagttccaattgcaccatcgtatttcttacaattaaatctttaaaacaaaatatcacatgattatattctaataaaaaattatatatgtttcatccattgaaatttaatgtttcacgcgtgatagttggatgttttagctggaacccgactctgttgcacatttcttagttctcaatgttgcaacgtgtatttttctaatgttacacttggtgttgttacaatgtttgagtaaatattgtttgatatttcattagttctttgcaaacgtaacgtcctatttattagatgtttcagcaaaactgaattttgtttcaccgcttatagaaaattgttttagttcagcgtataaaatgtttcaaagaaatgcaacattaataaaatattggctgcaacacaagcaaccacttatatgaagtattgagtcccaaggagtgaaacattaaaaaaatataaaagatccatatttgcaaaagcttgacattgttgaaacatttttatgtcatgtgtgaaatgtatttgttcaaacattataaaatactgatggaaacattaaaaaaacatcatgtgcaatatttgaggtcattgagacatttaaataaaaacaagtgcaacattttaaaaatccattaaaaaagctaaatagtttttaacgaaatataatcaggtgcggtcttattctaaagatttaattgcaactaatttaatggtgcaatcaaatcataaattggatgattattttatgagaaaaaatattttgaagtttgaaatattttgctaatatatctcttgggcagtgtgcagatctaccaccctagtacactataagagatatgaccttctgtgactaactccttgtgacattggagctattcgccataatttcattttgatttatgacgttcagctatgggtagcgtgactttgtgacaaaaatgaggttttcgtcatcgagaccaaggacaaatcgttataaactagccaaacagtgtatcgtgacgaatgttgttttgtcataagaggctaaccagcaaacgtcataagttaatgacaatgtttgtttgtcataaacatatttttattaattttttaaaagcaaggatatttgaggcgccacttatttggcccaaccattatattatgaagtgaatgccaataatatgaagttttttttcccggatactattgtctgaaagtggacattcaactcatgtcacacactaaaatttatttaatttaatatttcattaataattattacatttgattttagaatcaggaataataattattgacaagggcaataatttaacaagtgaagttgatatgggaaataaaattttacctagtaaactatgacttggaagttttaataatttatccataattaattatgctctcttaaattttcttgaaatgttcggagctaaagaattatttttaataatactaacatcatttccgtcattatttaaattgaaaaaaaacatttaaagccatcttcctatatttgggccaaaagcagcccagttcctacccatcactgcgcaggcttatagcccagccagggaaagtctatctcgtatccctcctttctcccctaaacgtaagccgatgagtctattttacatcattcaaccaaagttcagttttagtcacttcgccagagtaggaagcagcagcccacactgccagccgcagccctgctaagtctaatcagcctctctcccctctacttctaaatttgtaatgcttatttggttctctaaatgatcttaaatgaaaaaaaatgatcaagtaaaaagttgtagatctagccgatctctattacttttatatagatcacatcttcatctaaggtcggttgaaacatagatctgatattttgtaataagtctaagatgttataataaatatttgggcctctaaacattctcaaatgaaaacaatgtcaactataaacttttagatctcgtcaaaaacctacaattttgatataaagttcatattcatccgactttatatgaaaaagttactccctccatttcaggctataagacattttgactttggtcaaaatcaaactacttcaaatttgactaagtttatagacaaatatagtgatatttataatactaaattagtttcattaaatcaataatcaaatatattttcataataaatttgtcttgggttgaaaatattttttttctacaaacatagttaaacttgaagcagtttgactttgatcaaagtcaaaacatcttataacctgaaacggagtgagtaggtgcatatatatttttttttcaaaattttattgtgatgagacaaattgggatgaaaatgcaaatgaatataatataattgggctgaaaataatttgtaaattgctatgccttaaatgggcttggtctaaatctaactaggtttataattgggcttggctcataaataggttgcttactataaggccttcgatagtctatgatgtattttatgacgttttctaggtttgataatgacgaaaatgaacgtcataaacttaatgacgaaagaaggatcaacactagatcaatgacgaaaaaagtaagttttcatcatagaacatgattagagacgcatgataggtgacgaacgaattttcgacgtgattgtcacaaatttttaaacgtgaaaaattttgcagtttgtatgacgtaaatgaaacgtcacctatcataagatctcttatagtggtagccaccctagtagctactccctccgtcccataaaaaccaacctagtactataaatctggagatacctctatccgaatttactgtactataatgtgtcacatccagtactagattcaatttttttttggagagagggagtacaccctagcagcctagctgcatgtagaaaagtcgctagaaaacatgcaaagtgccttcgattgtgcatacagagtcgatcggacggcatagacggcgcctaatttatctctccaattgggcccctgacgggaagttgcttcataaaggcttgccttaaaaaagataattacccttggtggttcccttggaaaaccgtttgtgcaaatatatagatttccagaggtggttttctaagtacaaataagttttcacatatggtctatgaacttaaaagcgacctccgccatctttctagctggtttttcttttaggccacatgtgaaaagaaaaagtctcgtgcgttgcgaaaatcattttttaagtagtgcaggtcctccactacgagtctactccttgctgcatatagtttgtgaaggcgatggggatcagagctttgctgctttaagatttccacatgacagatgcggtgcaaattaaccaagtaaacaaacagtccactataagatcggctaattttattgtggtattcataattaattgaaggcgaattaatttcatttcaacaagttgggattgcatgtgccctacgtaccgatcgaaacgttccttgaacttgtagaggaagcggaggtagtcgtcgtcgccgacgacgtcaccgcctactggtcgccgcagctcggtgccctccggcatggccggcgccggcagcgccgccatccggcgggctgatcggccgtaggtgagcaggtcatcatcgtcgtcgtcgaccctcccagtggacggcgaccgcgagaacgcagccgccgacgccgatccctcctctcgctgccggtcgaccgcgtagatctcgccggcgtcgacgtcgtcgtccatcccgccgatcgacgtaggccctgcctcgctctccaataaggctcgatctagctagttcatgaccacgggaggaaaggaatgggctctttatatagcgcgcatatctcgaagcaaaaagcgctacgtgtagggaaaaaaaaaattctactcccttcgttttaggttataagacgtctattttaagttttaactaagtttatagacaaatatagtaatatttataatactaaattagtttcattaaataaataattaaatatattttcataataaatttatcttggattaaaaatgttactatttttttattaacttggtcaaatttaaagcagtttgactttaaccaaagtcaaatacgttttgtaatctgaaatttatttagcatgtgcagatatattcctatcaatcactacttagcacgcacgtcggagtgaaagctgttgtagtgaaaaaaaaattgaagagcacgttggtagcaaattaaatacatatatattatatataaaaaaaagatagtcgcgattgtacttaaggaaatcataattaagcattaattattttattgaaaactataaccgtgtttgtttatgattttctttgatataaaaaaagaacacatggttatcgatttgttttatttatcaaagagtgcagatactacaattatatgcttattacaaatagaagatcagaacaggatagcaagtagcagttaacgctatacgttggagttgtcgtacgtaataataataaatagcgggaattgaactagttaggaaatcaccataattctttaataggaaatctcatcgtggatattattttttttcgactgtcacgctggtaaaaaaacctattttttattataagaaatgtatgggcgccggttaagttaatcatcactcatttcttgcgcttataccccaataattaaataattaaatacagttgtatatgcctttgtttgatgtgtgtacaacaccaaagtatactatatgtagatacactagaagtgccaaaacaatgaaatttctacaactactcctttaaacagaaaaacatcgtggaagcatcaatatataaattaaggttataatacaacaattgactgacacgtatgaaatatgcctaagaaaggtagataatcaattgtcagcacatatagtatttaattaacacactatgacatgataaactaaggttatcaccatataacaacatttattaacccagtgagatgctgacgtgcaagctactcccatccattcacgcaaacatggcttaacaagtaactgaaaagactataaggggccggtaagaatgaatctcatcaatgaaagtagattcgtgttctcttaggttataaagagatggacatcctcgttagtgcaaactttgatcgtataacttccatagcaatatgcaatatgtgcatatgcaatggcaatcaggggcggatctacccattaagcagggtgggtcgatcgtcccagctacgacccgtgtcaccccacacccccaagaccctccctacctccttataatagttataggccatcaaaattaggtatatcaaggtgtgaacatccaatagattagtctgtctcttcacaacgcatgcacaccacaaacaatgatcgagacaattatacgattgaattataaatatgatatgtgttgtgttcgattgcttatcgagtaaacatcttcattctccgccccatctatattttaaaactgcgtccaccacagatggcaatgcaatgatatgtattcacaaaatacatcatattaggccaaaatacgaagttgtaccattatggtcacaaggttcacgatttaactccaaatataattcaaaagtgatgcaatataggatgaattccagcgtaataatattataaccacatacctatataagccaagtataaagttactcttgccaagggcataaaccatagtgtaataacaataaaacaatgattaaggtaagtaacatctcaatttatcacacaatattatcgtgattactgatatagaatttcaaagtgatggtgggaaaaaataacaagttaaaattgtagcaaacaacgccatgtttacttgccttcactatcgatgagacaaactctagttgcgtcctgaagttgaaccacccgaataaacatcggttcagcctcacatgatacacaaataatatttaggtgtcatgcattcacttgcaaagaacacaaaagaaataatcaacaatctgcctatagaagcaatgtagcttaacaattttatttctccaattataaaccacgtaacatatcaaaatatagcatttatgacatttacataacaaaaagtttcaggtacacatggattgatcaagcataactgacaataatcagttccaaaattaaatttattgccgtcctaatattgaaaatctagccatgtagggttttcctacttatttttcttggctactttggacctctttggatctgcattctgctttcgaattatagctctgcccactcttgttgctgtgttcagtggaggatgcacttcttcactcctattggtggcaatgaaagatgactcaagcaatgttccaggaaatgtcgtagcttgctgttgactgatgccctattgcagataaattgataaagagtttgtgcaatttaggttcggtaagaattgtttacaacacaagtgataatgatttacctctctaataaatgcatcaattacaggagagctcctttgagtgcttgtgccaaggaagcatataggatcagtcaaaagctgtcgtatcatttgcacaagttaattgttcagttgcatagttagtgtaaaatgataatctcttgtacctgagtgatgacaggttcatcaacctcttcaacttctgttgtggattagtaataatctatccccaaaaattgatttttgggttttctaaattgaaaataagaagtgaaaaactcctccctccaagagatagcctaatttcaatcccaaaaactaaatgtgggcccttccattaaactaccaacaaaaatttccgttctttttccttccacgcgtgcatcgacctaccaacagaaatttccccgctcatgcgggaaggagaggggaagcgggagagcagaaacgcacgaattagagaatgggagtcgctctctcgccgttaaatccacagaacgaaatatatggggatgagaactccaaaactagtagagggattttgaggatatgttggatctgattttttcactaaaaaaccctcaaaatcagttttgggaaggaaataggatgactattggtgatgctcttataaacctaacatttacctacggtacatctaagaaaaatcctacagtcagaaaagtttaggtgatccactgtattatactccatccattttacactataacacattttaactcatcagatcaaactttcttcggtgttaactattttattaaaaaaatagcaatatctataatatcaaattagtttcattacatctaaaattgcatatagtttgatactatatatattgtgttacagtttgatataaacttggtgaaagtttaaaaaatatatattaataaaagtcaaagcattttattttatacaatataaaatgaagagagtatatttcaccaatggtataagcgtccgattggctaatgtaagctgtaactgatgcggtgcaggaaactaatggttttagagggaagctagtgcatggaatcccatggtattatggaagtcacgggataattaaaacacccaaaaggtttaatctgtcccccacgctgtccacgcgatttcccctcctcccctgccgcttccgaacacgaaacctgagcagtacgccatcaacagcaaaacaaacggcacaccgccgtacgcaatacctcgccggcggcgctcacagccgcatcaactactcagagcaggagtgcgccatcgacagcaaggaactggcgcgcctccacatgcgataccttgccagtggtgcggaacgccaccgcatcaactactatgagcaagattcgccgtcgacagcaaggaaccagctcggtatcgcgcaccgccgcaacaactacaccaagcaggagtgtgctgtcagcagcagcagggggtcgagccaaggaaaggaagaagaggagacaaaatgttggtacttgatacttgatacttcgtaagtatcgaccctggtacctaaggtatcaggtctcatacctaagcttgatacctatcgtaccagccatgatatccgcaggtaccaggtctaatacctaggtatcagccatgataccaaaggtactaaacatggtacctacaggtattgattgcggctgatgcattgcatgacatacctgcacacactccaacgaggagcatgatagctcaccaagacatcgtagctctgtgtgacctgcctgggagaagggtgcggtcgccgcgtccacctcctgcttgggcttcaaggcagtggtgatggcggcgccatagtacgaggcgctctacgccagtgcaccgctggcgaacaactcggcggcgtcggcccggccaccaaaggagaggatggtcggcgggggagacctgctctgtgatgcacgagtcccagctggtgttgacctccgccaccttccacggccggtgctcccctgctgccgtgtgctggcgtgctgctgcagcagcaccatagttgccgctacgtccacctcgctggcctgcccaaacacgaaggcgatgacgaaggcttggatagagaaaagaaagggaagggataagatcgaacgttatccactcattttaatttatcttgtactgacggaataccgttccacagtttttctgatggttttaatatagaaagaatctattctatgtcatagtttgctttagttcagtaatttatcgtcgacttagtcatataccactgattttatcaattgattgatcgacatattaaaggttttgaaaaaatataaaattctttgtgtagccgcccagctgaacaaggaagtttgtgtatatatttcaagatttttcaatttgcatttatttttattattaaaatattatttatcttttatatgctaatagattacttttctgttgatattcttttatgtaaatcatttttcatatgctacaaaaaagtatatttttagcattttagatatttttaaaaagtatacaagcccaatgacatgttgttcaaacaattgataatgtcaatagatatgagggggggggggggaattaatgtcaaaattttaaacttgagtaaatccagagacatagaatagattatatctttaatatatcacttggtaataagttgcataaatggctaattgctatatctttttctttctaagaagatgtagagcaagttgaaaatcacaattggaagttattttacaatcaacataaagtggctactttgttgaaactcacgatagggttatttatcacctttttaaaaaaaagaatatgcgggtgtacatttgttctatttaattagaagagagtgctgacatactccaattacatatatgcttctaacaaaatgaagatcacaagtagagatagcaaacatcactggtaggatggagttgccgtaacaaaaaaaaaaaaacaatagcaggaattgtaccataaggcaatcatcataaagtttttttttatttttttaatgactcgtaccagacagtgtaaaattcatattgatagagcaggaaaaaaattacaagattacaactttgggaggtcataaccacgaaaaagaaaaaatggccaccacccacacactgatagcaccatcacacagaccgagaaggctagcaccaaaccgatcaccgctagaccaacaaatacgctacaactgggatcgcccaaagaccaccctagcaaccaatacaaaactacactctatccacatcttttttttaattgaaatctcaatggtgattatttctgattttttaaaaaatatagctgtagactatgtgttactattcatttccgattatgtttacccgaatcattattaaatacagttgttttcttaaactctgtacgtgcccttgttacatactccctccgtactcgtaaaggaagtcgtttaggacaatgtttaagtgaaaccttggaaaaataaatcattaataactcttaagttgttaagtttgaaaatataaaaattatattaatagatttgtcttgaaaaatactttcataaaagtatacatatatcacttttcaataaatatttttatagaaacaaaaggtcaaagttgtgttttgaagactgtgtcgttgtcaaaaacgacttcgtttacgagtacgagggagtatgcctaaaaagtgaggaaaatccttctgatctcagttaccaagaagaaatatctttctgttacaaattatttagagtctatcatgatgtgaaatcctcttgatccccaaataattaataattatctaaggcaccttttgcagcccaagaattttactggatatctttaggatttagtttaattgaacaacatgctcaaagtccaacggcctagttggtcagtctagttggtacatgctttttttttatttggaaattaactcatggtccacgtgcatgttgctacgtcttcccttcattaaatgcacattatagttttgttgcaaattcaaactgcaaacgatgtagtagaactttgtatttattaactgtaaagttcaaaatattattatattaaatttagatggcttaaacctaattgggcattgccaagaaaagatctgcccgttgattggttggaatatgttacaagaatgtatattgaaaataaaacatatcatcgtaaatatgctgtgctttttagtttttatttggtatcccactgagctaaaaatgccattggaattacatggaatatttagttttatttttttcttataatttcataattctagcaatacccattttatatatagatggctgagatgcagctaggtttactgtagttgcacttaacctgccattttcatgtaccgaattttggtcagttttttggatgacataacggtggttgacgtggctacgcgcgtgttctcattgtgcaacaaggtacacactatgacaattgtgtgaagcatagcgtatgtcgtctctcccggcacggcagggtgacgaaaaccctgcagggtatagttaccaaagtctcgtcacgtcgctgtatcaagagaaactctgatcagaattagagcatcagcctacaaactgatctcctcactggtctgaatttttcctttctactactttcaagacgtcctgtgcgcagagatcggtgtgcggaggtcaagtaaccacagtaggatacagtattttttttttctcaatccacccacctatctaattcctactccctccggttccatattaattaacgttttagagaaagttgaggtcaaacttttataactttgactatcaataactttaaaaatatttagtttaaaggaactagaacaacatatatagatttgtcttttaaagcgctataataaaagtaaacatgcatttatttattatatatattatagtagaaaaataaggtcaaagatatatcttgtagaccgtgttattatctaaaacgtcaattaaaatgaaatcggaggaagtaattatatggggtttagctcagtcaatccctaattaaatgggcacaacctgtttttcatactcaatccacctaccagccaatcaccagttacatgggcctgacctattgtaaagcacaggcatattactatatctttcataagggtcatccttctcctgccacacttatagttcccattcccttataaaaaaaaaccgtatgaaaattcacccaactcatgttttcgtttgaaaatcaatccgaaagacctcatacaaaaactaagccctataatttagttcctttgtaacgcatggatatggtactagtattcagaaataaccagtgtcctagttctcaatccatgcatccacctaactaattcccaattatatgggtttgtgctactaaacggaaaaaacgcccatatgccctagttctcctagcttatataacttatcttataaaaattttctttttatataagctacctggctattttttttgaaaatgggtaaaatgcacctagattctcgacccgcgatatctaattacctaaagttgacggttatgccaccagctgattggtcaatctaatgctcctcagctttgtgtgttccatatataactacctagcattctccgatttatttcgaattttctagttttttgtaatttttttgcggtctctgcagttgaagtgtggcttgatgtttgttctttatactatcgacactggtttcgtctttgtttgatgataggtaatggatgttccgatcagcactctcggtcccagcgagtttgctgattgaaggttcgattagttgggaccagaagtttcgattgaagtttaatttctttactaatgtttttcatgaacacctattctctctctttggctagacagcatcaagatcctttcaaactatattacagaagtacgtcacatataattaattgcaaagtacacaatatcattaactattcagtaatatttctgttacgcgcgttaatattgcttcataatggtcatatccctacgacttttaaaggaaatcgcattggtgcaaggaaaataagttccgcaaaccgatatatgttcacagctctcctcctcctctctcctcatccttctctttcttttctgttcatggatttttgaggaatttaaatgaattttggtggggagaaaggggtttaagggtggggtggataaaccgccctccccgctggtggcaactgctccttctacgggtgcactttttttttaatgtcttcaatatggctccatgggagaatgcactaaatataagacaacgtgactttatggttttagctcctgtacatatcaaaagtcaatatttaagaaaaaaatactcttaaaatacgaatattttccgctagacacacacccattagaatattcatttcttacttaaatatgagaaagaaacagtatgaaaagtcataaataatcgtggtcccatatgtcgattctcccatctatttttttcgctttctccatgcaagttgcggcagcatagggacagagcaagggaggagttatactgctatccgaaactctgcctccttgagctctgccacaccaaactccagactgctaactccaacttctaactccaaactcctacttcagtgggagctaattcctaatggagttggagactcgttgagaagtgtttggctagttttcagctctagatctgaaaaaaaattgaaaaaacaattaaattgaaaaaaaaattgaaagaaaaaaagaaacctagtcgccggcagcccaatcacatggcgccgcccgccgccgccaatgcgttgtggccgcgcgcgccgcccactgcctgccggccttcgcccgctagctcactgcccgccgctcgcgcgtcgtcccgccgacctgctgtggtcgtgtgcctgccgccgccgcctgctagctcgcctcccgccgccgcgcgtcgtcttgccactgccaacaccgcgggacagccccgaccagagcgccgccgccgcgccctccaccgcgacaaccgacgccatcgccccgatccctctcactcctccgctgtcgtggccgaagctacctgccgccgctgctgccgcccaccgccgcagctattggactcgggaggaagatgggggaggagagagaacgggaggagaggatgtgggtagggatagttcagtggcatttttacataattacactaaaaaattaaagggtaatgggtcttttggggtggagtggagcagcaaaaacctagctccacccccgtagtacaattttgtggagcagttctgctaactctgctccaaaaaacggaggatctagactgtttggcacaactccggctccaggtaagttgggaactggagctgtaccaaacggggcattatatgccgatctccggatccacatctaaagtctccccatgcgattcaatgtacacttcctctgccactgcatctcgtgctcactggcccgtttgcgccagccctctcatcaacaccgtgcgagtcgctcatcaatcacgtcattcgcccacacacccaagccagcagtggctcctggtagcatcaagcatgcatgcctcctcgaggtcttcttccaacaccacgttgtcaagtgagcctggctcatcggttaccctttctcaccgactgtactacacagttctcaattcgctgctatacgtgcttgagataatatgtgatagatatatggggccaagggcatttctgacccttttgctatttaattggtagtgaatattatagtagttatggtgtcaaatagcatatattcacattttgggaatatcttccctatagatcaaattttgctatatccagaagctaaatcttgtattaacggtgttgtacggaaaattcgcccaaaagaagaactcctggaggacgggagtgtatattctgtaaactttcaaaagaaatatttttataaataaaaacatatgcgtatacataaataaaaaaaaaactcatcataagaaaatgagaatgggctatgggctccagtttctagtgggcttgctggttgcccaaatggcccaagaactggcctgtgttggtccaggccgtcgtgcacagcctctctccaccggcgagaggcggcggcggcggcggcggcgtgcacagcctctccctcgagccgctccggggcttcatggcgccatggcctcctgcccacgagtaagccacactcccccccctccccccaccctgttgattgactgccgcatctgcttcccctacaagcttttgcttgattattcgcggtcattattgcgcttcgcaaccaaatcgaatgcgccattggagaggaatcagtggccgctgcctaccccaaagttcagtaggttcgtatgggtagtttcatgggctcccgattcgtttctcaaagggatgtgagttttagggattcgactaagagtctaggaggatgtggagcgcgatatatatattttcagtttctcaaggggggcagccagtgcaaaaaactcaatgaaacaacttgttaatctgagtaccatgaattccaggatacacaatgtgctttaagatgtacaattatggtgatacaaatgtgctttcaagctgtacaattacgatgtgctagtattcacatgctatacacaactcgggtatgccttcctcaatttatctcttctggaagttgaatatcttgattgagagcccgaaaaggaaggcgaagaggacggcaaatgagaccaccatcacggcaaccacccacaagaagtcacgatggtaaccaaagtagctctcgacaaagtcagatatacggacaccattatcaaacgtgtcagttacatccccgaactgtgaagttaccaacccgtagagtgtccacgcaacagggcagacccaatagtaccatctccaccatattggaattcgctgccaataaaaaaataggctgtattagaaaaggcagatgctccataagtgaaattactataagacatttgtgaaatattagtatacttacagttcttggtattataaatcctgagaaaaggttccatatggcatagaatgcagtggaaacaacagaggccacgttatagcttggagtcagacccaccgacatcatgccataaaatgtgtagtatgataaagtgaaatacatgaaaaacaggtaccaaaagaacttggcagctgtccactcaaatccaatcattgcatacactagaacaccatatattaaggactgaacaaggatgtatggaagttcaattgcaacctgcggacagaattgtatgttagcagcacatagtgtttcttttaccattttcttccaattacttcgggagttgttcaaccattgtgttatatcctggttaaaatattttatataacccttttagaagcctcatatgtacaagcttccatttgattttgatgctttacatgttaattgagctgctcttttttccccttcaaataataatcttctctttcctatcatacaaatatcaatgctattgtataataaagttaatgtaaaataactttacctgtcccaaggcgtatggcaaaggtgaatacatgtgagctgctcgttccctgtagaacacagtgcgttcaacagacacaactggctgaacggaagaagaattctgcactcccataaataaaactgacgcatacatggagcccatggcattgaacaagtcctgttgattgctcctgcaagagtggagtatcctcagtgaattgtgacagatataatctcaaggtagcctctctaaatcagtggaaaatgttgcatatacatttttacttgtttttattgaccgtatacctttttctgccaacaccccagaacattgttccaaacaacagtgcaattacaatggtgtagaagtatttgacagcagtatatggagggtttctccagtaggacagactttgcttccataggcaagccaaacattgtgtgatgaaagtttgagagtattctgttggaaaggataggtcacttgaaccatcaggaggtgagcttagctcctttatcatacttttattcctcctgtaatgcaaaagagactataatattattgaactgttaacattgactcgtttagatgcttttgaacataaattgctacagtaataatcatgttacacatatagtggcagtttgaagcatttgtgatgggccattcatgatttgagcttcatttatagtccatatttttttcacaaacaggctcatcttttccatttagtgacttaccctcttgaaaatagttaagacacactgaacatgatactgatcgttgctgccttaattttccaatataaaattgcggagcttaaaatttgcatggtctatagtcaaaattatcaaccatatggcaaccaggtacttacctgtacagttcagaattcttgtatatttcactgaagttaaccccagttatctgttcctgtacagtactagtcacttccagcatccatgttgatggattgtagccatgttttattttgctgacaccttcaatagactttagaaaatgaaagcagctcaattacatgtttttagagcaaaaagtcaaattgatggtaacatatataatttttttacctcaaaatatctgatcaattcacacgagtgctgacctactggacctacataaatctcctcacctcctcgtttcatcaggaatagctgcaaagatagtataagtatgtattgaaagagtgcatcttaaatccatgtgacaaaagaagtgggtatgatttctatcacctcatcaaaagattcaaatatgtcaatgcttggttggtgaattgtgcaaacaactgttcttcctgtgtccacagtatttcttattgccctcatgacaatggctgctgc

SEQ ID NO: 20200 - DNA, 23327 bp, Oryza sativa
  unsure (1)..(23327): unsure at all n locations
gatgtcattctgctcacagtatcctgatacacgagcaaaagtttcttgcttctttggatagccagagatggtaatgttaccctctatgtatccactggtcttcctcccaccaacacatccatcaatgttgtttttccagcaccactgacacccataagagctgtaagtactcctggcctaaatgaaccactgatgcccttcaatagctccaaccggctctctgtcacaccttgtgctttaattacctacaagtttcattggatattaaagccagttagagttgctcttaagtattatagatataggagaatcttcatactgagcatgcacatttcagatatatttatatttcagtaattctctaccaaatacctctggcatgtcaacactgtatcttatatcttcaaacgtgatggagagaggtacaaaagggagaaccattcctttcttgcctggactagaattcactgttgcatggttggaaattgcttcatcattactatcatccgcagtgtctggtaggcatatcacatatccgaggttgttgttagatggaaactcattatgttaaatcatatttagacagctaaatacaaaagcgaacagtacttgtgttggtggtaattcgtcctctcgaggatgcttctataacatcaccggtcagattagcttgttttatcttcaacgtctcctcagatattgttggctgattgctgtcaaatgctgcagtgaaagaatgcataaaaatgagaaattataaaaatgagaatttataagctctggcattccaaatataatttatttctgactcacgattgaggaatgtgaggcagattgtgtagaggatattgaatagcaggacgtatccgagcaatgcaccaacaccaatccaataccatttggcctcagggaaaactccacgggattcaagaactagttttccaagtggctccctgaaaccaggtattgtctgcagtacagcaagaacagaacactttagccagacattcatataatggctgttaatcgatttccatgagtattttttttaccttgttccagctgtgacctagaaattcgtttactgatatggcattttgtgcatacatcaggggtgatatccagtatccccatatccaccatttcttcacgttctctgttcaatcaaatcagcgtccattcattatttttttgatgtggaaattatagaggaacataagcaatctgattgaagaatatagataatttctgccttacctcttgacaggataaatcctcccaaaagcataaaaatgagtatacagaatgaacccatagtgcttgcaacaacctgatgccttgcaaacccagcaatgaagcgaaacagtccagatgatgtctcattcattactaaaagcagcaggaactgtctaaaaagcctgaagcattgaattatttcattagtttctgcaatacattcataccnnnncncaatgcaatgtggaattttgttttctttacctctctacattgggatcaaatccaatgacataatatgttatgaagacccatattgttacattgagcaaggagagtggagtcttaatgatccatgatggtaaggagtatgtccatgctggatagaagaggagatccctttgcttgaagaaaacagggagttttgcaatagttagaccaacttctgccaatccgttgaacatgatcatcaggatcccaaagaagagtgcgcccatgtatattcccccatttgttattgagtcatgatgcatattggtgcggataaagacagtcatcgcaatgaatgtcatgagtgttaactgaataagagagaaacaacacaaattaaatttgttatcggcttccatgttttttcttaatagaaacctgtattgaaaagtttcggtttcaagaataacctgagttgccttgaatatatacacaaaggagttccttttcatgagcaatatctctctgtcaatgttcgctttaagcagttctttcatgctagcaccatattttgatgttttcagggcagcagggtggctcctgctcttgtcaaatgggattgccaactcacttcttattgcctgaccaacatggaaagactgaaatgcctctgcaaactccttaacaggaacatatcggtatgtctcatcaccatgcatccagtattgccgctgatctttccttgaagtaacctataacatatcatttatattaattcaaactcaaaagttgcactaaattatgattgtagcatttaaaaattctctagaaagttttctacattgtcctcttcttttaatttctattttttcttaagcgagaaagcccagtgtaagaaatattttcaagtccagtataagaaatattttcaagtaatgctacttctatatccatttcatttgaaacaatattatatttgcatagtttactttgtcatatatgtccagtcttgttctgtaacaagatactgcattttttccatgagatgtgtcactagaaaaaagcttgataaaacatgttgagagaactcaattactcacttcctgcaagaagtctgctacgccttttctctcaggacatttgaagccaactgattcaaagaattctagcacatgttcacgaggaccattgtagacgacctgaccgtctgagaggaggattatatcatcaaacaattcatatgtctctggtgcaggttgtaacaaagcaatgactgctgttccaccaacaatgtggatggtctgccggatggagtccacaatattgtatgttgtggagctgtcaagtccagttgatatctcatccatgaaaagggctcgtcctggggtgacaatcatctcagctgcaacaccaatttcagggtccgggtaagcagtgaaccttgtatgtctgcaatatgtaagcatctagtactttatttgtaccaaagatacattacctgtggttactctctttttctgcccccctgatatgcctctcaacatattgttgcctacgattgtgtcagcgcaaatatccaatcccaagaccttcaatagttgaataaaaacaagaattgaagaattagtatcataaacacctttcattttgtataccccctgagaacatgggagaaacatttgttgccattgaagtttgaatggtgatagctaacgtaaattatattagaactgtatataagtagttattgttcatgcacctttagtatgtgatttgtgacacctcggctttctgctctcctgttgcagcagcctacacaagccaaataggaagttcatatgaatgaagctattctctgaaacaattgtagatgacaaaaactaaaaatcaacaaaatggaacaacttgtgaattaaatgaattgtgatataagaactgcattgaaccttcaagtatatatctacttctggatctggtttaatattttcttccttttctctccttgatagttccattagcagatctgagcattttttcagaaaattgttagctattccatgtgacatgccattgtccagattttttttttcatttttctgtttcttaccgtaacggtggccaattccttgacattttgcagagaaattgactgtctcacgaaccgtcaattcacccatatgtagatcatgttgactaacataagctgctgatctccggggctcgaattcatccatggtatggccattgtatgttatttgtccagataccttgtgcggttgcaatgttacatttatactagtacttccaagggtatgataaactgacaaagcaatgtactcaagtaaataaaaagaataattgagtacctttagacctgaagggacatttccagccaaggccaaaagaagtgtggtttttccagcgccaggaggacccaaaagcaaggtcattctgaaaacagaggtataagttaacatactgaacaaaatgaatattatctggaaactggcaatatgctgggaagttacctgtgaggcttgattatcccactgacattgtgaaggatcgatattttctgcttcctatttggtgttatgtgaagagtgtttgccagaccctgtttgtatggaggtgattaacaccttgtcagtgcacatgcgtggacagtacaagaagggagtctgatgtcatctggtagatgaatgcaaacaaaaagtgtactgtacattcatgttttacattcacagttccttctgttaaactaaaaataaatttaatttaacttgatatccttgtttatgtgttatttacatccttgctgtagatattgtttaggaggtctactgatgatgaattctgtatttgcagagccctatgtttggagtaccaatcaggcaagtctgctgtttatcaagatgtccaagagaagtcgtgttaccaactccaaccagagaacctaatctcgttgctcttcaggatcaccggtttgactgtcttaacagtggcccagaattttgctgcactacaggaagctctctagctaacacgggcgattgtcgtaatcaaaattaatgacaagcactgaatttgtttttgccaactaagtttcacaaaaccacagatatattgactaaattaacacaaaactacagattgatacatcactttaattctgtagttttatgatatatcaccttaaatctgtagttttgtgataatttgaacaaagtatttgtagttttgtgaaatttactaattttctcctatcggtggatgtaccagtttgagttacgtttctattattgcaatagaaagaaaactctgactagaagtaccctctctgaaaatagtcaacgagaccaatttattttgacgtctcgtagcatattttattgagtattgactgtgacactttggcattactatgcaaagctcaagcacgtaaacacatcagggtaggtaccctgtacaccaatgaaaagcgggcaaagtgttcagtttattcagaaaactgcctactgctgaactgtgagtactctaaaaccccaaaactaatctgaaaaactgaacaatctctgtaccaactctcatcatcagccagattagttggcgaaactactcaattgtttgtgattagttaccacaacacatgatgattattattatagactgatgatatagtacctccagcacattggcgtaggtgttgaggatggtgggcaaacctctgctaccaacgtacgcctccgcttccacattcaggttctcgtaccgcacctcgatcgtcggcagctcgatcccaaccctgcatgcgcgcatccatcaatccaaaaccatcaaaatcactctacacttatcatgatgtgacactaatttggaatcacgcgagagaactttttcgaatttttggaaatagttttttcttcgtctgaactctaaactgaactgaggagggcggaatttgaaaaagaagaaaagaaaaattcgaatctggtacctgtcgacgcggtccttgaacttggagaggaagcgggcgtggtcgtcgccgacccaggcgaggcgctgcagcagcgcgtgccgctcctgggggccgaggcgctgcacgttcacctcccggagctcgccctccggcatggccagcaccgccgtccgcgccctgtcgtaggtggggagcttctccagcgccgcccaccgcagcgcctcctcgtcgtcctcatccctcgacgacgaccgcgagaagaacacggcggcgtcgcccgaccgcgccgacgacgcctcccgccgcaggctgcccccgagcgcgtgtatctcgccggcgtcgtccatcgatcccgccgccgcccgccgccggtgagagtgtgagtgctcaccggcgcgacgcgtcgaagaagatgagatgagacggcgcgagaaaggagatggcggatttatactgatgatggtgatgatggtgatgagagggagagagagagttaaaaggttaaaacggtatgatgatgacgtgggccgtgacgtacgacacagcgtgttcatagtttttcaggacaaattttgatttgatttccggtttttggagataaacctctgcagcgacgacaaccttagccttctagaaacaaaacattatatatacgtactccaaaacctataaatagatccccgtttgtttcttctatcagcagaggatataattttggatactcatgatacgcttttcaaactgctaaacggtgtgttttgtgtgaaaattttctatatgaaagttgctctaaaatatcatattaatctattttctaagtttgtaataattaaaactcaattaatcatacgttattaccacctcgtttttttgaaacacttaatctttattttatcttcatctttagaagattcaaacaccaccatatattctcccgctgcaaactctatattattttccttgcaaaggattgaaaatgaggatacaattatcccaaatatcacatacaattggtttttttattacaggaaagaagcaaacgtacacatatcaccgtacataaaatacctctaaacacatactcaaaataacgaattaacagcggcaacttagccttaataaaatcttattaaaagctcacgcatatgtttagcattggtagccaccagattttaaattttgatgggtctagtttatatactagtgacttaccgtaacatatgaacgtctccggtacatatcaattgcaactatagcactataagtaaaattgaactattatcacaggcaaggtttaagcgctactagcttgtagtagtagctcctgccttatttataccttttctataaaaaaaacgaattcctttttagtacctaaaaaaatattgtagtaccttaaagtgtttgatttttcttgcattacttaaagaggttctaattatgatgaaaaaaaataaaaaggttcgaataagctgtgtagtttgtctaacaacttccccttgaaaactaggataaggtcgtaactcaaagctggccatgtttccgtgtttatttgaaccacacgtatttgtaggaaaggatatgaatcatgtcactgcaccttaaacctcagcggctttaatttgcacttactatatgaattgcatacatagtaggaaaaacatataaagccatataaaccctgatcgaacaactttatttagttctaaatatcattttaatgatgcctcttttttgtactgaacaaaatgttcaataaagattcctttacacctaaaacaaaaatcaacaccgacacttatatatatataagtcgttttatcttctcaacaggcccccaccactactatactcatccaactaaaatgtagttgaaaaacacatgtacagtaaaaatgagttgtgcaacatatataatagttcaacaaaactgaggtccattccaattatagtccacaaaaatgcttttctctttcatgcattatagatgaaaatttgtatatatccctgcatctttttaatctttttaagtgggggcagattctgtttgtctcaaaatgaaagaaaaaaaaacaaagaagaaacttttgttccttaattattggagtcactgggtgtctctgatcttgatccccacttcccatgttaattgcttcccttgcttgtagggaagtgtgttgtccaattagaaagggaaagcatcagcaccttcattgatggataaggccaaattgtgcagatttttaatggctgctccactgctccttagcagccggccactgtccaacgagatcaggacacgtggcttaaaatcacaatcgacgcacgaccttcagtcacgtaatatcacacttcgcatttgttactttctattataagattttttgattttttttctaagttaaactttttataattcgattaagtacataacagacatagcaacatttttaaaaaattctattaaaatatatctagtgttagatttaatgattattattatagacgttgctagatttttctataaatttgatgaaacttataaaaggtttgaaataaaaagttaaaatgtcttataatataaatgtaaacggagggagtaggtagcctttcgcataaaaaaaacagtattatatataatggcactggataaccggttttctggtggagtttgtgcacccgtcgttttcgtgccgttagctgcaatcacatcatcactgatgcaactgccactgaatttctttttcataggcttccattcgaatctgcaggccaagagtttgcaatttcgttgagatttcggatagagggtttgaaacatgcaaatcacagggatctgtgtcacgaactgaaaacgcgcgtacgtgaacgctcgcgcaagctgaggtcgcgtgaatgctcacatgtgtaaagctatggctacttaagaatcgacagttgtatggcttcatacggtttcttaagctcgatatgagcatgcacataaggtcccacgtgtagaataaatttttgtgcttgctcaaattattttatatcaaagtaaaatcgcccgtacagtgagtatagtgagccgatacggccgactaattatttattttatcaaaataaaatcggcagtataatttgctcaaattatttatttgtgcttgctcaaattatcatctaatctaaataaaatcataatgagaattgtataatcggccgtatagtgagtatagtgagccgatacggccgactttttctacatgtacatttctacgtggtggaactgcggagttaggaaaagatagctaagttgttgttcacgtttcacttactcaatgcatgtgggatacccaatccatctaatatgtacactagtccaaaaggattttgtaagtatggataaaagtgcagacacaagatatggaccagagtattcttattacacaaaatcactcatatgctctctttatccagccaattcttatacgtacatggaaagtagggtgagattcaattattgtattgggctgatcttcatgggccaaaacccaagtttctcaacatgaacaacacgaatcgtatcatcatatattcatacattctcccgaagctagattttttttcccaaggcaaacaaacagacaaaaggcccatctgtttccttatatcttgttctttccctctcaaatcattttttatcatgtagggaaaaatataattaactgcaatattccccggctgctaagaacttattatatcatattttggaggatgatctggtgttgagtgcacggttgacactgacagtttgttgtaaccttcttcctgttttcaatagataatcttattgacgttttgacacaagttttgattattcatcttattcaaaaatttagtacaaataaaaatatataagttgtgcttaaagtatttttaatgataaatcaagtaaaaataataattacatactttttaaacaaaataaatggttaaaaagtgtgaaaaagtcaatgacgttatcattgaaaaccaagtaacatgtaagatcatctgcatggctagctctgatccagcagtgtactcaataaagcatcttaatatctgtccatatcagtgacgtctctttctgctcaagttcaataccaaagtattgcaatcttcacgtgtctccggacaactataggcgcaattttttttcgttttctttttgaagggaaaccatatatagatgcaaagcatgacgatgagagatcgatttggttgcttgacttcttgcaatattgatgtagtggatttggatttttcgatttaccccacaaattaatcatggtgaatgcatgcgtggaacaaaacttgagatcggcctttcagcgcgcaaatctttggttgatatatgtccatcgaaattgtccagagaggaaaatataaatataaattcttagctaaaataccaatgcgtgagacaacttgcagtttgtgtagctatctaatattttgtcaaaatattacatcatatatttaatttttcaacaatcaaataatttgttcaaattgtacaaatagtcttccttcttgccaaaaaacattctaaaaacaacgcaacacaaatattccccattcatatcgctatcagtccttgtagtagtattttaggtatgttctataccactgcaccgcatcgtacttcacctcccaacaaaacactttttcccctattttaccacccccaaataattactagctaggttacttagttcactatcaaatgatatttcttgcagtggtagtataatttgaaatctaaaatccagtgaaatgaaaaataaaattacatgccccttagtttagtagaacatctgtgacctagttatcgaatataaggaagaatctgttcttaatgaacactgtttatgaaaatttaggcaaacaaatataaataactactaaaaatttgataaattgacccttaacccgtaccaaaacaaatggcaaaaatgaaccgtcggctgatggtgctgagttataacatctcagcgtcaccgtttttggcactgagatccttgctgacctgttcggaactccacgtggaggggggggggtcatataattagagtattgcgcaataatttgtaaacaatgtactggtgttgcaatgttacgttcttttgctggtgtacggtgtaccctagaaccagggttcgaatccccatcaagtcaggcatttttgttcttttttttcttcaaatgttcaatctacgcgcatacaaataaatgattaataatggtctctgcttttgaaaaaaaatatatatacgatactgttcaatctacacgcgtatatattcaaatgttcaatctacgcgcatacatataaatgattaacgatggtctgcttttgaaaaagaaaatgtatacgatactaatcactctgttagccaccaaactgaaagaaaacataggccaatgaacaaaattaatggaaaaatattgttgctatgtcgagggctcgaacccataagtgctgcacacacgattgggcatcacaccaccaagctacgttcgcataatgaatttgatgttccttgcatcacaccaccaggctacgtttgtatcatgaatttgatgttcattttgtattaattagcttgtaaaggggtcagtgccaaatgcattggcgctgacacctagtccacgtggaattccggttagctcagcaaggatctcgacgccaaagatgatggcgctgagatgttatagctcagcgacgtcatcggggttggtattgtgccaacggttcatttttgtcattagattttggtatgggttattttcaaataatttcactaaagcggttaatttgtcaaaatttcggaaaaaaactacgtgtgagatcacccaaggtcaaatattatgtaaactacttgaaatgataggttaatttgtcaaaatttcagaaaaaaactacatgtgagatcatccagggtcaaatattatgtaaattacttgaattgatagcacgaaatatttagttggatagggtctcaataaaacaataaccattcaacctctcgttgccatatcaagtagcaaacatattatgaaaaccgaagcatcgagtagagagcataggagatattgataggactccgcgtgctagtcaatttcagcctgagacatgcccatcaagccacacaaaggtggtgaccagatggttacacatttcaagagacttgacaaattgttggaggtctataacatctcaaatgctctaaacttatactcatgtgaataaactagttcgtagaataagcactagtttcacattttcatttaagcaatgataaacagaaataaggcatgaatagaaattagaacccagattattacaagatgtaatttcctaagccgatcggccaaatatatataatgattcatggaagcttgtatacccattcccacaagcagctgactagaggtagacccataatgaatcaaatcctagaagaagcagtcgaatcccgaatcactcaattcaatttaaacctaatacctgcaatatatattatatacgagtgacaagagtcagtacatcaatcaaattaatatactggtaagcacaaatcaaacctaacattctatatgcaaagccataattcaatggaaggttgtctttagctcaattacagcacaaaggcaaattttggttcacaaacatttgtaaagagagttgacaattcaattcacaaaacatgaacataaatataacataatagtcatcataatatcatcatataatcattattgatgcctaaaccgacatcaagtctcacattcatcatcaatataccataaaccatataattcaacacaagttaccattttcaaacccatgtttcacaaacacaatttgaaaatataaatctataatattgacatttcactaagccgctcatgaccgcgagcatgactaaacgattagttttgagaactctgcatagtttgtacaactttacccacatgacatgaatcgttctagtttgaccggtttccgtcggtaccaccacactctacaccttgattgtggtctagaggtcataacatagccattacatcataggatttcatttgtacaatcggggaaaaagtaaatcaaagatccatctgctccaagcttcagaatatgcccttgcactagataagcctcatcaatacgcgaacgagcggctgagttaaaagcaatttggttgctaaccacccctagcccttttgctatccgagtaatcagagaagtgcactcctgtagcgcccgttccgtcgtggcgcctagcgggaaaattatctcttaaaaaccctaattgcgaaatttgtttccttgcttgttgtctagtgtccgtgccatctcaagatctcaatccccgatctatcgtcgagttcaattccgaatccaatccttccaaatcaaatccctccgcaaaagtctattttgcctcccccgaggtcgatgggccgaatcccgctcggcccatctctcccccggccccctctctcccgggcgccctcgctctctctctctctctctctctctctctctcgccctctcccctccccggcgcgctccgcttctccccccgctcagctccgctccgcctcgcccgcgtgccgcgcgcgcgagcgcgtgagccgcgccgcccgcgccgagccaagccctcctttccgctccctcgctgccgctccccgcgcgttgatcgcgcgcacgcccgcgtggtcctcgcccgcgtcgcgtctgcgccgcccggccccgctgccctgccgcgcctgcagccgctcggccccgcagccagcgcgcgtgccgagccgcgccgctccatccgccgcgcctcccgttgcaagccgcacgcgcgtgccgtggtggccgaccgcctggtcgccgccgtcgtcagcgtctgccgcgtctgtcgcccgtgtcgtcgcgccgctccaaaccgcctgccgtcatcgccgtcgtcaccgcccggcccccgccactccgcgcgcaagccgccaagggacggaggcaacgcccctcctctctctgccacgtcgcccccgctcccctcctcctttttcccaaatcggcaaaggggcaagccccctttctccccctccttttccccttttcctcctcgccggcgtcatcctccctgtcgccgctttggccgcgaccgccgagcgccagctcgcgcccttgaccgcgcaagtcggttcccaaaccgacattgccgcccatttaaaccccagcctccccttttgtcacaccccgaagttttcctcccaagccaaaattgtaatttataaatgatcccaagaaaatgcaggtgaaatcaggagaaaaccctaaggaagtaatgcaaataataatcggatttgacatgtggaatttttcttgagttctacatgtcgaaattcattaacaggatttttagtgaaattttcagagctctagaaataattttaaccaattaaaatggagcaggcaatattgttaattccagggaaaatcctttttcctttttctttttcttttccctcccttttcctccctttttttcgaatgggccgccggcccattcccctccttccttccctcctccttgctgggccggccgcaggacgaagcccacccaggccgccccgctgcctcctctctcggggtcgccgacaggtggggcccacctgtcgggcccgtctccctcctcccgccgatcccggcgcgccgccgcgcccgcaaccgtcgccgcgcccacgtctccgccttccccgggccacgtcgaccacgcccgcgcgtgcgccgcgtctcccgcgccctttcccctctctctcccgctcgcgcccgcgcccgagatggccgggattcgaaaatcgaatcccgcctctctctcctccccactccccacgtcggccggcgattcccgcctctcccggccacgtccggttctctctccccctatttaagcatcgccgtcgtcctctctcactttttccccatttcgccgacccctcccgagctcccattgctcccgcgccgtgcaaccacccgccgccgccgcttccgctactccggtcgccgctagccgccgctaggctcgccgccgcaccgcgccgtcgccgccgtcgggttcgcgtggccgagatccatcccgtccacccctctttcgtcgaggtccatcgccggagagccgttcccgtcgtgcgacggtgagggtcgccatgtccgccgccttcggccggcatccccgcctcctatggcccctctcttcctctctagtccctttcgtttcgttctttaggtcgtcccggtcgccgtccgccgcgtgtcgactgccctccgtcgctcctcgtcgccggacgccgtcgtccccttcggtgaggactccttccccttttctctacttcctcgattctccgtgcgtcgccgccgccgcgcttgccgtcgcctttggtcgttgccgccgtccactgccgccgctttcgcgtcgcttttgcgccgtcgcctccgcagccggatgccgtcgccggcaacgcgacgtgcgcgtgccgccgccgtcagccccgggtcggccggtcggctttgatgccgagccgagcccggcggctgcctccaccgccgccgtccgatcggcccgagggcgatctgggccgtcggtcccgtggaccggcggtggaccacccgcgtggtcccggtccacggtgaaccgctcacccttgagtcgctgaccagtgggccccgcatgtcggcgccgcgcccccccgtgctgacgtcagccctggttaatattgcgcaataaattatttaaggatttttgttatagtaataaacacagtgaatcttctaaaattcataactaattcatccgagctccgtttaatcccattcaagtctcagtaaatcaagaaaaatgtgtagaatccattaaaaatggttttgttccctgtttcagtagtcttatagcctgtttgcaatgtttgccttgtatgtcgctagattccggttcctccgacgctccggtgtacttcgagatagtcgccgaggtccctccagtagcagagcaaggcaagtcatgcttgtcacttgatcatattgatcctatattgcaaatgtcctaatgttttctttcaaataccgcatttgttttgcaatgttaatatgggatggttacctattgttacagccatgctattttgataccatgctcctttgttagcttgggttataacatgattagagttaggactagggtttgcttagccatgcttagttcaactagttcacaatggggaaaatcatattaatgtttagactgttagttctaatggtaatgttggtttagtgacaccgctttggtgttggttaattaaaatgaatcacatggtgggctgtgggtgcatggttttgctggtcgcacccatggcagttaaggaccggttcgcgggatgccctggaaaaatttatcgtacttaccacaagccagcgtgggcaacggctgggcttgtagtgtagctttcctctagtcgacgcatccaggcaagggtgggcgtgatggagcggggcgggccctgcgacggcctctgtcgcttccggattcacctaggcacgagaggggactgcccgttgcccgctggggacgggggtgaaacctgaggtgtggtgtgcttggctagagggggttatgcgaagggtcctgtcacggcctctttccggtatgtcgtggtggcatgtcggcgcacggaaacgtgtcgtggggctgtgtcttgtgggtacaattgtacacctctgatcagagtaaaactattcgaatagccgcgcccgcggttatgggcggtcaaccagattcaccgtgattagactcacattagtttagtctaatgaatttggatggtataggggttggttgggcctgttgcaacgtggtgtagcgttggacagtggatgcttaatactgcttaattattacaactgttttcgcattcaactcctgtttataaatgccagtatttatgcaaatgaacctgcttagctatcccttgttgaatccatgcatcatacccccattccggtatgacttgctgagtacagtgggtagtactcagtcttgctctatttttcccccgatccccagagttcgagtttgggtcagatgaaggtttctccgaggaataggcttcgtccgtgccgtcgaggatgcctgtggagtggtgttcccgctgcagtttagtcaaggcttagctccagttatcttttgttttccgctgcatttctgtaagacttttatgatgtttgtaagacgtggatctgaatgtcaacattgtcgtttgtgtaccccggctggtcctggacggggattttaatgcacactctgcttggaattctattcgggaatttctgggcgtgacaagttggtatcagagccaggttgaccgtaggacaagccaaatggaaacctaagagccctctgaatccttttcattgcatatgttctttgcaattggatttgttccgggaaaattgggatctgttcttgtggttcaagggaaaaatcttggtcgctcgtttaagtgagatttttcaaaacgagtcagtctagggttttagtaaaactattgggatttattcgtcagtcagttggggtttgatgggtgaaatgcattaggtcctagctcaggaacatgggttgcaaggtatttatgctttatttgttattattaatatgtatctaatttctcattattttatcgttatgtgagtctgtcttgtttattcgctctcatgcaaaatgatctatgcataaaaatttcgctcttattcctttcccttatttgagtcttttattgctttatttaaatttggatttgagcatgcattgatcctactcctttgtcttctctagatggccggtcacccacccaaccaccgcggagaaggcatgatcgactttgtggcagagctggcacgcatgacactggtggtgggctaccccaacgcgccagagtacacgacgattccgccgctcagtggcgagcttcctcaccgtgtccgcttggaggtccatggctacgtggggacttgcctcgctaacatggcggtcgaggcatgtggaggcacagcagatcatgcctgtcaggaggcagcctacttgatgatggccagactacgggagcgccacaactacatcttccacgacacggcgtaccgctaccacccccgtcgagccaacggtgatggcgtcagctccttccgtccgacagccggcgagaacgacaccacatttggtcacatgtgtgctgtgatgaggggattggacaggatgcactcggacctgcacaaggcgaccaaggccttgaacgatgggaagctcatgaggatcgtcgctctgaaggacgagatagcgcgcctgaagaaggagaacgctcagctaaagggtcttccagcgccaggaggagtccggatccgcactacgccccgcaagacgacgacggcacccgtgcgcatccagcttgcgcccaggaacccacctccaccagcagctcccgcagcacctccagttccgcccgcagctccggcagttcctgcagctccagctccagctccagctccagctcccgcgttcgctctctccttcgctccagcatcagccgccagaggtccagccagtggcaccggaggttggttgtctgctactcccagtggctcagagtcaggcagtggcgagacttatctgccaggttccaggagtcgctcagagggacctggtgacgagcaggaggacgccttcgactccaccgaccgcaggagccgttccgagcattaggctcgttttccattagtttatcgactgtctagcttttgcttgttagtttgtgtgtttaggttgcttgtttgggtcagtcgacggtcgatatcatgtgcctatgatatggctgtcttaataaggatttttgtttgctcttttaagtgttttaattcagatcagaacaattgcagtttaaattcctttgtaataaagcttagttcctgagcatctgtttttcttcttttcccccatctgcttttccctccagatggtctacaccaggactggtagccgcgcaacaggcgaggacagcaacggcgaagaacgcgctgatggtgtgcaccctagcagtgattccggcaatggtccgcccccgcttcccgagaatccgacgctagcccaagttatggcacatcagactcagatgatggcggccatgatgcagcagatgcagcagcagcaccagcagatgcaccagaggatgctgcagcacgccgaacagcagcaccagcagcttggtccccctccccctcagtccaagttgccagagtttctacgcgtcaggccacccaccttctccagcaccaccaaccctatggaggcaaatgactggctccatgcgatagagaagaagctgaatctcctgcagtgcaatgatcaggagaaggtcgctttcgccacgcaccagcttcagggtcctgcgtcagcttggtgggacaaccacatggccacccgcccaccgggtactgaagtcacatgggcagagttctgccgtagcttcaggaaggcacaggtgccagatggggtcgtggcgcaaaagaagagggaatttcgtgcactccatcagggcaaccggactgtgacagagtacctccacgagttcaatcgcctcgcgcgatatgcaccagaggatgtccgcaccgacgccgagaagcaggagaagttcatggcgggtctggatgatgagctgaccaaccaactgatatctggggactacgccgactttgagaggctagttgacaaggcaattcgtcaggaggaccaacgcaacaagatggacaggaagaggaaggccgctcagttcagggcacatcagggaagtcaccagaggccgcgcttcacttccggacagcagggtggacctaccaccatgatcgtccgccagcaccgcccgttcaaccctagcaacttcccccagggcgccagtggcagtcagaaccaccatggaggtcagcccaaccgcggtgcagctccacgcccaccaatggcaccggcacagtcaggccagcccgcgcaagccaagaaggagacgggagcaaaaccagggtcctgcttcaactgtggcgagcttggccatttcgctgacaaatgcccgaagcccaggcgtgccgggccaaggtttatccaggctcgtgtcaaccacgcatctgcggaggaggcacaagcagcaccagaggtcgtactgggtacgttccctgttaactcaatccctgcaacagtactttttgattctggtgcgacgcattctttcatttcaaagaaatttgtcgggatgcatgggttaattagagaggaacttagcacaccaatgcgggttcataccccaggaaatagctctacttcggttcaattcagcccttctataacaatagaaattcaaaggtcactatttctagccaacctcattcttctcgaatccaaagacctagatgtcattcttgggatggattggctgaccaagtttaagggggtcatcgattgtgcgaatcgcaccgtcaccttgaccaacgagaagagagaaaccgtggtgtacaaatctctagtctcgccaaagaaaggggtctcgttgaatcagattgagacggaaatcccagtggacaccgtagagaagaacttgagaaaattggaagatatacccataatctgcgagtatccagaagtgttccccgaagacctcactaccatgccacccaagagagagattgaattccggattgacttggcaccgggaactgctccaatctataagagaccgtacagaatggcggccaacgaattagcagaggttaagaagcaagttgatgagcagctgcagaaagggtacatacgaccaagcacttcaccttggggcgctccggtcatttttgtggagaaaaaggataagacgaagaggatgtgcgtcgattattgcgcacttaacgaggtcacaatcaagaataaatatcctttaccgcggatcgatgatttgtttgatcaactgaaaggagctagagtgttttctaagatagacctgcgatcaggctaccaccagttgagaattcgggaagaggatatcccgaagacggccttcaccactcggtacgggctatatgagtgcacggttatgtctttcggacttaccaacgcacccgcattcttcatgaatctgatgaacaaagtgttcatggaatttctggacaagtttgttgtggtgttcatcgacgacattcttatctattcaaagtccgaagaagaacatgaacaacatctccgtctagtactcgagaagttgaaggaacaccagctatatgccaagttcagcaagtgtgacttctggttgacggaagtcaaatttctgggccatgtcattacagctcagggtgtggcagttgatccatcgaacgtggagtcagttaccaaatggaccccacctaagaccgtgtcgcagattcggagttttcttggacttgcgggttattaccgccgattcattgaaaatttctccaggatcgcccgacccatgactcagttgcttaagaaggatgagaagtttaaatggacagctgagtgcgataagagcttcgaggagctcaagcagaaattagtatccgcaccagttttgattctgcccgacccgatgaaagacttccaagtctattgtgatgcatcccatcacggacttggatgtgtcctaatgcaagagggcagagtggttgcgtatgcctcgcggcagttgcgtccacacgaaggaaattatcccactcatgacttggaattggcagcagtggttcatgctttgaagatctggaggcactatctgattggaaaccgctgcgaagtatatacggaccataagagtctgaaatacatcttcacccaaccggacctaaaccttcgacaacgaagatggttggagctaatcaaagactatgacatgagtattcactaccacccgggtaaagccaatgtggtggcagacgctttaagccggaaaagttactgcactgccctatgcgtcgagggcatgtgtgaggaattgcggcaggagtttgaacatctcaacgtgggaattgttgaacacgggttcgtagccgctctggaggcacggcctacgctcgtggatcaagttagagccgctcaagtaaatgatccggaaatagcagagctgaaaaagaacatgagagtcggaaaggctcgggatttccttgaggatgagcatggcacaatctggattggagaaagattgtgtgtacctgacgacaaggaattgaaggatctgatactcaccgaggctcattagacccagtactccattcacccaggcagcactaaaatgtatcaagacctcaaagaaaagttttggtgggtcagcatgaggagagaaatagcggaattcgtcgcactctgtgacgtttgccaacgagtgaaggcagagcaccaaagacccgcaggtttactccaacctcttcaaatcccggaatggaaatgggaggagattggaatggactttataacgggactgccccggacatcatcgggacatgattcaatctgggtagtcgtggatcgactcaccaaggtggctcactttataccagtacataccacctatacgggaaagagattggcagaattgtacctcgcaaggatcatgtgtttgcatggggtacccaagaagatagtatccgaccgaggtagtcagttcacctcaaagttttggcagaaactgcaggaagaaatggggacccgtttaaatttcagcacggcctatcacccgcaaactgatggtcagaccgagcgagtcaatcaaatcttggaagatatgttgagagcttgcgctcttgattttgttggagcttgggacaaaagcttgccatatgcagaattctcgtacaacaacagctaccaggccagtctacagatggcaccgtttgaagctttatacggccggaagtgccgcacacctctcttctgggatcagacaggcgaacgtcaactgttcggaacagaagtattagcggaagcagaagagaaagtcagaatcatcagggaaaggttgaggattgctcagtctcgacagaagagctacgcggataaccgtcgaagggagctcacttttgaggcaggagattacgtgtatcttcgtgtcactccgctccggggagtacaccattttcagacgaaaggcaagttggcaccacgcttcgtaggaccatacaaaattttggaacgaaggggagaagttgcttatcagctagaacttccatccaacatgatcggcatccatgacgtgttccatgtgtcccaattaaagaagtgcttaagggtacctgaagaacaggctgattcggagcacattgatatccaagaggacctaacatatgtggagaagccggttcgtatacttgataccagcgaaaggagaaccagaaacaaggtcacccggttttgccgagttcagtggagtcatcattcagaagaggaagcaacctgggaaagggaagatgagttgaaagccgcccatccgcacctcttcaccagctcctccgaatctcggggccgagattccgtttaaggggggtaggtttgtcacaccccgaagttttcctcccaagccaaaattgtaatttataaatgatcccaagaaaatgcaggtgaaatcaggagaaaaccctaaggaagtaatgcaaataataatcggatttgacatgtggaatttttcttgagttctacatgtcgaaattcattaacaggatttttagtgaaattttcagagctctagaaataattttaaccaattaaaatggagcaggcaatattgttaattccag

SEQ ID NO: 20201 - DNA, 4626 bp, Oryza sativa
  unsure (1)..(4626): unsure at all n locations
gagtggtgttcccgctgcagtttagtcaaggcttagctccagttatcttttgttttccgctgcatttctgtaagactttcatgatgtttgtaagacgtggatctgaatgtcaacattgttgtttgtgtaccccggctggtcctggacggggattttaatgcacagtctgcttggaattctattcgggaatttctgggcgtgacacctttcccttcctcttcctttcgtctccgcgccattgccgccgcccccgtgctctgtctcgcctccgccgtccttcgccgagcgccgggagagccggtgcgttcgaggacgcggaaggggacttcggccgcgccctcttcttcctcttccccggcccgaggccggagagattactcccgcgccgtcggcctctcgtcacagcgccccgtcccgcacggtagtgcctccctccgttcttcctcctcgctccatcttccccccttagatttcggtagtagctcgagtagcctccccgtagttagccggcgccgccgcgaccgttgccgtcgctcgccgtgtgctcgccgccgtcgccgctcgagctccgtagcacctgcacgtcgccagcctcgctcggcgtagctccgtccaatccgacgctagcgtcgagttcccgaagccgcgtagatgctctcaccgccgggaatcgacccctcgtggcctcgtcgccgtttccctcttccctccccgccggttgtcgccgcgcgattcgccgccgtnnngnctgtccggtgaatccgagccgttggctcgtctcccctcatcacgaacaactgcccggtgtgctcgcttttgcccgtatcgccgtggttcactccgccgctcgccgccgccgcccgccgtccattcgcgaccgggtcgtcgtctacctcccgccagcccacgtggccgccacgtaggcgccacgtcggcgccagctcagcctagaccggtcgagctgaccccggtcagtccctccccgtgcgcgcgttccaccgcgagccgtgaggctgcgcgtgggcccgccgcatccgcgtccaccgcgagccgcgcgcgtgcaccgcgtccctcccccgcccgcgcgcatgagccgcgtactccctccgcacggtgagccgagccgctgacaagcgggtcccacccggggccgcgcgtggtgagcccggtccaccggactctctctctccttcctccgcgcgcgcgcgtcttgggccgctctgggccgccttcttgggccggccggcccgtttagatcggccggtccgctccaattcccttgggccgcgccttagccgcccgaggaaaagtctaatttccatccctcttttctttcttttcttttctttttcaaaaaggatttaattaaatccttttcctttagaccaaaaatccaataatcttagaaattcaatatcttcccaaccgtaaatccgtttgactccgttcaacttccaaaattcctcaaatctcgagatctatctaatggcacgcttagaggtctttaatagggctttattttcgccgtttgttgagttgtcccgtttcgcgtgtagtttcggagcccgaagatccacagcgcgaggatttcgaggatcaagctccagatctcgagcaaggcaagccacctttgaacatcttgagcctatatttgaaatttaattatattgcttgcaaaatattatgcattgataggatcgcacttaatctgtttgtcccgtctgcaaggcagattggcggacctacctaatttgtcgcatttgattcttcctttgttaattgctataccatgtccccttgtaaccacccagttacgcctcgatattcgtgcactctgtgcgagtatcgacggtcgccttcaaacttaaaaattcgtttaacaacttgggtaaaacttgggttttacaaaagacttggaaaacccgacacctgggtcggtgcttgtgaactaaatgaatttccaaaaccgcggaccggggaacgtaccgggtgtacggtttcccgctcttgcacctaaggaccgtttccttggaatttcatccaaacataagataagtacgaccacatgggtggaataggacacccctggctgagtaactagcttatcaggggagccatgatgccgagagacatgtggattcgccggggcggtgtcggagaggacccccctgggcttcctggcacagtatggtttgggacctaacctgttgttggtctgggaccccactcgtcggcatatggtaaacttgtgtcggctttggaaatgccttgtcatgaaagcttggaggtctcccgacgtggctgatccccacgggctgagtgatccgggttagtaatgtcgtgtgggtaaagtgtaccccctctacagaggttaacaaactgttcgaacagccgtgcccacggtcatgggcggatgtgaggtgattcctagcgtagttttgtttgactactgcttgtgaaattgctattgtgaaaagaggttcgatgtttgaaaaatctgcagctgatgggatcagctaggcccgggtggccgtttgaaaagttgttggcccgggtggccgtttgaaaagctgttggccgggtgccaaccttgtttcaattctaaagactgatacattgcacatactccgaccggacgagacgcactgtctcatccgtgtcgtttgagaaacactcacttagttgtttttagaaaagagttcaaataaaaccaattgcaaaaacaacagcctttccttgaagcctgcattaaacacttatttcccctggcttgctgagtactcccgtactcacccttgctctatataaataatcccccccccagttgctgaagaagatgaagcggatcctgctgatgaggagtttttccaggagcaagccggctatgatgagttttagggtttcggcctagttcccaagtcgcgcctgtgttgtttggtccaagtcctggcttccgtttcccttttgtaatgcagttgtgagctcgggatctgtccgcagcccaacatgactgtacctctactctataataaagagacctctgttgctgtgatattctgtctccctgtgataccagcactgtttcctgggactggtatcgattaacaggttaatttggagcgtcacgggctagttccggtcgggactagttcggggcgtgacaactccacaggagcagagaactttatactttctaaccattgccttatcatacatttcacaggagcaattttgatctttctaaccatggcaaacatgataatcaattcatctcccctaatgagtctcagatcatctctaggaaacaaagtcatagcaatctatttgtgcatgagcctaagtgtaggattatggatatcattcgttctaggtttcttgcatattggagcaccagaaatgtcttcccaaaatctatttttctcgaacccagaaattcctttctggagatcgattttacaggaatcttgaaaaccaagaagtgtacttaagcctttccatgtaagtgtgaactcctcacggaaaaagcgaaaggaaataccatcttctatttctttcaaagtgcacaaaaattgtaaagtaagcaaacgagaaccaggctcatctaccacatcaaatctctgccaaccaacagctttccaaatagaacgaaattcaacatccatacctatcttttttagtaggtctggtgagtattctcgcgtgtgagcatactcccggtcgctcagcatgtagtaggcttgtctctcccgatcactgacaaggtcgaggtcggtgtcgttcaggagtcatcgcggagcttcggcgtcttccatcgagacatcagctgatgaacgagtactagactcgtcatgatgacttgatgaagagccggaccccttgaatagacgagacaatcgcctcctcattctgcacaatggagcaagaacggactaactcggcgggggttaggaatgacaagaatttcactaggctgtccgttttgggtggctccacttcgacctcttgaatattctatgggttcggcccgtactttattctgaccatggagcattgttccgttctcggttgaaactcaaacttctcttccttgccgttgatgtggaaacggatactccccgttcccacgtcaatgttggctcctacggtgctaaggaacggacgctccaggatgagcggcgtctcttttcccgtgtccatgtccagcaccacgaagtctaccgggataaagaaatcctgtatcttgattggcacatcctccgctatccctgccgggtaacggactgacgagtcagccagatgaaggcgcatcagtgttggtgccaacaccgtgaagttgagcttgtcgaagacgtcttttggcatgacgctgacactggctcgaaggtcgcacaaggcctggtcgaactgttgtgccccgatcgagctggtgatcgtaggacaccctggatctttcttcttctccgggagcttgtggagtatcaggttgctgcatttttccgtcagcttgaccacatccgttgttgggagcggtttcttgttgttgagtatgtccttgagataacgggcgtatgttggcacttgcgtagcgtccaacaatggcacgttgatgtggatcttttggattac

SEQ ID NO: 20202 - DNA, 6305 bp, Oryza sativa
acagcaaccgtgtgtcgcagtactcctgcggcacgggcttttctagctgaacttccttgttagccgagtcattagatggcgcttcttttgatatcccattagttcctacagggttaggatatggcggatcacgagtggacttacctccccttgtcgtgatcgccttaacattttcaacggaggagttaggttgccccggaatcctcccagtatcatttgcagggactaaggatgccaactgagctaactgggtctctatcatttgattgaagctcagctggttttgaaaagcagaagtgaagccatctaacttgacattaatgttttctaggatcttatcattggcagcaagctttttgcttagcgcatattggagtcgttcctcgctccaacccatattggagactatcttctctattagttcaatggctccttgaaccgttttagacaagaaggctcttctagctaccgtgtccaagtgatcgtgggacaccggggtgagtccattgtaaaaattctgcaggattagccagtcgtccatcccatgatgaggacaggcggccacgtactcctgcagttgttcccatgctttcggaatagactcatcccttatctgctagaaacttgaaatccttccataaagggcattggttttgcccatcgggaagaattttgagaggaatgccatcaagcatttgtcccaggtattgacagcagcacggttggcataaaaccactactttgctttcccgagaagggagaacagaaacagtcgtggcctgatagcgtcgggactgacgcccttgatggtgtacgtgctacagatctccaggaactgttgcagatgagcattggcatcctcattaggcttgccacagaacgggctagccggcgtcatcgtaatgaggctggacttcaagttgaaatccatacccccaatgttgacctgcggcccaatggccacattgttagtagagggagcagcgaacttgcgaagagtcttgctcgccatagtcttgaaggtcggtggcgctggtatggctggtttctctgttggtagagttttctgcggagcaacgactcgtggtctgacgctccgaaagacagcttccggcaggttgaaaccagtcatgtactactctgttctcacaacaaaagtaaaaacaaccaaggttagcctgcaaaggaaaatgattacacagaggtaaatataaagttttagttcaagtaatctctattatgaatcttccccggcaacggcgccagaaatgcttgttggtatttcttaatgacattactagaaatataattcccagcaatggcacataaatacttctggtatattatggttacagagttcatccgcaagcgcacggatataccattatagcatttcacccaagagtattttaagggtatcgtatttattttatcccgtgggaagatcatgtagagaaaacttgactaataatttatatattacttgtgataatcatattctaagcatgggttaaggtaatccaagggtagagtgacacacaagcattaactaatcattctcataatatatcatctaagctaagtcgaaagaaaagagaaagaaaatctattcctatacttctaatatacatagtatacatacattctagttaactgatatactagctaataccctctatccgatgccctcctggtacttcgagaagccacccctgactgccgagttccttacgacagcccgtcatgaccatacaacaggggctaaatatggaggaataccctccccagggaattaatttaggattatataccggcgcggaggaataccgtactgagctgtcaccattagcggcccacttctcatccacaatatataaccccaaataatgatatcccataatctagacaccacgtctaaactaccagatactactctaatatcatcgtcatgacatagagtaattgcataagcaaacattatacccgcaccaaagcatctcccagataagctagtcgtatattcagtataacatgaacataatataaagtaggtactcatatactcggaaactatttcaataccataaatgtatatagaagagtattccaataaaagtacaaagcttacaaaagagaagagaaaagctactacagccatacccgaactcttccaaaggcttccggactcctgatttctactctattccaattccaccagctagatactactaaactaaacttgagagaaatgagagagctattgcttgaggtgtgtgttgaattgaagagagtgaagtccttatataggctgccaatgacggttgtggcagttggaatggtcggaattgccttccaaccgtcattggggagtgatccacgccgtccagccagaacctggatccaacggcgccaggggaggttcggccgaaccagggccggcccatcctggcccaaaatcggcaggtggcctcctgaacttctccactccgcagacttgtgaattttggcccaattcatcgtgtcaattctgagttcttggcctattcatacataagtctggttctcgacatcatccaattgatttatcgtctgagttgatgtcgattctcctccactttattgtcattctctgcaaaaggttagtacacctaatactagtggaatattattattctaacatatttatgcattgcaagcatcactagttctcctctattttggtaatattgatggttgaaactgatcaataatgaccgtcaacacctacatatccggggcactgattacgggcgctcgtccctgatccaacatattacagcgtatcagagttctaatgactcacggtcggttgccgccggtagcagctccctctcgctatggtaagtcgccatgcggttacaacaggtacgcctctctatacctagtagaactccaagtcctaaactgtaaccgactacgtacacatattcgacacaaactctaacagccaccgcacgtgaatatcgttctcccatttttacgtacgaacccttaagaggacagcacgcatgcgggcttcttaagagcatcgcacaggaaaataccctccctcctttttccctctcaacacttcaaaaattccatacttatcctccctccaactctctcacctcctcatccttattctcacctctcctctcactttctctcctctcctctcaagtgtcgcggcggcaggcgagtggctcggcagcgggcgacgggacgacgaggaggtggctccgcctcgccgcctccgccgacgatgaggtgcctgggagcggcgcctttggccccacgaatccgcgccacccccgccgacgaggaggaggaggtggctaggagcggaggcagacggcggcagcgcgtccgcccccccggccctcccgcgcagcggcgcccctccgtcgttcggatctagtggcagcgccccttccgccctccgcccatagtatccggctttggtgcccctccccacgcggatccgggggtggcgactgcaaggatgacgacaagctacagcgacggcaacgacggcgacgagctgtggcggtggcaactagggtttgcgatggcggcgacggcaacgactatttttttggtggatttttgttttcgcgtgtggtcggtacaaatggactgcatgagataatcgattatcccgtgcggtccacttaacacgaccgcacgggaagatgtatttttccgtgcagttgggccgcccgcacgcgaaaatatttattttcctaggcacctgggggtgcagacgggcaagacctctgcacggaaaaacactttttgaccgcacggaaaagtcattttcgtagtagtgacatcgtgtggtattttacatctatctttgtgcgagaaggctaagtcgcgactggtcgcgttgcgtgcggagaggagggcagctgacggcgcggtttctttttttctttttcgacgctttcttttttttccggcgctctcggtatcttttttgttttttctgttttttctttccgtattttttgcagcttacggtttcctttttttttgtttttttctgtttcgtctttccgtatctttttagtattttcgcttttttaatacgtatttataaaactttgtatatgtagacatataaactttgtataagtgtattttttagactttttatatgtacgaacacaaactctatgtacatatgtatatttttatacattgaagtgcgcatgtatattgtatatacaatatacatacgtataaatgttgtatttacgtatacaaaatttatacgtatgtatatagtatatacatacgtatgtacactagtatataagagaagctagagagactagggggcagctgatcgcgcgcatgcgcggccacacgactagccgcggatcagcagccccttatctttgtgtacagtatgtctgtttgcaaaatagctttcaatttcttgagaacacagtcagtttgcaagctaaattatacaacctgcatgactgacaacctacataccataaaactattgcaggtacctcctatagtaacatttctgctaaccaggctctgttaaaactctgaaactcaggtatgcctttgttagttatcgcttttggaaattgaatagcctgagtgagagtccaaaaaggaaggcaaaaagaacagcaaatgagacaactaccatagccgggacccacaataactcatgatggaaaccaaagtagttcttgacaaagtcagatacacgctctccatcatcaaacttgtctgatacatccccaaactgtgaggtaaccaacccattgagcgtccatgcaaccgggcatatccaatagtaccatctccaccatataggaattctctgtagataaaaagagccatattaggaaaatcaatggctttaagataatttggctagatatttttgaaaagctggttcacttacagttaacggtattagaaatcctgagaaaaggttccacatggtataaaatcctgtggaaacaacagtggacatgttgtaatttggagttagacccaccgccatcatgccgtaaaatgtgtagtatgacaaagtgaagtacatgaagaaaaggtaccaaaagaatttggcacctgaccactcatatcctatcattgcatacactagcatgccatatattatggtctgaaggaagatgtacggaagttcaattgcaacctgcaatggaactatatgttaatagggcttattgtctggccattagtttccccatactgaggggattgctgatgaaattgagtagtatcttacaacattataagagactcatatgtcgaagaatttaacctgtcccaaggcatatggcaaaggggagtacatgtgcgatgctctttctctataaaagactgtgcgctcaatagagacaattggttgaactgaagcagagttttgtactcccatggtcaaacatgtagaatacatggaacccatggcgctgaacaaggcctgtttattattcctgcaacagtggaatatatctagtaaatggcaatagatgaactagaggcagcctttgaatatgtaaaagattgtatacgcactattttcttgtggtttttatattactttgttaccttttttggccaataccccagaacattgttccaaacaacaatgcaactataatggtgaagaagtatttcacagcaatatatcgaggattacgccagtatgacagacgttgcttccagaggcaagccaaacattgtgtaagaaagggctgtgaatattgagttggaaatgataagtcgcttgaactttcatggggcgtgcttaactcctttatcaaatttttgttccttctgtaatgaaagcaaagtaccgacatggtcaaatgataacatttcctattgccttcttcataaaattgaaaaattgtggcacttggtgataacttgaagcatatccattcaatattatgatttcaggattatctgcatttcaattttttttcatttgctgttaccttgtctagttattacaaatggaaaataaaaaaattacattattgtccttttggaatgttgtatttgtgtttttcatatcttagtatagaacataatattttgcatatgccaccaacttggacacacttctcacttatagcgttatggagccagtcatttggtgcatggagtaaagttcgctttgatcttaggtgttatgttagtggggcaaccattatagttccatgatcaaactatattaactgaaggacaaccaggggcggatttgccatgggggcgggggg

SEQ ID NO: 20203 - DNA, 27624 bp, Oryza sativa
ccccactaccgccccagggtccatggagacccccctaagcccccactaaaatttttcacgagatgtggtggctggagcttcgtcaggttggctggagggaaggctggaggttgaagacgatgttatttcgcgatttgggcttgtttcgaagagcagcccacgaccacgagcgcagtcttcaagttttgtctagcccactccaagcaaaggcccacggtggcagattccagccagcccatttggctactccccctcccggcctcccgcctccccaattccccaatcccactggccacctcctcctctcctaaatccctaaccctaggcgaataggcgcgggcggcgggcggcggccgagcaggcggtggcgtccggcgaggggccagacgggaggcgtgccaggcggtgccccggtggtccagtgcatgcccggagcaggtggcgacctccggtgagctgcaagcctgcaagctggcgagcgccaagcggcaaggtgccgtggcggcgtccagtgagccggcgatgggccagacaggaggcaggccaggcggaggcggtggtccagcactccagtgcctgcgccgccacgccgccgggaaggtggcgagccgctcgctggcgaggtgccgcgagggcgcaaggcgccgaggcaggcaggcagcaggtcagcggcacagtggccggcaaggcagcaacgagtcaacgacgcagtcgcagcctactgtgactgtgattgaagatttgaagttagaaatcggtaaactagtaacctctaatactaatagatagtctaaaattgtgtcttaatgaggttgtgcacttgtgcttgaaacttataattattttctatacatttttagattgtcaacatgtcaaaaaaaacattgctcacgtattattttagtttaagcaacacaaatggcagtgatcctccatccagtaaagtgatcctccatccagtaatgagtgtttaagttagccaaagaaacccaagtcagggttttttcaatcggatgaaaaaatcatccaacaatttgaagatatgaaagcgcgtcagatgttattacctcaacagaaattagtggtatgctctatgcctccattcctccctaaatctctaaattatttgaatccaaaataagtatgtttcgattattcgttaatttgcctttttctttgtataaattactactcatgaagaataatagacgattgggtgtgacacgtcatctattcgatattggtttggtatggacaaaattctcgacatatcattaattcaatgtgtaccttgaactgacatttagccaatttacatgtgagacatgtttcgatttatgctggcgtaatttgttcagcccccactactattttttcctggatccgcccctgaggacaacccaatatatagttacctgtatagttcagaattcttgtaaacttgagtgaagtttacgccagttttttgttcttgcattgggctagtcacttccaacatccatgttgaaggattgtagccatgttttatcttgctgacaccttcaatagccttcagaaaataaaagcgattcaatagcatgtttctcaatgcaataaggcaagcatatattactttctattcttttttctaacctcaaaatatctaatcaattcacatgaatgttgtcctagtggaccgacataaatctcttcgcctcctcgtttcattaggaaaagctgcaaatattaacaacattataatgaattgagtggatcagcaaacgatgttataacccaccaacaatttacttttccttttgtctatgtctgcatgatagaaaaaaatggactatacaagtatgatttcattcacctcatcaaaggattcaaatatatcaatgcttggctggtgaattgtgcaaacaactgttcttcctgtgtccacagtattcctaattgccctcatgacaatggctgctgctcgtgcgtcaagtccagatgttggttcgtctaggaaaatgatagatgggtttgcaactagttccactgctattgttagcctttttctttgttcaattgataatccgcttacgccaggcaatccaaccaaagcatcttttaagggataaagctccacgagctccatgacctcctcaataatcatctgcatataagataaaaaaataacattatctaaaaaaagattaaaaaaacaatctggataacatgtaaaagaatacatgaatattcatgttaaatacactgccatgaaataaaaaaattcattgctatgaatattcatgtcaattttatttttcatttatagcattctatatcagttcagacaacattttcttttttatgcactactctgtatttgaataaagtgaaagtattttctttatctgacctttcttgttgcagaatcaattttagtaggtaatctgagccatgcagagaacataagggactcataaatagttacatttggtgaatggatgtcattctgttcacaatatcctgaaactctagcaaaggtttcttgcttctttgggtagccagagatggtaatattgccctctatgtatccactagtcttccttccagccaacacatctaatagtgttgtctttcctgcaccgctgacacccataagagctgtaagtactcctggcctaaaagagccactaatatccttcagtagttccaaccggctctctgtagcttgtgttttcagtgcctacaagttttgtttggtcaagactattttttttcaaagattgctcataaatggtacaaatagatgcaattttccatatggaacatgcatgtctggtagacttggcaatatttggggtacctctggcatgtctatactgtattttatatcttcaaacgtgatggaaagaggtacaaatggaaggaccattcctttaattcctgaactagaattccctatcatgtggtttgaagttgcctcatcgttgttaacgtccacagtacctggtacacataccacacgcacatcagcaataaactgacatctcatgtttaaactttagattagtggtccaaaaaaatatttacatcttgtattgtcagtagcctgctctccagacggtgcttccaaaacttgaccagtgatattagcttgctttttatggaaagtttcctgggacattattggctggttgttgttcaatactacagagtacatggtgcaataaaattagaatttgtagatcttttagaataatagcattatttactaacaataaaagattcaagattttctatgactcacatgtgagaaatatgagacagatggtgtagaggacatttaatagaatcacatatccgagcaaggcaccaacaccaatccaataccatttggcctcaggaaaaaacccacgagattccagaactagccttccaagtggttcgctaaaaccagatattgtctattgtgtgatgataagcaaatgttttagcgagacatattctgatgtatggcttttaattgatcgcataaatatgcttttaccttgttccagctgttacctaggaattcattaactgccaatgtgttcagtgcatacataaggggtgatatccagtaaccccatatccaccatttcttaatttcctctgttaaacataaaacaaattatattcataaaagtaccacatccaataaagaaattatgtaagaacttatccacatatcattgtggtgtttcatagatagtttgcgtacctcttgataggatgaatccacttgaaagcatagaaattaatatgcaggatgagcccatagtacttgccacaaccggatcccttgtaagggaagcaatgaagcggaaaagtccagatgttgcctcagacataacaaaaagcgctaggaattgtctaaaaaatctgcatcattttctttgtttttattaatcttttatttaacatgagtttattgaagctagttagaatttcgttttccttacctctctatatttgggtcaaatccaataacatagtatgttaggaagacccaaacaatcgtattgaggaaggagataggggtcttaaggatccatgatggcaaggaatacgtccaagctggatagaagaatagatcccgttgcttgaagaaaaccgggagctttgcaatagctaggcccatttctgccaacccattgaacatgatcatcaacatgccatagaactgtgctcccatgtatatcctcccattttctatggagtcacgatgcatattggtacgcataaagacagtcattgtatttattgccatgactgttaactgaacatttcagagaaaacataataagaggccaaattaacttttgatcatttaaattttataggttattgtgctggtaaacaatggaagatgtgctggtttcagagaatcaccctaattgcctggaatatatagaggaatgagtttcttttcatgagtaatatttccctgtcaatgttagcttgaagtagttctttcatgctaacaccatactttgatgttctcagcgcagcaggatggctcttgcccttgccaaatgggactaccaactcagttcttactgcttgaccgacatgaaaagactgaaatgcctcagcaatctctgcagcagaaatatatcggtatgtagaatcaccatgtgtccagtattgtttctgatctttccttgatgtaacctatcacatttcacatataataagtcagacttaagcattcagatcaaatttaatcctatgattctatcatgatggaaatcagtgaggaaactaacttcctgtaagaagtcagcgacaccttttcgctcagggcatttgaatccaattgattgaaagaactcaagcacatgatcacgagggccattgtagacaacttgaccatctgagaggataattatttcatcaaacaattcatatgtctcgggcgcaggctgtagcaatgcaataattgtcgttccaccaagaatgtgaacagtctgtcggatggagttcacaatctggaatgttgtcgagctatcaagtccagttaatatctcatccatgaaaagtgctcgtcctggtgttaccagcatctccgctgtagcgtcaatattaggaggtggattagcttttgtcaccatatgccaatttattaactccaataataaattacctgtagttagtcgctttttttgccctcctgatatacctctcaccatattatttcctacaattgtgtcagcacatatatccaatcctaagatcttcaatggttaaaaacaaagtaaagaattattatggcgcgtacatgtcaaattacatgggaatgacttgcaattttcaactatgaatttattgtaaattaaaaaacatttcaatacaagtacataatgctcattcacctttagtatgtgatttgtgaccacctcggctttctgctctcctgttgtagcagcttgcatatgcaaaatgagaaattaatgttcctcatgaaatcttatgtcagaacatcaatagatgcttaaaaacaactaagcataactcaactctggttgaggtgagttgcgatttatgaattgcatcgtaccttcaaatataaatcaatctctggatctggtttgatgttttcttccttttctcttctcaatagttccattagcatatctgaacattttgtaaaaaaatgttaatattttgatctgatatgacatttatgattaatgagtctcaaactcgccatttccatatcttaccatagtgatggccaactccttgacactttgcagagaaactgaccgtctcacgaaccgttagttcggccatatgtaaatcatgttggctaacataagctgctgatctttggggcacaaattcatccattgtatgaccattataagttatagtccctgataccttttgtagttgcagtgtttcatcatatcagtacttcaaacagccctatatataggtgagccacatactacataggaaagcatgaaagatgtacctttacagttgatgggagtgttcctgctaaggccatcagtagtgatgtctttcctgagccaggaggacctaaaagcaatgtcattctgaaaacaacagataaggttaacttatatcacataaattatttggaaacaatcaattactaggaatttacctgtgaggctttacgatcccactcacattgtgaaggatcgatattttttgcttcttttttcgtgttatgtgaagagcgttccccaggccctgtttggaggtgagtgttgtcactacacatggaaaatagaggatgctaatgcaatcatataaaatgaaatgaaaatcccagcctctgcatgcttagtctcgtaactacaggaaatctttctggattccttgaggaaattggcacaatttccaaaaaaaaaaaaaaaaaaacttaggcgcattcttggatttctcatatttttttggttttgttaaaatatcaagacttcgattgaatatagaccagttttctgttttttagattactttctgacatataaaaacatatttatatatagatcagttttttgttttctggaactatttgttcgaatatatgtgtacatattatttaaaaaaatattaaaccgtccgtttcccataaataataattttgaaacattttttttattttagcaattaatttggaacgtctacaaatggactaaatatacgtacattaaccatttttcaaacttgcgaaatattgattttaaatttgtatatgtgaaaatatatgatgtttatatgactagcaatcaattcatatagaacgtgaaagtcataattgtgaattcagaaaatctgtatttaaaaataatcatcgctaagatggattaatatttcataacaactaaattcgaaacttatttgctaatgaagtcttcgttttcatgcaaaccattataattcactccaacaaacagatgcatgcatttgctttctatatgctcgaaattattaattgttaattaggaattaaagactatcatgttgtattcggcgtggagcttgttttaatctaaataaattgttataatttggacctccgacatatagatggacaggtgttttaattattaacatagttattttctcaaagtagatgcagatacctcgaatatgttagcataggtattgaaaatggtgggaaaacctctgctgccaacatatgactctgcttccacatttaagttctcataccgcacttcaatagtcggaagcttgattccaaccctgcacaaaagaaaacatttctctgaaaaggagaattgataagaaacctttctcagttggagaatgaagctttaacgcaacctttctctgaaaaggagattaaggatgctattttccatatggagcataataaagcaccatgtccggatggtttcctggcggagttttaccaagttttttgaaatgttattaaaaatgacctgttggagctttctaattatttccataagggtgctctacctttgttttctcttaattttggcacaataattttgttacctaagtgtgttgatgccattaagattcagcagtatagacccatatgtttactaaatgttagttttaagatttttaccaacgttgcaacgaatagaataatgggggttgctcaaaaagttattagtcccactcaaacggcttttattctaggtaggaatattatggaaggaatggttattttacatgagactatgcatgaattacatcataaagataaaagcggtgtaatatttaagattgattttgaaaaagcttatgataaagtaaaatggtcctttgtacaacagatgttgaggatgttgaggatgaagggcttctcgcctaaatgttgtgagtggatagcttcttttatttaaggtggtcatgttggtataaaagtaaattatcaaattggtaacaattttcaaacatataaaggtcttaggcaagggtatcctttatcaccaatcctttttgacatagtagctgatatgcttgctctgttaattaagagagctaaagaggtgggtctcttaaaagggattattcctcacctagtggatgatggtttgtctatattgcaatatgcagatgataccattatctttttggaacataatttgcaacaggcaaagaatttgaaattgattttatctgtttttgaaaagctatctggcttaaaaataaattttcacaaaagtgaattattttattttggtcaggcaaaggagtattatgatcaatattccaatatctttggttgtaagttaggttcttttccttttaagtatttaggaattctaatgcattttaggaaactttctaataaagattggaaagtaattgaagaaagaattgagaaaaagattagtagttggaaagttaaacatttatctgtcgggggaaggttgatcttgattaattctgtactttcgagtttagctatgtttatgatatctttctttgagataccgaaaggggttatccaaaaaattgattattatagatcatgcttctttcggcaaggggatgatcataagaaaaagtacagactcactagatgggatattatttgccaacctaaggatcaaggaggccttggaattacaaaataaatgacttttgagtaagtggttgtataagcaaataaatgagggaggggtttggcaggacttattgaagaggaagtatctttataataagtctataatctaagttgacaagaaacaaggtgattcctatttttggtcatggcttatgaaagtcaaaagtatttttttagatatgggttcttgtatcgtgaatgatggggaacaaataagattttggtaagataaatggctaggtaacttagctttgaaggataaatatccatctttatatgctatagtccgaaggaaatcatcctctattgccactattatgggatctgttccgcttaatgtttcttttagaagagctttagttggtaagaatcttatatactggcatgaattgtgtgcttctattgtacatattcaattgaatttttcttctgactgttttagatgaaattatcatcagaatggtaggttctcagtaaggtcaatgtatctagctttaattaacaatggttatgttgagaagaataactatatttggaaacttaagatgacgcttaagattaagatctttatgtggtacttgcttaagagggttgtgttaaccaaggataatttggcaagacggaattggaatggtagcttaaggtgttgcttttgtatgaaaaatgagtctattcaacatctgtttatggattgtcattatgcaaagttcatatgaagagcagttcagttttttttttgttttaaccttccaactagtatatctcatattttttatgggtggcttttaggggttgacaagaaaaagagtaaactgatacttgttggagcttctgccatttgtttggttctatggttgagtagaaatgatatggtttttgacaaatcaccatctatttcctatatgcaagtaatttcagggcaacgcattggctccggttttgggcacagctacaaagatgtgaggatgatggggagttcctaaaagttgcgtgccgcaagttggagtcgatggttattcaactatttgccaatcataggtggaggttcacaagtagacttcaataaatgtgttctccttattttggcttgggttcctttgtttttgttttgtgtgttctttttatctgaactacactcttttctagggtgctacttcgtaataattggctgtagctctttttgaagaaaggccgggatgttatattccattatctaaaaaaacaaaaggaaacattttccaattgaggattggaaataaaagtttcaaaattaatttaacatggatcatcttggtcttaattatcgattttaaaaaaatataggaacacaaaaggatatgtttttataaagtaaatttcactttgggtcacctcttattaccgatgttttgctttagattgcctttcatcaatgttttcactttggaccggatattgttgcctttggttcacattggaccatcccgactctcttctcaagcatatgaacaatctccaatacgttggtttttacttgtcaataaacttccacaactgtatgtagactatttctttttttttttttggggaatgtagaccatttatttgacacacaataaatcgaatgtagatggataaaatagttgggactaatccaaagtaataacagatccaaagcaaaacaaacggtaatacaaggtggcataaagtggaatttactttaactttttttctatccaaaatatactgcacctgtggagatgaccaaataaatatagaagcatatgaactgactacatgaaaattaatcattgaattaccttacaagatacactcataagtttattttaaaaaaattccgtgctatggatcggatcatcacttttggtactgtttaattcctaaaagtacaagtacggtgcaacctgcaacacaatttcaaaaatataccaccaaatttaaattttcaaaactacatatagtccttgagcgcatataatttacggggaaacggtacgtgttggtgtgtgtggggtgtgttcaacgtcgtgtacgtaatcgcaaaaaatagcagagaaaccgcgcacgatagagctcggctacacgcgtgagcactcctctgactgatcacccgtataaaaatgattgctaccagagaagtgatctttatgggtaatgtaaaaatcacattaatttcgatttaaattgaagccaggacataaaaaatttatttatagtcccgattaaaaagtagaacatataaaaattcatttgtagtcccggttaaaaaaacgttcgtgactttataatctttatagtaccgcggttggtggtactaatcgattaatttggccttaccgatccaaacgttccttgaacatgcagaggaagcccgcgtggtcgtcagcgacgcccgcgacgcgctccagcagcgcgcgctgctcgtcggcggcgagccgccgcacgttcacctcccgcagctcgccgtccggcggcaaggccagcagcgccgtccgtgctcggtcgtaggtcggcagcttctccagcgccgcccaccgcaggtcctcctcgtcgtcctccctcgctgacgacgacgaccgcgagaacacgctgtccgccgccgccgccgcccacgcccagccgccctcccgccgtccgccgccgcacccgtaggtctcgccgccgccgccgtccatctcgccgatcaatgttgttgcctccggccagtgatccgatgtgccacgagaccaacgtgaactgaggagatgctggaggaaagaaatgggcgcaattatatatatatatatatatatatatatatatatatatatatatatatatatatatatatatatatatatatatatatatatatatagcacgcgcacttcgaagcaaaagctaatgtagtgaaaaaatatatatttgttcggctttttaataaaaaatggattaaaattcagactctacttacctcttaaattggatgtactatacacagccaaaaatatatatgttcgaattagcacagtatttctttttaaaggatatagagcacgtccgtttgacaaatatgacaggttggagttgtcctgtatataataaaagactatccgccctcaactgtactataaataaatcatcatcactaagtattaattcttttatttaatattgtaacttgtttatgattttttttaactaaaaacacatgggtacgacgatcaaagaggctagatagcaaaatagatcgcaaatagatagcaagtagccaagtaccaataccgccggttgaagttgtaatagaaaatcaacatattttttaattgaaaatgttagtatagctgtattttttaattatgacaaacgtatgggcgtcgattatgttaatcaccactcatttctgattgtgcttatcccattaattgaatgcagttgtacatgcccttgtttaatttgatgtgtgtacaccaccagatcagtatatatactatattcagacaatttagggatatattaggatgggattggaaatggatatttcctcttttttcatcttgtagaagttaaatttaagcttacatgtttattaattgatatattacatactaaactatattgtgattttttttcataactatttggatgacatgtaaataaaaataaaccagaggacatcccctcgagggattaaaaacagtttgccatatataattgacgtgtttagaccgcgcactactatagaaaaatcatttttcatagtgttacccttttccttttactggcgggtttgataaaaaagcgcttgtgaaaataattgagagggattccggttaccgaccgctagtgaaaatacaattttccctgcggttgtcaaggaccaccgactgcaaaaatacttttgctatattaaaataaccaccaactgcgacgaatccatctttatctcctcctccccccagactcaacgccttagcgataactcctctcctcctcctcccttctacctctcctcctcctactcctcctcggcgagcagtggcaactcctcctccttctcctcaccggcctcctcctcccttctccatctcctcctccttggcaagcagcggcgctccggggttggcgcggtgatgggtggccggcgagcggcgcgcagtcttctcctcttcacggcggcggggcacgacctcctcctcttcgccgcgccatatgctcggggccagatatgccgcccgaccagaggggaggctggaaccactgccgcgacgacgggggaggccgcatccaccgccacgagaatgggggaggccggatccgctactgcgacgacggaggtggccggatctgccaccctgatgacgggggagaccggatccaccgccgtgacgacggtggaggttggatccgccaccgcgacgacgtggaggccggatccgccgccgcgacgacggggaggcgggatccgctagctgccgtgatgacgggggagccaacagggagggcggcgatggtggcgggagggtgggcgcggatctgacggcgtcggtgcttgggcggccctccttggcggtgaaggaggtggatccggcggcggctggcacaacgacgacagctgctcccgtgatgacaatgacggttaccgtgatgatgatgacaacggctaccgcgactccaacccactcccctctactgcctggcgaccacggcgtggacttcggcaggcggcgcccatggtgaggtgtcgcgatggccgccggtggtgcttatggatgtggcggccagtggcaacattttgaattttttttatcccaaaattgttttcactggcggtgcactttattttgccgctagccaaattactatttttggtagcagttgtcttagcatagctgcttgcgtaactcaatttttccaagcggccagctggccactagtgaaaacacattattttcactagcctttaggtaggggtgaaaacttatcggataatatccgacccgatccgctccgaatcgctctgaaacgaggatatggtatgggcttttcgaaatccggtagatatgaatgtggatgcggatagtataatgtggatgcggatgcggatatggtatctctaaaatccggtgaatgcggattatctgatatttatgtcggattatctgataggccactttccggataatccgaaattatcaacatatgtgatatctctatctattgcatataacataaattggttccttcaatgatctaattcatcaattaacctagatttcttagtctgaggctttcaccgtttcttgtcagacttgcctagctgtatttttatattatggacctcatattcatgttgtttggcacttaagcatataattattacgatggatcgtttattgattattatattattgttcattgcattactaacttgatattatattggttgcatacacacgtaacatccgataaatttattccattcccgaactgattccgcaccatttccgacatccaaaataatccgttccgcatccgcgtccgtacactatccgcacccgcttcgaatccgcttaaaaatatggtttaagatatggtatgaccgtccgaatccgctctgttttcacccctacctttaggcattggaggcacctctgtccgccaagaaaaaaaaaaccttttttaagtagtggcggctatctatgcaccataaccaccctataaatagtggctagatttttagctatttgttgctcattgataaatagcactttatattaacttacacggtcacgtaggtaaataaaaaagagctgccagaaagctgtatttgtcaggagcaagccactagaaattatgggaaaatttgaaccatgccacgcaaattttgcaaaatttgtgatatgccaccctaacccacatgtcattgactcatatgggtcctacatgtcattgagatacgggtggcatatctcaaattttgcaaaattagggtggcatggttccaacaaacccaagaattattgggttcgaatgacatgataccaccacctaaaattaaatcttcggaaggattaatttgattcttctcaatatcttgtactattttgttcagcgaaaatggtaaatatcttgtccaaaaacttattttaaaaatttaatatggcattaaaatgtggtaaaactttgctataaaatttatgagtagctagttgtttcgatacagcaataccaatacttcctctggttctatattaattgacgttttggacaaggttgtcgttaaacttttataactttgaccatcaataactttaaaaatatttagtttaaaaaaactagaaaaacatatatagatttgtctttcaaaacactataataaaagtaaacatgcatttatttattgcatatattataatagaaaaataaggtcaaaggtatatctcgtagagcgtgtcattatccaaagcatcaattaaaatgaaaccggagggagtaccaattaatagagaatcaaaaaccaattaccgagggtcgtatatactaaaagtctatacagttaactaatataatactccttcctttttttaatagatgacaccgttgactttttctcgtatgtttgaccattcgtcttattcaaaaattttatgcaaatgtataagatataaatcacacttaaagtactatgaatgataaaacaactcataacaaaataaattataattacgtaaatttttttaaaaagatgaatggtcaaacatgtgagaaaaagtcaacgacgtcatctattaaaaaacggaggtagtagttaacatagcttcttaggccatgtacaaagctagagtcagacatgagctctacgttatttagagactagcatcctacaacagttggagacaatatgatctctaatcattagtgtatcaaaatattttttccttactcttctttcctttctttcaccaccatgcaacaaaaattactctaataaatgttaagagtcgactctgagccgttgtcatgcataacaaccatatttctcttttgtcctttctctttcttccatgtcatcaaatttacttgcatggcaatagagagactactaataaagacggctgtacatgcccttatatttcttgcaataaatggatgatgaccctaatgatagtatttatatgataagttggcttgtacaatgatattttttgaaagttgtctttatcgttgtattgtttaaagtagagcgttcatcaatggcatttgttgtattttctattgttataaggctaagtttgattgagctacacctaagctattttctcattatctatagacacgtttcccaaacaacttaacatgtttttcgtataaaaaactttatataagaaagttttttaaaagtatcaaataaatatgtctttcaagcttgtagtaatactaaaataatcatccatcaatattccatcttggggttcattcgtttcaaagaaattaattgtaaacaaaaagtacaaaaatatattatcttttgagatgcgtactgaactaccattcgtttcaaaggaacaaaaaaaaaaaacctcctttccctccacttttagagggaaaacaaacattaaaaaaaataatccactccaacccaatgttgtcaatcttttgaattgtttgctgcacaactatagaaaaagttctttatatttttcaatcctttaagtgtacatgtattttcatactatttctacgttttaaaattcctataaaccgaacgagctcttgattagttttgcatgaagcaatttgctccagccaaaagtcctgcgcgagcgatcccttaattagtttcgattaattacatcagcgagcatggtatccccaattctcccaccaatgcaagacaagacatcagcaacatggtacagtacgtacaacggtacaagtcccccccccctcccccttcaaactcgtggaacatgtgcatgttgctatgtcttcccgtcattaaatgcattaggcagttttataccagattcaatacaatctttagaaaatgttataaaaaaacagaactctgtttagggcatgtacaatcactgagatggctgctctctctctctgtttcaaaatataaatcgttttaattttggtcgaagtcaaactaatttaattttgaccaagttcgtagataaatatagtaatatttataacaccaaattaatttcataaaatctataattccatataaatttataatatattattttgggttgaaaatattacttttttttcgttaaaccttgtcgaacttgaagcagttttattttgaccaaagctagaatgacttataatctaaaacagatgaagtaatgtttaaaatagttaggcatgtgcaacaataactatgtactccctctataaaaaagacatgtatccggattcattcctagattttgaagttttttgacgcagagagtagatatccattctttctataaagacccaaagctgaaacctcagtgttccacgtcatcgctaattctcagtcgttcgatcagtggatgagatcgcatattaaccattggatgagaagatccctgcatgagatgtcgaggagtgaaaaacctccctctgtcgaagtatatgatggcagcagctagatcaacgatgatatgcagtgactgcgaggattaatagtactccctccgttctaagtcataagacgttttgactttagttaaagtcaaactatttaaagtttgactaattttatagacaaatatagtaatatttataatactaaattaatttcatcaaatcaataattgaatatattttcataataaatttgtctttagttaaaaatattactactatttttttataaactttatcaaatttaaagcagtaaagtcaaagcgttttaaaacctgaaacgaagggagtataatggaagtatgcatttggtcaaaggatgataaaatgaattaagcacgacattaaagccattaatcacggccgctcggctgccttttgatggcgatattccattgcccgagaactaatctatcggaagaggaaccatccatcgggccatgtgtgatctagaagtcgatgtgtgatgtactggtggctgttcatagtgaggcgaagaggatcaatggctcgagtaaccatgtttcagaaacaggtatttgccctcttgagacctgcttctttgctggtactttgtttccaatctacttacacaatttgtctgtatagctgtataattgatcattctttcgtacaccctgcatacttacgtacatatgttattcctccaaatatctgattgattgatacgtgatacaatgttcaggcaccatccattatatttgttcgttgattttgaaatgatttttacatcatatccaaatatatatccaatgtttctgcccttgattatcttctacatggacctatccaacccactagctgcatttacagtaattgtggtggttaatagcgatcgatttcgcttcaggaattgtagcttgcacaagtcatggcaagttgtctgatgatccctgtgtcctattgactgcaatttaattgatctctgcactaaaacattgactttgcagccttcagtctctaatagtttacatgtatcattcgttctcccattttttttagtgaaatcactggtggagaaaccatctttcgtcggtcggacaaaatccacaatagtgtcccggttccactaaaaaccgggactaaaaatgatttttagttccggtttataagagcaacaggaatatttgatattcagtagagttaccaacccaagttaccaaccgagagtcccggttcatatgctgtaagggcttgtcgcccccccccccccgatctttacacccgattagtaacaccaactgggactaaacatcctaactttagtccaaagatcaatccctttgtatttggttttttcctcctccagcccaagccaagcttcaaaattcttctacaagaggggaggtcatgccaaaatttcttgtgaatttattttggtgattatatacaaatcagaggtatgtaaaaggttagcaacttcttcctccattgtttttgttgtcatattacatttggagctatgttttgtacacattattatctctaaaactttgttggaagttgatgagagagaaaatttgtgtagggaagaagaatatattgaaattttgtttatttacaattttataaaaaaaattataaaatagctaagaagaaatatatattgaaaattaatctaaaataatagaaaacaaactaaattgaaaactaaaagaagtacaacacattaaatattagtttaaaacttcaaaaataatttaaaaagaataatttgtgagattattttataattattgtatgaataatgatatgtcattactgtatgactatttagtggatttcactttcattgaataattttatgatttttttgcatttcatatagatggatcggcaatggatgtacgcggaccggtggttgaaagagtttattgacggcgtgcattattttttgagagtggcagaggctagcaagcataagggttttatttgttgtccatgcattaagtgcaagaaccagaaggattgtacagtaaggactattcatttccacttgtttgagtaggggttcatgcctagctataattgttggacatcacacgaagagataggggttcaaatggaagaagatgaagtggaagacaagaacattccggactgggttcagtacgctggatttgaaggaaatagaacgggtgaggtggacggggatgttgacgataatgacgctgcggatgatcttggtcagatgttgtaggatgctaagcaggattgtgaaagtgaaaaagatgcccataaattggagcatatgttagaagaccacagaacgtcgttgtaactaggttgcgaacaggggcataaaaagttgggtaccactctagaattcttgcaatggatggcaaaaaatagtgttactgacaaggcatttggcgatttattgaaactcgtcaagaacattcttccggagggaaacaaattgcctgagacaatatacaaggctaagaagatagtctgccctctaggactggaagttagaagatacacgcatgtccgaacgattgtatcctctatcgcggtgaggagtacgagaacctagaagcatgccctttttgtaaagtactacgatacaagattagacttgatgatccaggtgaagttgacgggcagccaacgaagaagagaattcctgctaaggtggtgtggtatttccctataataccagggctatggcgtttgttcaggaacaatgggaagcccagaatggtttgttggcacgcagaagaacgtcaacaggacgggatattgagacactccgccgacggttcgcagtggcgaaacatcgacagaacatttaaagactttggagaggacgcacgaaacataaggttcggtttaagtatggatggcatgaatccttttggagagatgagcaacacccataacacttggcctattatgatatgtatctacaacatccctccttggctatgcatgaagaggaactacataataataccgattattattcaatgcccaaagcaacctggtaatgatattaatgtgtaccaaagaccactggtcgaatatctgaaattgctgtagaagaaagaaggtgtcccgtatgggatgaggacaaataggagaagttgaacctatgagcactgctgtttgtaaccatcaacgattggcatgcacttagcaacctattcgggcagtcaaacaaggggtacaaggcttgcactcatagtatggctgaaactgaaagtacgtatctgaagcattgcaggaaggttgtgtacatgggccatcgtcgatttcttgttgcaaaccaccctgtacgaaagaaaggtaagcactttgaacataaggcagaccaccgtattaagcctaaacatcgcagtggaaaagcaatgtttgctatggtgaaaaatctcaaagtagtgtttagaaaggggcccggcagccaacctatagagaacgaagatggtcacgcgacgatgtggaagaagaactatattttttgggagttaccatattgggaatttttggacgtccgccacgcaatcgacgtgatgcacctcactaagaacctttgcgtaaatctgatgggcttttaaggtgtatatgggaagtcgaaagatacactggaagcacgtaatgatatgaagcatatggaacaacgcggcgaccttcacctagaaccaaaggagaaaggaagccattacttgagtccagccagctacactcttagcaaggcagagaaggaaagtatgtttgaatgcttggagagcatcaaggtaccatctggatactcctcgaatataacgtgaataataagcatgaaggagaagaagatcacaaatctaaagtctcatgattgtcccgttatattcacgctatagtaagtctcatgattgctacctattatattcggggtatccttcccgacaatgtccgggcaacaataacaaagctatgtgcttttataaacgcaatttcgcagaagatcatcgatccggatatattagaaggccttcaaaatgatgtggtgcaatgtcttataactaggtataaattgaatacttataactaggtacatactcataattttaaaattatgaaaaatttgggcgaatttgtgtatttcataccatggtgccccatatgagtgtcctatatattatgcatatatatatatatatatgtatatatgtgtgtgtgtgtgtgtattgaaacatatatatgcataatatatataaaccatgcagcaacagaggcatgcaaataaaaaaaagataaaagatcttgagtcctggttggttacaccaatctggctgagccatctttagtcccggttggtggagactaaagatcgatctttactcctggctttttcacttgggactaaagatcgctgtctttagtacaggcgggtccaaaccaggagtaaagacagtttctccacaactgccagcttggaagcatgcacgcgtgctttgacatgatcactttttctacaggaaattaactcgtacgtacggttaattgttgttccatatcactttcaatcgcgtagcaaatttcttatagcatgataaatcagtaactacgtacttgtcccaagcgactaattaatctattttaccaccagcaccaagtggtatgcatgacctcgtcacccatccgttgtggcacaaatttaagagagaaaactagtacatatacatgtacaagtagtagagctaaggtcaataatgcagcccactgttggctaaaaaaaataaccatgtcatttataataaacgttgtaactaatgtctatacaataggacatactatagcacaaatattttatctttaatgggacccaccatcttcccaacatgtagcagtttctgctcggaaatcctaatgggcgggtgatcgctgccccatcggcccagcgatcacctcccttgcccctccccaatactcagatacactcttccctcctctccccctttatcctccccttcttctcttcctacggtacaccacacaaatttttttaaaaaataaaatttttaaaaaataaaagttagaaaaatttatgtatagaaatactatatataaaaaatttgaattcaaattcaaatttgaatcgggcatgtacaattttgacttataaactttgggtctataaactttaggtgtataaactttagatgtatggaaatactatatatagaaaatatttgaattcaaattcaaatttgaatcagatataattcaaattcaaatttgaatcgggtatataaactttaggtctataaactttacgtgtataaactttagatgtataaaaatactatatatgaaaaatatttgaattcaaattcaaatttgaatcggatatttgaattaaaattcaaatttgaatcgaatataattcaaattcaaatttgaatcggatatataaactttaggtctataaactttaggtgtataaactttagatgtatagaaatactatatataaaaaaatttaaattcaaattcaaatttaaatcggatatataaacttttgacttataaacttttagtctctaaactttatatgtgtaaacttgatgtgtataaactttaggggtataaatttactaaaataggaaagtaatgcggtgccaaaaaagaaagggaaaatttcatctataccacaaacttttgagcagtaccaaaaaatcccaccttcccaacaataccacaaaacgcaacagaagtggaacgggaagtggcgtttacattttgtaggaccaaaatacccttgtgcacagtggagaagatcgggagaccgtgcgacgggagagatcgcgtgcgagagtttctgttttccttttcttttactagtaattatgcacgtgcattgcacgtaatagccaaaataaattaaatcaaacatatcactatgtaaatttaccaacgttagtggctttcaacttaaacactacagtatattcatacaaagcagcacaaattggcaaactatatgcttcgtttaattttataaaaccacatccaataatataatcttgaaataatccaacaatagattttgatcataaattcaagtatagtacggattcttgaagaataactttattaatggacaaaaaaaaaagtaaagtgcacaccctgaaactaaattttcatttgtagtccatgcatggtattaatttgtttttccataatctccaatgagtgctcttggcagaaaattgaaataaataacaatgctaaaaataaattaaagggtccaataaccatgtatagtatgacaaaccgttttcacaacaaaatctgacaataactgtttgttcggtactatccaactatccaactatccaagatcaacttctcatcgaacttgtgcctcgcattgtcctgcttcaacctcacaatcccatatcagaatggctgcacactggatgtgcatggcccctttcaaagtgaacacactattattcaattccagcatagctaggaactgcccatcaattcacccaaggaccagggcactaccaattgaatgatctacttccaagtacaggtttcagcccccattcagagatcctcaaagatgattgtgtcaaaagcaatgttttaaatagcgtgctaagacatttagcgattagcttctcaaacagctgtagcggcagctatagcgagctaaacagagctatagcagctaaattatacatgagagcaaatagttagaacccttgtcaaacagctataacgggagatttaaaaccctggtcaaaagtatcaatgaacctaaacatgtaagccacattgccagaaaaaaacgtgagcaaactcaatgtataacctgagattataacctcacattggcagttgatgagtttgatctgtaaggtgctataactttacattatatcatacccaataatgaatactaaatcatatgtatagttagattgaaggggaaaatcatctaatttgagaataaaatacaatatgattctataattttattttgaaatttctggctgggtatataattcatagatctggctgatgcaaagtatggttctctgtcgtttgtacagaatatagacttttcaattaaatatacaagtcaaatttgttatctaccagttttttttcttaatggtgcacttatccatattaagattaaaactacagctttcttgtgaggatgtatattgtatctgtttggaaccggcctatgcaaccttgcttctgttcatcattggagaagtaaaaatcttgccctatagtcagtataaaactatatttagaataattagattgctctatagtataaaaagaaaacaatggtttcagactatcagtctcttgtcaatctgctaacatataattatctaacctataggtgttattggaatggaagaaaaattatatcaaaatatcaaacataaatcttaagttcttgcaatttgctacatgacaactgaatgttcctcatttccatcttacaaaatctactctgagttccaagcacactatatactttttttttctggaaaatgggagtttgatagtaataaggaaaagagggataaaaataatgtaatcatgcagaggttaataaacacaataacaataatcatgcagaggctgtcttgttgaaaccacatcaatcaattcaacaactacacaataacaatcagtaattttctctacaattaaaatgaacagaaaaggcagaatattttggtttccctagcaaaatattcaacagttggctataattcaaaaaattttgaatactggataaatatgagttgggacgtcctatggttgccctagggcgcacacccccttggactaagcccatgacacaattataaggcccaaaacccaaatacaagattgttgaaatggttactatcaaatattcaacagttggctataattccagaggtagaaatcatcatcttggtagggttactattgtttgctcagtagttttatgaacttgatctctcatagataggattttttatgatgaactgtttgtgtttgattctggttgcagtacctctcgaacaactttgtttgccaataatgtgaagttactacaactacagctccttcaactcccttcttatgtatctgaaaaccattcaagttatgttatcagcatttccgataaatataaagaagtcaaaatcacagtgaattttcggatacgtaaatccacatgcatatgtttgttaaacattatagacccataatgtaaaacaaagtgaatcaaagtatacttgactgcatgacatatcagccaactaacaaagaaaaaaaacagccattaggagtgaggacttcctaattatcaggaattaggagtatagaacttcaaggataacatcaggaccaagtaatagatccattatgttgaaaaaaaacaaaagtacgagaatatggttaggtaatcgaaacagatagctagaccaaaacatagtcattgattttacttcctagcattggattcattatattgaaaacctgaaacaaaatatagaaaaaaatacagtaaattggaactcattagaaactccaattaaggttaacagcttaggtcaagacaaatacttatccacatgcctgcaggtacacggcagcatgcactatggtaaacatccaaaaaaaagcttcaatgataatgttcagaaacttgcctttgcagtgagaagaatgtggagttgtggttgcagtcttgcagaggacagaggagattggcgcgtgaggaccagcagaatcagtagcacctcctcaccttctccaaaactttcattaggtgtaacgtttctatctattgtacaatttatcgccaaatcagaaacctgcaagagaacaagtcgaacaatgtggcacttgatttcataaaagcggcagtattatgaactatcagctatctgattgatagcaagaagatacattttgtagtttatcattatatatacatatcatccattccttataatgctagtccagattaaatcatgcatagtcatatatggaatatggatatttattcaactaaaaacatggcacataaaacattatacaactcaggtccacattcaacttgaattgctgtcacagaaaaagggaacataattggaagctgcacgttgagccaagaacacaataaaaaacacaccatttttacgcccacactgccggtacatattttatgcaaacaagcatataattatgctagtccaggactccaggtcaaatcagtacagggagatatgaacgcagaaaggcactcaccgttgtggaactcgtgaccacaccgctgcccgccatagacctcctgtctgaatatgtatgctaggtcctaattcaagtgactggccaaaaaaaaaaaaagaaagaaatcatgattcaatcatttgtggtcacaatcaaagttcaggcaatttatgaaatggagctatctctaaaattttcaggttaggataagaagctggcagtgtgggcggcaattagacgacttcacttaatgggagtttggcaagttattcatgaatggaaattagtacacctttgaaatatgtacaattaccggcagtgtgggcggcaatccgaggttttaagttagatatatacatattctgaaatatataccatgtcctgaatctgaaacaacaccacttgttttcttcaagtactcattaaaaaaattatgcagcaatcaagcaatatcactacaagtgggacaggataactcataaaaacagtaggaacgtttattttggtcaaattgaactgaaaagaatttgtggtcctggaaataataacaattaatatacacattgggagtaagaaaattcaaccaacgacatactgttgtgagaataatttagggtaatctacagacggagttcctcactgaaaattttgtgaagtgatctacaaatgagatgggagcaaaggggcttgtgcttcagattaattttgcatatgctagtcttcaacgcacaaaaaaattgtgaatgtcagatcggagctatacaaaattgaaagcaaggcaagcattaaaggcaatggttgaactaatatgcacggaagaatgtaatatgcagtttggccaacctggcttaggcaaatcaacgaacacattgcataaatcctagggattgataaatgctacgataaaaatgggatggtatcgaagcatcgtttagtgattaactaacctaattaaggatttagggatggatcgagcatatgattgagaggctgagagctggcgttggaaggcagacgcaccagaggcgtggtggtgcttcgcgcggcgaggaggtttggagagcgcaggggaaggagcagtgccgggggggggggggggg

SEQ ID NO: 20204 - DNA, 3409 bp, Oryza sativa
cggagtgggaagtgggagatcgctactaattgaaggggtgttccactttcgatataaaccattggatgaatagatctaagggtcagaaaagagatgtttgatgaactcgtgctttttttgttattctagatgttttccttttctgtggaaaaaaacgtgcaatagattagatcgatcgtttccttttctttttaaatctctttttcttccttggaaaaaaagtaattttctgtttgcgtgcgatagaattggatcgatcgtttcttcttttatttttaaatctctatttttccaaaaaaatgtaattttagttttttaaaaaaatctagttgttaaagaaccagcatgacatgcatggtgagcactttgtttttttttttaccattatttcttaattacgtgcacctactgtaaagaaaattttcgtcctttcatgaaaggaaatattatcaacaaagttttgcaaagtaaaaaggataatatttcttgcataaaaaatacatcatcttagtagtttctaggtgacaaaggaaaacaacattgacaaacaaaatgactaatccatcggtgcttctcaaactcccccttgatagcattgatagcatgttgcctcatagcaagtttaaattcttttccattggggaaattgacgtttttactaaaatttgggtcctccctattatgcacatagatagggagtgtattttcatctagtggtccatcatattcacacacaaaaagtggatcagactcatcgggaacatctgagttacaatcatagaaggtattgttgcctctttaatacacacggtatcatcaaccccatataagtgctcctcatcaacaccaattggctcatcttcctcattcaatctatctgggtcaccgttaaaagcatcagtccaaaacatagcctgccattgtgatatatcatgtattgtggtgccatgctccttcccaccagcaacatctgcatctacattagtggcctttgtattagcaacatctactcctatcccaggcttctctatcccgttagcaggctcctctatcctgttagccgcatctgcatcaactacaacccctacttgatttacgttggttcccctttcaggaatagccctggaaaatacaaagttgattctaccgttagttcatacctacgttatagtctaaatattctacttgggttaaaaatcacaatgaaaaagaacataaaacgtacccgtgaagaagcgcttcgtctgagggcggcaccatcactcgtatccacagaaccacgatgtcacgcccagaaattcacgaaccagaatttctaagttgaatgtgcattaaacccctgtccaggaccagccagggtacacaaacgacaattgttgacatacagatcgacgtcttacgaaaatataaaagattacaaatgcagcggaaaagataaaacgagctagactcggaagctcgacttctgcagcgggcaactccactccacaggcatctcttgacggcagcgacgaaaccaacctcaacaagacagctccaactaggaagatcttcagctctggtgtaggggaaaagagagcaagactgagtactacccactgtactcagcaagtcataccggaagaggaggtatgatgcagggtataaccaaaaaaggctaaaggttcatttgcataaagcaggcatttaaaaccagtagttgaaaacggtaaaacagctgtagtaattaatcaatattaaccaatcactgttccacgaaacaccacgttgcaacaggcccaaccaaccacctgaactacaccaattcattaagcgaaactaggggtgagactaatcacggtgaatctggttgatcgcccataaccgtgggcacggctattcgaatagttttactctggccagaggtgtacaactgtacccacaaaacacgattccacacatgtcaccatgccccgaagtatcaccatgatactgcaaagggggaaatcgtgacaaaaccttccgcataaccctcccctacccatccacaccacgctaaggtttcacccccacccccaacgggcagtgggcggtcccctcttccgccgcggtgaatccggcagctggacaaccggacaccccggctgacccaactccatcacgcccaccctcgccaccggtgcctaggaaagggtcgagctataccccaggtcaagcagttacccactcccgcttgtggtaagcacggtaagtctcccagggtttcccgtgaaccggtacttaactgccatgggtgcgaccagcaaaaccatgcacccacagcccaccattcagtgtattttaattaactaacactattgcggtggcaccaatccaaagctatgctcatagtcatagtctatgtaataatgtaatccccatttgtgtactagtggaactaagcatggctaagcatttcctaaaccaacatctaatcattttgatacccaagttatcaatggcatatggtaaataatatagggctgagtaataggacccataccccttacctctgtaaatgtatgagacactgtagtaaaattcaggagatttgtcaatagcgtacaatatgatctaatgtaatgcatgacttgccttgctctcgcattgatgagaccacagcaacgtcttcgaggaactcgcagatcgacgaaacgatcgaaacctatacgacaaacaaagcacacaagcaaaacatgctataagactactgaaacagagaacaaaactatttttaatggattctagggatttttatgaatttactgagacttgaatggacttaaacggagctcggatgaattagatatgaattttagaaaataatctgtgtttttactaataaagaaaagtccttaatcaatttattgcgcaataatacccagggctgacgtcacccaaggggagggggcggcgctgacaggcggaccccgcgtgtcagcagctcaagagagagggagggggcgccggcacgtgggccccatgggtcagtggcacaaggcggccggtccaccgtggaccgggaccacgcgggtggtccaccgccggtccacgggaccgacggtccagatcggccgggaggccgatcggacggcacggcggcggctaggcacggctaggctcggctcggccggccatggggagcggcggcggcgaacggtcgccggtgacacgggaggcggcgacgactgccgaaagcggcggcatgggaggcggcggctacggccgaaagcggcggcacgagggagaggagagaaaggggaaaagaggaggcgggaggcctcaccggggtttcgccggcgcgagaggaggcgacgactaacggcgacggcaagcggccggaggacgactgtgacaggcggacaaactccgggaccacctatgggacaaa

SEQ ID NO: 20205 - DNA, 3434 bp, Oryza sativa
gggaaaaaggaggaaaaagaaaaagaaatagaagaaaggatttttcctgggatttaaaattgcactttggctcatttttaattggttaaaattacttttaaggctctgaaaattgcactaaaaatcctgttaatgcattagggcatggggaactcaagaaaaattccaccacgctatttctgattgttgattttcatttattaattagggaattagctctaggttaattcaaaccattttcttcgaacgatttatttaacaattttttaaagaaagaagaagaggaaaacttccgggcgtgacaaacctaccccccttaaacggaatctcggccccgagattcggaagagctggcgaaaaggtgcggatgggtggccttcaactcatcttctcttttccaagtggcctctttctctgagtgatggctccactgaaccttgcagaatctgattactttgttcctggtccttctctcactgatttcgaggatacgagtcggcttctccacatacgtcagatcttcctgaatttcgatttgatccggacttgcctgttcctcaggaactctcaaacatttcttcaactgtgagacgtggaacacattatgaatgccaaacatgttggagggaagctcaagctggtaagcaacttcacctctacgttccaaaacccgatatggtcccacaaagcgtggtgccaactttcctttggtttggaagcggtgtactcctctgagcggagtgacacgaaggtacacatagtcccctgcttccaaagtgagctccctttgacgattgtctgcatagcttttctgtggagattgcgcgattctcaatctttccatgacagctctgactttctcttctgcctcatttaaaacttctgtaccaaacaactggcgttcccctgtctgattccagaagagcggagtgcgacacctccgtccatacaatgcttcaaacgttgccatttgcagactagcctggtaactgttgttgtaggagaactcagcatatggcaagcttttgtcccatgctccaccaaaatcaagcgcacaagctctcaacatatcctccaatatttggttaactcgctcggtctggccatcagtctgcggatggtaggctgtgctgaagttcagacgggttcccaattcttcttgcaatttctgccagaactttgaggtgaattggcttcttcaatcagacatgatcttcttaggtacaccatgtagacacatgattcttgccaaataaagctctgctaacttcttccctgagtaggtagtatgcaccggaatgaagtgagccactttagtgagtcgatcaacgactacccaaatggaatcatgtccagatgatgtcctgggcaagccggtgataaagtccattccaatttcttcccacttccattctggaatctgaaggggctgtagcagacctgctggcctttcgtgttctgcctttactcgctggcagacgtcacagagtgcgacaaattcagctatttcccttctcatgcttacccaccagaatttttccttgaggtcttggtacatcttagtactgccgggatgaattgaataccgagtttgatgagcttctgtcagtatcaagtcctttaactccttgtttttaggtacacacaatctttctcccatccagattgttccttgttcatcctcaacaaaacctcgggcttttccaactctcatgttctttttgagctcggctatctcaggatcacttgcttgagctatgcgaacctgctccaccagtgtgggctatgcctctagggcagccacgaatccgtgctcaactataccaaggttcagatgttccaaatcacgttgaacctcacaacacagtttctctacccatgcaacattgcagtagctcttcctgctcaaggcatctgctaccacattagccttgccgggatgatagtgtattcccatatcataatccttgatcagctccaaccatcttcgctgtctgagattcaaatcaggttgagtgaagatgtactttagacttttgtgatctgtatatacctcacaacggttaccgataagatagtgccgccaaatctttaaagcatgaacaactgcggccaattccagatcatgggtcgggtagttgccttcatgaggacgcaactgtcgtgaagcataagaaaccactttgccatcttgcatcaacacacatcctagcccctggcgagaagaatcacaatagaactggaaatctttcgtctaatcaggcagaattaaaactggagcagacaccaaccgtcgtttgagttcttcaaaactcctattccattcagcagaccagataaacttttcctccttcttcaagagctgtgtcattggcttggcaattttagagaagttctcaatgaaccggcggtaatagcccgcgagtcctaagaaactccgaatctgagtaactgtctttggtgaggtccatttggtaactgactccacatttgctggatccacagccactccttgagcattcacgatgtgaccgagaaactgaacttccttaagccagaagtcacacttgccgaacttggcatatagctggtgctcttttaacttttcgagttccaaccgaagatgctgctcatgttcttcctgggacttggagtagatcagtatgtcatcgatgaaaaccacgacaaacttgtcctgaaattccataaacaccttgttcatcaaattcatgaagaaggcaggtgcgttggtgagtccaaaagacataactgtgcattcgaacaacccataatgactgatgaatgctatctttggaatacctcttcgctgatcgtcaactagtgatagcctgatcgcaggtctatcttagagaacaccgtagctcctttcaactgatcaaacagatcatcaattcttggcaacggatacttgttcttaatagtgacctcattgagtgtgcggtagttgacacacatcctcttggttttgtctttcttttccacaaagataaccggagcactccaaggcgacgtgctcaggcggatgtatcccttctatagctgttcatcaacttgctacttgacttccgccaactcgttggctcccattatgtaaggcctcttgtggatcggtgcagttccaggtgccaagtcaatccggaactcgatatccctttttggtggcattgttgtcagatcatccagaaaaacctctggatactctctgactatgggaatatcctccaacttcttagtggttttctccactgctacctcttgtccttcaccaacagcctggttcaaactgatccctggcttctgcggcactgcagactggaaggttaccacttctcctttcgcattggtcaacttgatgatgcggctagcgcaatcaatcactcctttgtgccgtgtcacccaatccatcccaagta

SEQ ID NO: 20206 - DNA, 15083 bp, Oryza sativa
  unsure (1)..(15083): unsure at all n locations
tgtgagaatttctaggtcatgagagcgaacatgnaggctcctttttttttgcgaattttagttagttttaaattcctatatgaactctatactctacttctaatatttcttatttttcaattccaaatttctactttttttcttaattgtatttctatatgaactctatactctacttctaatattccttatttttaattcagaatttctattatttcctaattgtatttctatatggactctgtactctacttctaatatttcttatttttaattccgaatttctattatttcctaattgtatttctatatggactctatactcctcttctaatattccttattttttaattccgaatttcaactatttctaaagtgtatttctatatagactctagtctcctcttctaatattccttattttttaattccgaatttcagctatttctaaattgtatttctatatggactctgttttttctttttgtctgattaatgtgagaatttctaagccatgagagcgaacgtggaggctcttttttctattcctttaattatataatagatagattgtgcatgggcatcacgttaaatgaagactaaatcaatataccaaaccaaatcattcgaaactaccctcaataccattaagcaaatcgatttatattggttttcaaagttatggaacgttctatacctatgcgaaccaaattccaccaatagttggaggtctcaaagtggacttttccaatggcatttctgtttcctgctccctagtcgtccctactgtacgctccatgtgatctgattgctgtgtacctaaaacctaccagctggtgtactcatcatagtactactgactattgactattatagcaaggaattcaatacttatattatatacacatgtttaagttggaaactttttttcaaactttcaacttttttatcacatcaaaactttcctaccacataaacttccaacttttccatcacatcgttccaatttcaaccaaacttctaattttagcgtaaactaaacacacccatagtttaggccccatttgattaaaaaaattcataaaattttagaggattttatttctataggaatttttcatatataaccctttgaattaaaggaatggatcttatataatcctatgaaactcctatggaatgtctaatgccatgtaagttttggaggaaacctaacctgaggtagaacctcgtggaaactttcttttgagtctttatctctcttctaattcatgtgtttttcctgtggtctaatcaaacggtcattcctgtgttttttttctgtgttttgcaattatctgttttacacttatattcctattaaaattttccgtttttcttattcctacgtcttctcaaattgttgcacaatgagaaaacgctactaatattttttatacgtttatgctgtaccaacccaatcatatgttcattattttagtatgataaccagcaatcgtcgaacctcagcgaaaaaaacctgttcatcatcagttcgagtgttcaacgacctttgccctccatcccaaaatctcaccgtcaccagcaaaggcagccatggatccagccaccaccgagctgcggttcgacaccccgctccttcgcatttacaacgacggccgcgtggagcgcctctttggcacggaaaccacaccggcgggcttcgacggcgccaccggggtcaccttcaaggacgtcgtcatcgacgacgcccccggcgtctctgcctgcctctacatccccgacctccaggcttccggccccggtcatcaccgcaaaaagctacccatcgtcgtctacttccacgtcggcggcatggtcctcgactcgaccgcctccccgacgtaccacaggtacctcaactccctcgtctccaaggccggcgccctcgccgtgtccgtcaactaccggcttgccccggagcacccgcttccggcggcgtacgacgacgcctgggccgcactcagctggaccgcgtcagctgccgacccatggctgtcggagcacggtgacgtcggccgtgtcttcttggccggtgacagcggcggcgccaacgtcgtccacaacgtagcaatcatggccggcgccggccaatctagcctacccccaggagcaacagtggaaggtgtgatcatactgcatcccatgttttccggcaaggagccgatcgacggcgagaacgcggagacgagggagctgacggagaagctctggcccctgatatgtgcagacgcagaggctgggctcgatgacccgaggctgaaccccatggcagaaggagctccgagcttgcagaagctgggatgccggaagctgctcgtctgctcggccgagagcgacattgtgctggcgagggcggcggcgtactaccaggcagtgatggcgagcgggtggcccggcatggctgagtggctggagtccaagggagaggagcacgtgttcttcctcaacaagccggattgcgaggagtctgtggcgctcatggacagggtagtcgccttcctcgcgggtaattgatgaaagggatcggatgaaatcaaaactgttcttgcttatcgcaagcacataaatttgatcgtgaataatgggagattggggggagaaagggatgggattttcctcttgttctctgcaaccactagttcaagaaagatgcgctaaatcggatcaagttcaggctttgttagctgtggttgttaagctctaagatgaaattcatgaggtgtttaatagaaggtgaaactgaaagcgtgtactgggtatgatgatttattgtgaggtaagttcggtgtgaaatatggaacatgatttaactgtattcgctattcttgaataaatcatgctcagtaaacaaactgtactgggagcacatgacaaaaccatttgtcaactgcagaagttgctcacctaacacgatttcaggtcgagattcgaggagatccttcattttggcctttattgcgtgaatcagagaccatttaccacacaaatgaaccactaggtgcaaacattcctagctacgattaggttttacaccctccttcagagtatgataactgataagatacccaatattacaaactcaatagcatcatctggactttagactgacattaaaaaaatggcattttttttggtgattagacaatgaagaactagaatgagtacactcattgatgttgcagttttctaaaatttactcaactagaaatgaacaaaagggatagggcaaaatttcatagctatgctgaaccttgacgcacttaggaaattcataatcaactaaaatattccttttcttttccacttcaatgatgcaaatcatcaatgagaatcaaaatcatagacagtatatattcctccctttattactagttacgagtagtagtagtataatcgctcaccggcgacacgagggataaccgaagcggctggcttcaacagcgccggacgaaatcggtcacgacggcgagctccttgacggcattgtcgcagtcgggcttgggcaagaagaagacatggccctcgccatcggtctcgtggagctccacctcgccgtcccacccgcactttttgatcccctccgcgtacgcgcgcgccctctccacgaaccagcagtgctccgccgtagtgaccaggacgcggccggccccgagctgcctccactcctccggcgacgccagcgggttgacgcacgggtggtcgaggccgagcttgccggcgctgacgaactcccacgtgccgtggaacgagccgcggtagccggcgtcggtggactcgccgcccacggggtccttcccccagaagtaggggtggaggagcaccacgccgctgaccttgtcgccgtagccctcgatcccttccttccgcagccggatcgccgcgttgtgcgccatgttggcgccggcgctgtcgcccgcgagcacgacgcgggacgcgtcgccgtgcgcggcgagccatggctcggcgccgtcggggcggcacgcagcgacgaccgccctgagggcggcgaacgcgtcgtcgtaggcggccgggacgggctgctccggggcgaggcggtagtccgccgagacgacgacggcagggaccgccgcggcgagggaggcggcgtacctgtggtagagcggggacgcggcggtgtggaccaagaacgcgccgccgtggaagaagagcacgacggggagcttcttccccggctccacaccaggcgggaggtagagacgagcggagatgccggcggacgggtcgaggacgacgtccttggagacgacgccgttggcggggtcgccggatggggacggcgggacggtctgcgtgccgtcgaagcgctcgacgcggccgtccttgtacatgcgcaggacgccgggcatatcgaactcgatctcggaagcggcggcgtccatgacggcggcggcgacggtgtccgtgctgcggggcttgaggctgattgggatcgggagctgcaagagcagagcagcaagcggagcggcgagcagagccacacgcagcaaccaacgcgacaattctggagcgggtgttgccatcttgatggcgagcaaacggcccgaccaaccagagatccgctgacctgaatccgaatcctacgccttccgagtagacacgccatctcaaagtctctccaaatcgtaccttccaccactcatcaaccactctctgatctgtagtgttatctctgcttctgtagaaatccgtatcacattgcttacagagcacttgtttagtttccagttttttcttcaaacttgtaacttttccatcacatcgaaactttcctatacacacaaactttcaactttttcatcacattattccaatttcaaccaaactttcaattttagcgtgaactaaacacacctagaagttgatgtcttgacttccttgcttcctgcacggctgcacggtcatgccataaacagaccatgaattttggaggaactttaggtatttgatgtggtaataggaggtacagtatcatatttcttagcataaaattgagattataagaaatagcacttgagaatctagaccccaatttctgaatgctaattggaactatttacacgacattcaaaagtatttaggtgtcaaaacactcgaaatttcactattagtgagtgcttgggttttatgaaagggaaaaattgattaaaatcagggtgatgcttatggctagtgtgtgtttgagtgttgtggcttatttggaatgattgggttttttcaagacatcttggttaattcttccttgcaggtaatttacaaagctttatccttttttcagaaatggtgtatcatgttaagaaaagaagatcaagctactatgctaggttggcatgacttgatgatggagggactgaattaagtgaaaccatgttgccttcctgcagcggtgtagttgatgcttagtgtacgttagtaggaagtttttttaagtctgttattgtagctgcaatagtgggtgtcgttctgcttgctctgagacctggccctgtttgtcggttttactttagtttgttttgcttgtctttccttcagtgtaagactctgtgatgcttttggccttttgggctttcttataaaactggatcaatgcaaatttgatctgttaaaaaaaacaatcgaatttttcagccactgattcaacattgacggtcatggctatggttcatgggccctcaacaaaatacaatacaataaggatggcccatttgcaaaattcgggggaaatttgggaccataatggtgtagtcacatgtctagttacagcgtaaactaacgtgtaaaagtgtcacttgaacaacgtaattggtgcagctcagtggaaaggaatcatccttgtgaagcggagggtgcctggttgattccctgtgtagtttttctccaaaaaaattgccgctaggtttttatccattcggtattaatttattatcaaagttcttttgctatcaagtcctaaaattagaataagaatctggtccttctggactacccggagattctgagagtagttgtagacttgtagtttagaagctcttttaaacggagccttattaccttctgatagttgaattatccagagattgtaaacttgacactatgaaatgtggccatatttgacaaagtttgtcctatggattggtggtgagcaaatgattgaatgagatatttgcttgaatccaaaatatctcaaagtagacacaccatctcaacgtaatctcaaaatctccctaacttaatccgtacctaccactcagcttgtccttgatctagtgatgcttctatagaaaccaacatcacattacttgcaggagtttgatgccctgacctcgcgaaaatcctaataagagatcaatcgccccgcgtgatcacctcattctccacatggttttcttttttggcaccgcattactttcctattttagtaaatttattcacataaaggttatacacctcaagtttacacatctaaagtttatacacctaaagattagaaacccaaagtttataagtcaaaagtttatatatccgattcaaatttgaatttgaattcaaatattttttatatataatatttatatacatctaaaatttatacacctaaagtttatagacccaaagtttataagttaaaagtttatataccagattcaaatttgaatctgaatttaaatatttttttatacatagtatttctatacataaatttttctaactttgttttttttattttttaaaaaaatttatggtgtagtaggaacagaagaagagaggaggaagcaggagaggagcgtattaggggggatgggggtgatcgcccacagcgatcacccgcccattagcgtcacccctagcctcgtgcacgacaatgtcataaacaaaccacgaattccagataaattttaggtatttgatgaggtattgggagtacgattttttcagtgcaaaatttaaaatatagagatttagacatgtatattagagctagaggttctaagttgttggtgagaatttggtccaccacttctagagatattagttcatctcgaaaactggactatttgaaggggttagagattctaggattagcatttagctaaagctaccaaaagctcttccaaatgaggacttaggatctgtttgatggtgtttctagcagctgcagcttctctcacaatcgaaaactcactcaaatagtctaacttttcatatagattttaacaagttatagttgtacaatccagaaaataaattagaagccagaaactagattttctaagttctatagattctcaggattctcataagctacttctcaaaatctggaattcctgtttagggagttttaaattctgataagcaactggttggcacttaggctattcatatcacgtgtctagaattccttcatttttcttatgtagtaatcaaaacaattttgttgtgtatcaaaatctcataggaatccaataaacatgacattttatttctatgttttctcaatctgacgtttaaaaagggctatcagtcaataagtagcttgaaaaactgtttttttaagaacaacaatgagtattacattcaaaacttgatctagctaagtaaccaaacgaagtttcacacgaagcaattcattcccaagcaaaggtttttctacaatccaaacttcaggctgtctgtgccactccgctccaaggcgacatgggcggcgacactaaaccccgctgctagctcccctccctcgcctcctctgcctcgccgccgcctgagcagttgccaacaaagccgggcggcggtgaggaacttcttcttgctcgcaccacaacccgacatatggagctttgatgaggaacgagcggaggggcagagacgtggtcttcggcaccgctggtggctggaggcgatggatccgaaactgacgaaggaggatctgccccgctagcagctagatcgggatggagcagcgccggccatgccgcgtcgaaggccggcaaaggaggttgagccgctggcagagaaggccgagacgtaggcgaagggcgtcatggtgccggcaaaggacgttgcagcgcaggcggaggagatcgcggcgccggtggacgaggtggtggcggggccaaggggtggtggcagccacgagtggtggtggaggtggcggcatcccgtctagatccatgccgttctgaccggatatgggaggtggccgctggcggtggggttgagtggtggcggcgtcagctggcgatggtagctgcagtggcggtgatgatcgacaccagtgatggcgactgctagcggcggtgtcacccaggccagcgtcatggcagaggcggcgggttggcgtgtcgtcgacggcgacagcacgaggtggaggcggggaaggaggagaccggtgaggtgtcgacagcgggatgcgggcgatggcaacttcggcaagaggtgcgggcggctgtggatgagatacaggcgactagccgggagggagggggaggcatgggcgacgacagcagctggccgacggaggagccgacgtgactggaggcgcggctagaggtccgcacgacgcgaggaggcgcaaccagcgggtggtagaggccggtgcgttgtggcggcatgcggaggctggtcgccagggggcgttagtgcagcggtgccacgtgccggcaaaggatttgatggcagaggagcatcaatatggcggatgtggatttgcaggcggtgggcggcaggtgaaaacctagcctagccttggctgggcctgcaacgacgacgttttcaagcgtcttcccctcttgagggcattgccatgccgtcccatctcctccagactccagtgggactgtcgggtgaaaacctagtctcggctatccttaagaccttgacggacgacaacggcgatgtctttgtcgttcctctctctagagatgtcatctaggtagcccttggccgaatccatccagacaacttgtgcaagctcgctctctagatgcatgtcctcttgtgtcggcgccctagcttatgtaagttggccccgtcgaaaagcctagagggagagtggttcaatccttctctttcaccctctctccctcaatcccatagaggtggctggagtggggtttagtgttggttgttagggatatgttttgggcaatctcggctatagtttctttgttgttatagcggcggccggttcgagtgccagccttttctaggatttgtgtttggtgctgtcggtacatgggtggtggttttttaaaaaaaaaaactggttaaaacctcccaagattgtatcaatatgaatttcacgctgtccgatgcgagttgcttaaaaaaaaagaaacttcaggctgtcaggagaagggacgggcagatacatgaaagaagcaattcattcatcccaatatttgtcaacgcagaaacgctagacaaatcagtacccagcacgagctggtgtctttcccgagtccccgtcgggatgccgtgatccaccacaacaccacggaccaccaaaccaaagcaaagcaagggtctccgtcatgctcacattcctaggtcctccttgtggcatctccccaccaaaaagcgtcgtcctcaacctcaaacctcgcaattttctatctgttctccctaccaggcgctatttattcagattgagctaatcagccaccaaactcgcagaattgtggctgttttcttcctctccagcttccaatctgatcgttgtcagtgtggttattggagcagttgccatcgatcatggtcgccaagatcaagcgacagatcggcggcctctcactcctcgctaagcttggtttgcttctgctcgcgctgctgctgcttcttgctgctatcttgctgttggtgttcttgctcccgcgtcaccatcggaggccgttgccgccggggtcgccgccggtgaacgcctccgaccccgacaacatcgtggcgtttgatttctcgccgttccttatactgtacaagagtgggcgcgtccaccggatggatgggacggaccgcgtccccgccggcgtcgacgaggccaccggggtgacgtccaaggacgtcgtcatcgaccggagcaccggcgtcggcgcccggatgtacctaccgccggcgaaaggtgcggggaagaaggaccttgccggcgcgctgcccgttcttgtgttcttccacggcggcgcgttcgtcatcgagtcggcgttcacggccaagtaccacgactacctgaacaaggtcacggcgaaggcgcgcgtcgtggcggtgtccgtggactaccgcctcgcgccggagcacccggtgccgacggcgtacgacgactcgtggcaggcgctgaactgggtggccaagaacggcaggtccgggccggagccgtggctgcgggaccgcgggaacatgtcccgcctgttcctcgccggcgacagcgccggcgccaacatcgcgcacaacatggcgatgcgcgccgggaaggacggggggcagcttgagggcggcgtggccatcaccggcatcctcctcctcgacccctacttctggggcaagaaccccgtgggcgcggagaccacggacccggcgaggcggcgccagtacgaggcgacgtggtcgttcatctgcgacggcaagtacggcatcgacgacaggctggtggacccgctgtgcatcccggcaccggagtgggtaatgcttgcgtgctcgagtgtgtccgtatcggtgtccgaccttagcgacttcaaggagagaggcaagtcgtacagtacggcgctccgcgccaacgggtggggcgcctaggtgaagaagtacgagaccgccgtcgaggtgtacgtatacttcctcgacaagccctcgagccgcaagtccgtcaaggaggtcaccttagtcgacggctacttgagccacgagtatcagcagcagcaaaacggcatgggtgtcagattggtcgcagacttgcagtacatgattgattgataattactcattagtggagtaccagctagcacagttgtctacatgtcttcttgtcttgtgcatctatagatttctccattgtttgatcgatcggtcatccggatccagttcatgatgagtacagtgaaattgctggggattttgggggaaagttggatgctttccgtgcctgcagtgttcagaagaatcggcaggggagtgtaagtttctccaaagtgagtgcagagtgcagtcagaggattggtcaatctcgttatcttgtggtgaccgggtgacgcatgccgagcacccagtgcaaatattttactgtttggatcatttgttttcttcagaaacctcgtacggttgttcagatgtctcctggtcttgccaaaattatgcatgaagctgctggttattttaaacggtgtcaagaaatcaaaaccggtcaattcagaattttgtgctgctgacatctcaactgaactccaggatgactgactgcttgatcaatgcagaactgcagatatgttttgcctgtcaatgtttgttggggtcctagtggtgaatgcacttatttaggactgtgaaaggcacttgattagtgctgacgattcgattagcgaaacgctagaatgagcaatagtactgtgcctgagacaagctagtgtcgtattggcgatttggcgtagagtgggaatgggctgggatggcgaccacaggagacagggaaagatgaagaaaaacagccacaatttcgagataatacaatgcattgcaatgctttggaacaaaaacttcagaaccataccttcgatcttcgatgcacagattgttgccgaacaattacaaatttgaactgttctttttctccttttttcgacttgcccatatgtaattgttatttttcacctatcccaataacaaagaaacctgacttaaacgatcctacgtaagcaaaattagctcctccattttgtactaattgtttatggttgtgcaaggtgcttcctttcgtggggaggcaaaccaagcacacattgccctgagaaagcagaaagctcatcggatgtcccttttgtccaaacacagaacggcaaaaactgatgaagataatgatgtttcacctaatacaccacagtgagaccggaagaaggattagtaggttaaacgacaaggttgatcatgcctgcaaggctgcaacaccaagccgttgtttcaaagcgaagatccgtagcatgaagcacgtccataaagtgctagagagatgatgtcaagcacggctctaggaacctgattattattgactatagttgtaactaggcaatgattggcgttggcgaaatggcgagccagaagacaaaagttcacatcagccatcgtgtcacttccttggccaagtgcaattttgtgcaagactttgtggagctcaacaacttgtgcaactgcatctctcctcttctcattcaattcatgcctgataccatgtgcttggtttggtgatcaggatacaaggcagaatgttggtgattgatgaagttcggttaaacgaatgcacacattagcaacaggaactacattagcaacagcaacaggaacatagtccatctttggcatacattgatctagttcaactgaaaaggaaaaggggactgcctatttaatgattcacgagaacaccattctaaatcctactatttttaactattggattgccgtaaggtttatgcagattcctctaaccctaacctctctctcttttccttcttcctcccttcctgccgccacggtgtgagcgcttgatgtcactggcgttaccctgcctcctgctctgccacctggttggaagggggtctaaagaagctagtgagccccatcctgacccacccaagcagcctcatccccgccttctcttccccaaggcaatgacaccaattgatgcctcatcatctttcttgtctccgacggttcttcactgctagatacatcattactagccaccgcctcgtaaccagtctcccctcgtgttcccgttggcccaccgcctgttgccaaccccgcggctccggcacgtccgttggtatccaccgtccaccgttagttctctgccgcccacgaccattcctctaaagccttggggaaccgcaaccccaaaccataatttttatgtctcttgccatagttggggatgatgttggagaaaatagggaactcgctggagttagataagaggaagcccatgcacgaatattggctggatccgacggtccaaaatttgtaagttttcatccccaaatttctgtcaaatgccatttagcaaattcacatttacgactaattattttttaagtagtaggcgacgtacctatcgatagcaaggtggtgacttcgtcagtctcaagatttgttagatccagtttttcggatgtacttatataagggtaggatatgtgtgttcatagagatacgtgtatacgcattgtgaacgcatatgcttgtattgtgtttctgacaaggaaaacccattttctacgttgtgcaagtaaaatagaaaggacagtttttaagttgaaatgtagtgtgtcaatagacatctgtgttttacatggattcatactaggcgaaatcagcataaatcaaataacaaatcatacagcaatagcaatagacagcagcatgcccaatgcaacagttacccaagaggccattggattctctaccgatttacgaactcagcaatggcgtcgtcctgcctgacggcctcgtcgccgttgaagtccatcaggtggaagcagtggccatggccggccacctcgacgacctccacctcccccgcccacccgctcgccttaagcccctcgcagtacgcgcggccgcggtcgcggatcacatccttctccgcgaggcacacgagcacgcggccgcaggccagcccttccaaccccggcgcgccgtcggcgagcgggttgatccacggatcgtcgacgccggtggtcgccgggcacacgacgctccacatcttcaccacgttctccgccatcgccgggtcccagtcctctgaggggaccttgccgcggccgaggaagtaggggtggactaggacgacgccgttgaccctgccgccgtgggggagcccctcggcgccggctcgcatggccatgttgtgcgcgatgttcgcgccggcgctctccccggcgaggtacacgcgggagaagtcggcgtggtcggtgagccaggtctcctcgccggcgccgggggcgtgggaggccgcccagaggacagcctgccacgagtcctcgtacgcggcggggagggggtgctcgggcgcgaggcggtactcgacggagacgacgatggctcgggtgcgcgcggcgaggaaggtaaggtaggcgtggaagacgaagttgaaggccgtgtggaggcagaagccgccgccatggaagtagatgaggagcgggagcttctttccctcaccttccccgctcacgccggcgacgggcgggaggtagaggcggacggagacgtcgggggagatggcgcggtctttggaggcgacgccggtggcggcatctgtggaggccgggacggagtcggaaccgaagtagcgctcgacgcggccgcccttgaagatgcgtatgcagtgttcgacctcgaagacgacctcgccgtcgatgtcgccggagccagccatggagtcgggatcaactacggtaggtgttgccctgttggtttgttgggctgtgtgccttttgctttgctttggtattgaaggggccaaccgccaacgtggcccacgtggatgtgccacatgatcgtttagacttttcagtctcacgtgagccgttcgattctacatttgacggtctcgattgaaacggctcaatgctgcgccgccgacgttgtctcgcggcggcggtggcggcttcttcggcggccacctcgattcttccagaatccagatccaagttttgaagtggagtactccactagttcgaatttgtccgagatctcccggcgccatgtccgacgctggggctggaggcgacagcgacgaggtcatccacgacgcccccaacttcatccgcgtg

SEQ ID NO: 20207 - DNA, 11292 bp, Oryza sativa
ggctggcgtcatcgtcgtttcggtggagtaccggctcgcgccggagcgcccggtccccgcgctctacgacgacgcgtgggcggcgctccagtgggtggcctcgcacgccgcgggtgaggggcaggagccctggctgaccgcccacgccgacttcgggcgcgtccacgtcggcggcgagagcgcgggcgccaacatcgcgcaccacgccgcaatgcgggccggtgccgaggagctgggccacggcgtgaaggtgaactcgctcgtcctgatccatccctacttcctgggcggcgacggcgatggctactccgagtcagacgagatgggcatggcgttgctgcgcgagctgatccggctgtggccggtggtctgcccagggacgagcgggtgcgacgacccgtggatcaacccgatggcggatggcgcacccagtctggccgtgctgggatgccgtcgtgctctgatttgcattggagggaaggatgcaatgagggatagaggaaggctgtattgtgagaaattgagggaatgtgggtggcgaggggaggtggagatctgggaggcagatgggcagggccatggcttccatctcttgtggccgacatgtactcaggcggaggcacaattacgggtcatcgccgagttcctgagccatggatgagatctctggactatgttgttccactactgcacacgatatgtccattgttcaaatagaattggatatcaaagtacattatcagttctgacttctgagttcttacaaatgtttgctttcaacattgtttttcaggacaatgttctactagcctatgaagttcatattcagactcagttagtgagctattcttatccattagaacgtttattatgtgttttacaaaaggtttaataaatctaagataccttagttcttcttacggacgtttgctttggttgtttttcagtacaatgttctactagcctatgaagtccaaattcagactgagttattgggctattcttatccattagaacgtttattatgtgttatacatatgtttaataaatgtaagacatgaatataaacttttcaagtcacgatagaaaggaaatactaaacagttttagcataaactagctcccctgtgtcaggtttatcttggagagtctgatgcacagatgtttactgctagaagtctccaattggatatacagcaaaacatcttttgtgtttctttttctggcatgacttcacaaaatattaagcactagtaagaatattcctttccatcttgttgcatgacttgttagctgatgtaatacgtcacgcatatgtgagaatgattacgtacaggtgagagaatgatcaacatacaatacaaggtgatcccagaaacaacctaattacttaagctatttgacagctgtgatgaaccagcaaatatacagaacatagttgtgagccactttgaagtactttccgtgctcgtacctcttggataatgtttttcagggaggccgtaaccatattgattatggagttccaatccccggctcgctgctttgtctatcctgcagggcatggtcgcatagatgatgtattggacaattcctttcatttgctgagtcaacagggttttgtacagttctgactttacctctttgtcttatcattgaccaaatgcagcttcctttcttatcttgggagataatgctgttgaataatctgtgagctatatgcaataaatgttattacagtaatcaaataacactggctatatgcaataaatgttattgtagtaatcaaatgacactttttttactagatgaacattgtattctcatttctgataaatggaaatgggaggagggatcacctcctcttgataaaagaaagtaatcttataatgctggcagtattatagatattacttcatcaattaattttcttttttgcagtgccagaaagattgacgtggaattgttatatggcagattgatagttcatgaggtaagcaaggttactattgtaagaactgcatgagtcatgagatgatgagaatttgagaagaggtctccaatggtaccagcaatcggacagcatcctgaactgaaatagagccatcgtcagcatacttggtaattacggcttcaatctgttgtgcgagtcatacattgcaactcacaatcttctattaaaacttattataagatgtttggttttctattagactttcttgtaagcaatcactcctctcattattaaaaaaagagagttaaaactgaccaattactgctaacgccgcaattaattttgatgaacaacattggtatgttacatatcatcattgcttacagttgtgcccataaaagtttatggtaccatttatcaattatttattgtgatgaaaatgtgttgtttgatgatgaactgaaatttgggattgggatttgttatattggaacttcaaagacagagagagtattgtagctgttgaataaaggatgctccaacattagatactttggatttgtgactagttttctgcaagttagtatttgttcttgtttcccttcctttagtaaatcattcgattattcttctgaccattctttgttcaaaaggtcttgaatccttaaatattttcaatatgtaatgtttggtattatcatgttggccttttcttggtgcagaagatcagattaggcttatatcttgatatgctgaaagtttacacttcacccctcatttatctgggcaaggaaaggacatcttttttctttactcaatttgatgtagagaatattgtttagctatagtgctatacaattgtgagtatgaaaaaagagagcatacctcaccactgatgtaacaaaaatccagctaaataaagatggcaccaatgcaatggagcttgtaaccgtttttctttcctgtggctgcatacatcccaaaatcaaatactacaatggcgcaccttcttctgagcttctatgtatgggctggtattatgatcttgttgctatttcttgatcaatttcggtcaatcaaatgaagtagttcacaaattggccatcttattcttttcgtagcgtgcaaaaatgcaagctagattggtttgaaacagagcatataagtgaaggtgaattttccaacatgaccaacattttgaacttggatgtaagaatttcctttttttttgttttgacagtacccccagcttcagggcactaaagcatcccttagtctaagggcaactgagaaagagatgtttatttgcatgaaggggcatatgcacagcatttcaaatcaaacttgcggatgcaagcctctcatccatcatggtgaagaatatctcactttccatttttataaattctcttagcaattatttttgtcacatcagtaggttcatttaacatccctaagcacagctggattaagtttcagcaacccagattcttttatgcataccatatttggttagttaatccaactaagcaataataattactgatagccaccactatcaataataatccaactaagcaataatagcccaagtaagtaatagtaatccttgaaatccagttgccaccagtttgtttattgaaaacaccttagctagccaccactattgacgatggttcaaacaataaagtgtgcactcttgcaacttcagttctatgttgcctctcatgagtaaaagtttgacatgtttccatttttatcacacgtttagattgtgcatcatgacttatcctgaacgttgttgaccttccctaccaccgatgccatgaaatttcttgtcgctgcatctatttatacttgcttcttatgttcatttcagctctcaaatcaccaccctcagaaatactattgtatcgtgtgtaacctatcctcaagagattagaaatatggagagtgaaaaacatatcatttgtagacatccaccaacttatggcaacctcataacagttctctcgattgatggtggagggattcgaggaatcattccagctgttgttcttacctttctagaatcagagttgcaggtaaatatttatgttatactatgagttccatttcgtggccaaggcaactctaacttgtcgagagataagttccaaggacaagggaaaactggtgctctagggttaggaaacggcatttgtttggtttgcttgttttaaatttaaaccatttagattcaaacttaattcagtaaccatatctttctataaattaagacatcctttcgtttcgaagtagatcttaattcttaaaaaccttttgcattagtgccagaatgagatttactgatcttttctgccatatgttctgtctttagccatttcttttatgcagatgtaattgttcaacagttgctcaggtttttcagcatttctttctgcatcgaatattccgaattcatttttgatacggctggaacagccataacaattattctgctaattgagaaaatctgattgttatgtcccatctatagatggtgaattgaatgttgtggtaccaccaaaaataaacttggcatgctaaattaaatttcccttttcatttcaatctctgtttgatctacatgctgactctctctctgtagtagcataaccgtgtgtgtgtgcacgaaatgaactgttcagattatacacagttcatgttcttgactgcttctcatgaaatcttttctgtttaatttctcaagaaacttgatggagaggaagcccgaatagccgactattttgatgtcattgctgggactagcacaggggggttagtgactgcgatgctggctgcaccaaacaagaaaagaagaccactttttgcagccaaggatattaaagcattttatatgaaccatgctccaaaaatttttccacagctaaggtgaatacatgtactgcagtttttttttctgatatgattcataacttggctggttgacattttgcttctctctttaggggtccattcggtaggatgatgaggatatttcgatcaatgtcaggaccttcctatgatggcaagcaccttcatgaagttgtaagagagaaattaggaagcaccaggctgcatcagactttaacaaatgtggtcataccaactttcgacatcaagtggttacaaccaaccattttctcttcctacgaggtatccctctttcccttcatccttctccctttaaagtctctcaagagtattttgtgtgttgttttggacacaagtgtctacaattcgtaataaaattcaatcaattcaattttaagggcacaagaacatgtattatacacaagtacttatttctctattttgctatgaaaataattcataggaattatttatgagccagtaataagaactcccatcaatacaacaatgatggagactacacaacatgaaccttatgctctcatatcataggttaagaagaagaacaacaacactatggatgctctgctatcagatatttgcatcagcacgagcgctgctccgacttacctgcctgcgcacttcttcaggactgaagattgtcatggaaacatcaaggaattcaatcttattgatggtggagtagctgccaataatccggtacgatgtctctgtagttgtgaacaactcattaccattgaagtgcactctgtgatgttgaaaatggtttggcaagtttacccagttcatatattgaagcgatgttttttccccaaaaggccctgaatatgtctatcttgtttaggctttagttgccattggagaagtaagcaagcagatattcaagaaaaatccagatttcttcccagtaaaaccaatggactacggccgttttttggtcatttcacttggcacgggctccccaaaaattgaagggaaatacaatgcacaaaaagctaaatcatggggagttctggattggttgcttgttggtgggtccactcccttggtagatattttcacacaagcaagtgctgatatggtggatatccacatcgctgctgttttcaaagttttacattctgagcagaactatctgaggattcaggtaagaaagagatagacagtttatttttttttatcaagtaatagccaacaaacatgattcctaatataaaaaaaatgccactttggaataacaggatgatactctcgaagggacactcgcatctgttgatgttgctactagggataatctggagaaacttgctaatgttggagaaatactgctaaacaaacctgtctcacgggcaaatttggagactggccagatgatgcctgcttgtgatgactcagaaattaccaacggggaagctctcaagaggtgaacatgtcaccacttatcagcctatttatgataatagtatctctcgttttataaatccatctatacttagtacccctgctatttgcagatttgcgaggttgctgtctgacgaaaagcgaattcgtgaagcaagatcaccgaaatgaagaaattcctctcttttttattcgtgccaaataggaatcttctctggatgacctccatatttgatagagcaaaatctggatcatttaatttagaacttagttgatttattcattgacttggaaatttcactgtaacatagtaaataaatgtataggtggcatactgattggccacacctgtagaatgtcaggccctgagtccctgatgtcctgctagttttgttcgtatgtaaaaaaaataatacaaatattcatttctaataaaattgagcattggactgccttttctgttgtgttgtcaacttcagccattttattttagccaaatgagtgctgaaggattgcaggtcggccatgcagcgagacaatcggaataaagacgtagcacgctgctgcatggaacaagtaccagatacgatttctctacactttgtacgtagaaatagataacctatctcttctttcaataacaagatgagcttccttttcagaacggatcgttttgcccctttggtacttccgatggccatgggcgggaagacgtccaattcccattggatttggagcgtgtacagactagacaaatgtatgcaaggggcttctctgcttcgctaactcaaagttgcccatatttattaatgacataactttctgaatgggctgcccaagaacctcatctgtgagtaccttctagcttttatcttgcacttgatgttccagttcactacctagttgccaacttagtaacttgctggtaaaaaaattgtttaacaccgaggtggaccaatttctgtgataatggtcttaactatatgccaagttgtatttgtttaactttccagcaaaccaatagcacaactcaggctcaatgagggggtgttggaagctattattttgatggatacaacagtgcgtaggcattctaaaactgacctaacctaaccatgtgctccccaaaacaagcaaacctggagcaccgaaagatctgaccagcgatcaatctcacacttgcgaggtaaggaatgcaaattgtgcatgaacacataaatataaatatacatgtagctagtaaagctgagacaattggcattttggaatcctagagcttccctttagctgggtggtagcaaaatttgtgtcaattaagtacaatgcttggacttcagccagccagacatgggggtcattgttagtgcaataatgctatatatttgatcgactatagttttggagaaagaaacacatttgacaagtatttcttgccatatagtatgccaaaatcctgaactttattgttcttgttagtggcctgcacctgttgtgtctcctacaccgttgatccagcacaactttacagagccgtcggcccgtcgcacacatgaaaagtatttctcctgtcaggtcataggccgtgcagttaataattaaaaggcaatttcctaggtcctgggagccgactaatgtgcttggccggtcaaaagactaaagagggctattcgatcgacggagcagaatgcaagttagacgccaatgcaacgagcgcctcctatgcatggtgccatggtccaagcaaagaagattcccagattgtgccatgcaaatgctgctgaccttttctgaatatcatgcaacatagcgtgtctgggcttctggcactccatgaatgtaagtgaattacatgagtttacatgcactacatctctgtaaaactttatgatagttaactttctaggttgaatttggtgaacataccattcagctttttgttagaatataccacacatgcagaggaatatatcgtttctgactacagcactggcatgcgaaaatttttgaatttgtgaaaatgacatccatggcttcgtgtaattcttcatgggtgtttgtgttagtttcttggcgcatctctctattttgacccctttttccctgttcctcgtactgacagctttgctgctttagcataccacagcatcgcaaattgcactttcttctccctataaattgtcgtagtggcatgcatccaaatcgaatctaagccaagaaactcaatagagaagagcagtcgcaatagcaagctaggagaagcaccaggagcttgtgtctttggccacctgaacagcacaagtcctccatacatttgtcaacctgcctagtacatggcaggtctcaagctctcatcatgcgttctggtcgcattgctcttcgtgtcgagccacgttgtgcgccacggcgaggcgaggcggctgaccgcgggggtggcggcgccggcgagcaagggcggcgaggaggaggcgccgcagtacgcatccgctcgaggcggccagccggcggctgctgccggtggcggcgtgacggcggcgtcgaagatggcgagcaccgacggccgcccaacctctcccggccacagcccggggatcggcaacaaggccaccggcaacgtccgttgagatcgatggacgatcacagtacagtactacacagtttcttcttggttggattgcttggcaattggcatgcacatataggcatctgccaatgtcagttcgtgcgtgctgctgcatgcatgcacactgtaatttgtttctccttttgttattggcatgcacatataggcgtccgtcagtttgtccgagctgtaatttatttctcagttcgttatgtaatgtacattggtgaacgcgtgttgtaatattttactttatctcaaataacaaagttgccgagattgcacacttttacatttttctgtcaatgttctgtagggaatcactaaacctgtaatgttaaatgcctaaactctcagcttgtacttgacacttagcttgtacttgcaggaattcaaacttaagtatgactcttactgcctcttttctaaaatatttgtcgttctacattctttagcatgtattaaggttaaaagaaaaaaattgtactatatcttattaaataatgtatagttagatgtgtgatggtggtggggggggggggtaaaaatgaggagaactttgaattagaagtggttgatgtgacaggtaatatttcaaagtggcaactattttttaaacaacttttaaatgctaaaaagacaagtattgtggaatgggaaaaatatatcatactggacattaacgtgtatttcaacgaattcactggagatcggttggaatctacaatagcacttacctctgttctaaaatataaatttatattttagctatgcacttggaaggatgaagggagtagtagctccgggtaaaagtatgtccctcaaaaatcattccctcatttttcatacatgtattggccgaattactctcactgaagcaaaacagagatgacatgcgaatcacgctatctgacgagtctccttttaaagacttggcgcagcaattattttctaaaaaatccttcctgtggttgagataaaatcagtaacttttaacttgtgctttgcgctaataaaacggtttaaattaagcagctgtgtgtttgctagtatactgccatagcctatgatgccctacagtgctatgagtagtaatatctggatatcttggctacggtatgttgaaaaggacgtgcatgtgagattatgtaccatcacgaagattcatgaacagttaaccagattatgcagtcaatatgtaatgttgaaaaggacgtgcatgtgagatcctgatatgtaccatcacgaagattcatgaacagttaaccagattatgcagtcaataagtactacgaacgagtggatatatatgtactggagtcttgacttttcctggccgtctctgaccttcctgagtgccatcacaactttcactggacacggttgtttgcctgctatttacctccattgaccggtcaaaccgtacaaaatgttaattaaccaacttgtttgctaatgctatctgagccgtttatatcgtccactgtggaaaactttgtgtgtataatattagcacgactggatgcagccagccattgtaatataccacagccaacaatgcgcatgcaggaagagatttctgaagttggaaaatatacggtgcaaaaagtgtctagggattttctacttgaagaaatctagtttgatagttgcacaaagagccagccattcgtgctttcagacagcctggctcgttttcattgttacattgttgggggtatgtctgttagcgctagtgtagactgtaaaggtaagtgtcttgtatatcccacctcttaattggtgacttaccgacatgccaacatgccgacatggataaaattatgagataacaattacttatatcgcttgttaaacttgctcttacctcttaccataaataaatatgagtactacagatttggacggggacacatgagggaaaacattccatgtagtagagggcttcagcagggggagccactatcaccatttcttttcatcctaacaatcgaccccttgcaaagaatgctacatctagcaaccgaggaagggcatccaattaccctaggtaatccaagtgcaagattcagaatatccttgtatgcagacgatgcaacagttttccttaatccttcgagagacgaagtggacaacttattgaaaattgtcggtgatatgggcccgagggtatcaggtttagagggaggagtctgccccccgatgccacgtgaccctcccctgaggggagtcaggcccgaggtggggtggtggccactcctgccccaaagactagtcggaggaggctgccccccgatgccacgtggccctcccccgaggggagtcaggcccgaggtagggcggcggccactcattcccagagactggatggaggaggctg

SEQ ID NO: 20208 - DNA, 2215 bp, Oryza sativa
ccctctctaggtcaccacgtacggtgggttaggtgtccgcctccaggtgcccacctacccgtatttatggcgacccgagcggtcgcaccacgccgcatttaatgcggtgtgcagtgcactcaaccggtctgtgaccggtcgaatgactgatgggacccaggatgtcaggcgcaccatcgcgtgtgtcaggcgatgtgcagcccgacatatcccatcaaataatgatggtgagaggttctcatcctcttatcccagccggagtcggtcctcccgctctggtcaaagcaaggcacccgtttcccggtgtaataggacccagaagtcttcacccattaaatggtgactgacaggggcaccccctgtgtcaggcagcaagatttgacaggccccatcatcaagacgacgtgcgcttggcctcccaagtcaagagacaagacatgcatttaatgcaaagattataatacttctccactggagctaggttagattgttgggcccatgtggtatccccttagagtataaaaggaggaccatgcctagcgaggaggggggatcggacttaggatccctgagccaaagcttgtccaaccctagcttgtatatcggggattcagggactttctaagcatagaagaatcatcatacacacaggagtagggtattacgcttcatagcggcccgaacctgtataagcctcttttgtctcatcgtcttggaggggcctaaccccctcaagatcacatagcttcgctcaccgagccctcgaatctcacccgctgcccccggccgaactcacaaaggggcgcctcatggttccctagtggaggagttcattctccgacatctggcgcgccaggtagggggcgcgttcgtgatttttgaggttctttcgagcgctggcgtgataagcgccgcgccgccgatgcggtgtaaggcacagcctcctcaggagtgtcgcgcgaccccaggcagggggctaggcccccgacatccccaccgggtaaggctagcggccagttctttgtggcgagtcttcggaatgtccgatggccctcaaagtttaggcctagcctcaccgagaagtacgacgacagcgtcaaaactccgagtccctccagatccacacgacgatcatagaggagacggggggtgacgaccgggtcatggcgaacttcttccccatggccctcaggggccaagcgcggggttggctcatgaacctgctgcccgcctcggtccactcctgggaggacccctgcagttgagctccggttgccgtcgaagcccaggatcccctgtgctggctcttccgtagcggctagctttggtcccgccggctggctacggtgcccggcccggctcaactaatcgtcctctcatgttttcagtattttcaaattttcaactcatcaacctagtacagcttgaaatcttatatttatttccccccattatattctcatggccctgcgacgcccgcgtgttgcgtatttgtttgctccctcggtggtaagagcccaacctctctcccatctacatgaacgattcttcgctaagtgtgggggctaagttttctagccttatcctagccttaagttgagccccgggtgccgtcgacgcccgggaccccctgtgctggctcttccgtagcggcttgctttggtcccgctggctggctacggtacccggcctggctcaactgtggacggggattgctggctctagagttttcggttctcacactcgtgcgaaagtaatcatccatgtagaaggaaaagagattggaaggaggccaccgaaaggaaagagcaaacataatgtgtagcgtgagggcgcaggctcgtgggaacctgatctcatttgctaagtggtcacaggcttcccaagatggtttggaacccatggtgggggggggggggctcttcgagctaaaggtttgaaaggtcgcgacatgcaagcaatgtttgtgtttgcttcattcatacaagcaattctttgctataagtgtgggggctacgattcctagctctatcctagccctgcgtcgagctctgggtaccgtcgacgcccggggccccctgtgctagctcttccgtaacggctggctttggccccgtcggctagttacgacgctcagcttcgcttgatcgcaggcgaagatctgacagccccatcatcaagacgacgtgcgcttggcttcctaagtcaagagaca

SEQ ID NO: 20209 - DNA, 9380 bp, Oryza sativa
gcacaaaataataatcaatatctatatgttttgttctagcatgaaacactagattagtagataaataagttgctcaatattatcacaccaaacctgagctgccggtggagaagaaacttttagttcccgcaaaagagtttggatccaaattatttatgtgggtttggggggggggattttttttcgctagagatttgtacttagctttagtacttgatctagaaaccatagcttgcttgcgagcactccaagataccaagttgcatccaagaaaaactaccaaaccactagttgagtgccgatcatcaacatttcctgcccaatcagtgtcagaaaaagcacaaactaaagtagatgactctttcttgatctatagaccggcgccaagagtatattgcaaatatctaagaatctgtttcactgctgtccagtgatctgccattggcaactaaaggaattgacaaacattattcacaggaaaagatatgttagttctagtaagtgctactccctcagggctgataatattagtcgttctagcagaaacattgtgactgatcctttattatgaaaaatagtgaagtaatcagctttagaggaaataaaaccaagttgatgtaccttttgacttaacctttcaaaccacgctcttggcgcctgtttgagaccatagagagccttgtctagtttgagtacatgatctggccttgatttatcttcatatcctggtggttgcttcatataaacttcctcctcaagaatgccatgacgaaacgcattctgtatatcaagttgcctgaggcaccatcccctactaggtgcaccattccctactgactacaagactaaaggtatcctcataatcaattccatacctttgcttgaaacattaggctattagtccagctttatacctatcaagagagccatcagccttcctgttgatcttgaacacccacttgcaatcaattacatttcttccttcttttgctggtataggatgccaagttttgttgttgatcaatgcatgggactcactatccatggcttctttccatctttcatttgccaatgcttcatcaatattatgtggttctcctaaagcagccagaaaatcatacctaatatggccatcagtatagacttttggcttgaccactccactttgtgaccgagtgtgtggtcggacaacttctgaagcgacaaaagatctagcttggcctacctcagctgacgatctcggcgcctgattgggagcagacgcgtcctcattggttgagaaggcagccgcactctcgcttggtgagtgagcattgcgccaagggagacaggcgtggttccctaggtctgcattggcgatccaggggaagattttcctgaaaattcccctgttgcttcagggaaatcctcctcgtgtccagcgtcatcatgctctgttattcaagtgaattctcctcagaatttgctttagaaactaccaaaatttcaccagaattattagtaacatcaggacgtcgcgcgtcagggtggccatcagataatcaaggacctgttgatcctcagttacccaccgggtgaaatctgaattcaccttcttgattaccttgtctccttctttcactttgatctcctttacagggacctcagcggtgccatcaagatacccaaacatctgggctcctctaatggtgggaaggacttgcgccttccataggagatagttcccctttcccaacttctctatcaccggaacaacgaagggcaatgcaccaaccggagtggaagaggaagatgccatcggcttgttttagatgtatctctgaggagaaggctatgataccatgtggaaatagcgaagccatacctttgttgatatagccggcaaaacgcggcagagaattacatgcaagtttgttacaagagataagggatatgattatatctttggctaatctattcttatccttctatctttgtatcatatctaactatatatctaacaataagatgacaaatcatccatacgataagtatgcaactgtattttggacgagataaaattttgaaacatgagaggtgccaaagatttagcgagaatatcgaaatcatgaatacagctagcggcaagcatgtttgctgccacaggtgtaaatcttatttacattttcatatcaccacttggctactgtttttactccttttttttttacggatatttactcctaaaattaatagaacgccaagctggtctttcgagaaaaaaaattctctactactactgctgagggcaagttttatagtagatgtgactaccacatccaatttcatgcatgaaatacataattaaattaagaggtgatatgtataataggttacctctaccacacaatccccaatatctctaatattctcatatgtttattgaaatttgtgtaggggttgcctcttgcatgagaggtgactatttatctctcatccttcttctctcctccacctcactatttagtcctatatggcatcttggggctttgtgcttgatgcccatagtacttgccctccattgatatgcatgctacaaaagcactggatttttaatcatatccttcaactgttatggacttattgtgatgtttggacagttgggtttccaaaacctcctattggtgttgtccaaactccaaagaggaggcccattttgaaactgttgcccggcaaggaaaagggaaagaaagtgaatcgaaaggaggagagccatcgactgagaaagttcctccaccctaggaaccaaccatgcagaggagcagaatcttaatttctcgatagcaaatctaacaacggaaaccttttctttcgttcttttcgtattatatgaactgatgatgaagtagtacaggcacttcattgcaagttgcaattcttctcagttcacagattctgggcgctgaatgtgttcaacttggttctgacctttaattcagatttctaaacccattaaccagttcaacgctgaactggcagattataacagtatcaagctatatagtctttcctcagcactgagcttaaatttaaccaaaaaacaaactcgcatagtaggactgatcagcaagctagagaagcattcatcaaagctattaatacatgactttagtagtatattgctcttgcatagctgtcaaccaaatgagcttggttattattccttgactgtacgtgcatccaattaattacgataatcttcttgatcactcaagctaattatcaccccctgtttacataaggaatctcatgacagcttctctagttattattaggaaaatcagatcgattgaaaaggacacaacatgcatgcatgagatcctctcccaactagagatctaggaagcactccttttttgcccccggttaatatgatatggccaagattctgaaccacatttgactgaacaccggtctcagccatcgtgtgagtatattcccggcctgaattcatccgtgcacgctgaatccgtacgaaaaggaagagagctggttaatttcttgctctttcctttctctgtcactctctgaagcctgaacctgtcgacgtcgtggcgcaacttggtgtataaaacgaagagacgaagctagctagctatgcaggtttggtcagaggcagccatcgtgtggtaaagcctaatgctaacatgcgacgcacagcaagagatcctgccgatcttggcatcggcgaagcggtggcgcagacaagcctgcaggtatttttctcgtgtggatttcagaaggcgcgattttacctgacagatattcagtctggagccgctgattttgacaagaaaaggaacgaaagccataaaagcagcagaaagaaatttcttgggcttttatttttggcccataatctgcgggtagaattcttgattccatgaaattggcccataaggtttgtgctgagaaaatacctctctcttttaatttctcttttaaatcctgtcaagaaaaatgtaattgcaggatcgatgtaattgctgtggtgagttcgtcatggcgcaccaccggattaggatagcggattgaggtcatttttactagaactagctgggtggcccgcgcaattgcgcggctagcacccaaacaaaatcatatatttttttaagtatgattttacttaaaatttattaaatagctatctcattgtcttaggactttgaaagaccaaattttatcatcatcgtgtttctaattatatagtttttaaaagtcacaccagttgctaccccttatgtctcatctccttctttatttgcttgctcgatctaccactatttctattcattcttattggaacctttaaaaattggattttatagtttttagagtttattgtcacgttgggttttatttttataatttctagatgtcccgtcaaacgttgctattatactcctctacgacacgtccattgtcttatctctttattgtcattgagaatttaaaaattgaacataattatcgtttaagttcatttttactttttagaagtcccgccaaaccgttagcggctttgccattgtaatcctctacggctcgcccgctgcctcccttctttatttcattttgattttaaaatcgaacatgattatcattgatttttttacttttcagaagttctgaacctttaaaaattggacttgtagttttatttttaataatttttagaagtgccatcaaacgatgtcactatgtccctgatctacagcccatccgccacctactctttattatcattgtgattctaaaaattgtttttttttactttctagaaatcccggcaaccgccttactcgtttgcttcacggcctccctaacgtctctccttttaatcgtcattaggattctatttggtgttttattaacaatttttatatgtcatatcaaccgccaccactctacccctttataggcatgttacttaatatatctcgtcatgtgttttagatggtcttttattttaataatctttatttttatcaaaaattttagttatttttaaattgtattcctaattgaaatcttatttttctttttctaattttagaattttttttaaaaaaattatttaatactgtattgtgttattttaatgtttttattttttattttcaatttcagttgtttcaaaattttagtcctacttgaactctcttttattgttttctaactttggatattattttattttttattctaaattttaattaatctcgtattgggttcttatatggattcttttttcagtatgcttatttttaattcggaatttcagctatttttaaattgtatttctacttgaactccttattttctttttttaattttggattttattttatttttattttgaattttgattaatctcgtattgggttcttatatggaatcttctttcaatattccttatttttaattccgaatttcagctattttaaattgtatttctatttggactctcctttccttttctaattttggattttattttatttttatttcgaattttgattaatcacgtattgggttcctatatggactcctctttccatattgcatatttttaattccgaatttcagctatttttaattgtatttctactttgactcttcttttctttttctccgattaatgtgggaatttctagcccccacggtgaacgtggtgcctttgtttcgagctgtattaataatataatagatcgctggattgaagcattccgctgtcaggctgagctctgcgacatgccaacagtttgctgaactgaactgacgaagcaacgccatactgccattcctaatctgtggtggtcacctgtagattctacggatgaagggaaaacgggaagatacccacgccccaccccccaaaagaaggaaagagaaaactacccgtgcactgttttgtcattttttatctgattgatggaaaacatcagacaacatcatcgcatggcagctaacaaacaacagtagacagtagtagttcccatactatctaccttcacttccattttaccctcccatctttcaccaaagctcaggcttatagctcaactttctgagattcaccgtcccccacccttgtcagttgtcactgcccaatgcagacacacactcttaaatcattaggagctgaaagtgaggtgacagaccacaccccccaacttgcagcaatgcctgcttgccaccacatggcgccctccttgtttgtttgtttgtatggcagcaaatgaatcatccacacacacagacacacaaacttttccagggcccaggccatcggcatgggcgcatggccagctcaagctactggggctgcatctgcatgacagcatgagagagtctgcaggtgaacactacacacacgcacacacaactagagctagatgatgagagcccagccagccatatgtgctgggttcatcgatgtacccaggttgcaggggatggtggaatgccctggcatcgtgctattatctttgcccagcctgcctgcctgcctgcctgcgcgccattttccttttctttatgcgagtgatggtgttttgtctgtggcgatggggtgggggagagtggacaagtgctagagtctgaatctgtgggtgcaatttgcactttgccggttttttctatggtttctgagtctggggcaaaggccatgccgccaatgcgtatattatccatccggcaagagggtgcgtttactgttggagattaagaattctagggtctagtgaaaaccacatgacctcacaaattttcaggcttaacctataactgaactaaattactcaggatacagtagaatggcttgggcagcaaacctgatacatactccctcctattatggttaaaaacggtcgcggaaattcccaacaaattgacgctcgtttctgatttctacaaatcatatgggaaatggtaaacgctgaaaacagaaatgaaactggcaagaaaaatgataaatggaaacggttttgttgttctaccaaccgcttcttattttattgtatttattatgtggaaattaccatctttataatacattactcatcgtatttataaattctattctaggttagcttttttttgggacggaggaagtacatagtataaactagaatttatttggttatatgtgattttacagttcaatgctttcgacatttattagcggttttcgatccatactaacatgtttccatctgcataattaattttcagtaccatttttgttatcggctttaccgttctgattccgtttcggacaaaaatatggttgttgtagcaggaggcacataccatcccctattcgaccgaaacactctcactcactgatcaaagatcctaatagaccgaaacactctcacccattgatcaaagaggcttttacttatggcaagatctatacatatggcaaggttttttatttatggcaaggttttacttataacaaggtttttacttatgacaaggttttttttacttatgacaaggctcttatggcaagattttacttataacaaggcttttacttatgataaggtttttacctatgacaaggtttttacttatgacaaggcttttatctatggcaagacttttacttatggtaaatacttttggatctactgatacagtagaatggcaagacttttaccaaccaaagaggtttttgcttgtggcaaacacttctcgacttaatatgacaggtaaatactaaacgaccgatgtctagaaagaagcatttgaaggtaagtactagtcgatcagggcagatgaagcttgaaggttacgccatcgaactaggaatattcctcaagaagataccatggggactgctccaaccactcttgcaagctggcacctgaagctttagagaccacacaaatgtacaactatacccttagggtttctagcattataggggtattgcagtaacttcctgtgcaccctcaaaggtaagattgtaacttcacatgtacctctggaaccatataagtcggtcataatactgcaacaagacaagacataactaatagcaaaatatcatctcacacattttgcatttctattcgagttaattctcaagataggcggggaatttgtgttttaccgtaacccaaggtcacgacaatggttatgaaaattgttaagtttgctttccaaccattttcattcctaccttttgtcataaatatttgatgcttgagataagatttggtcattttttttaaataccaaccaccaataatttcttaaatttttagctgaaagtttagtatatataaattttcctcgaaaagcactatcttactaccataaacttatcagattctataaattaattttgatataaaattaatgatcagaatattaaagtttgatcaaaccttttctaagcatcaaatatttattgaacaagggagtacagattgtgtgcatgaagtgaatttgtcctaattttgtggctaggtataatcaacaatttatggtgtaacatatattatatttgattttacataatttttttatgattgatttaaatagaaagagagcccacttatccacatttaaggagacactcgtttgtctttgctaaataacctataattaattcatctcaagaaataagttattgcaagcctacatatggtttgaagaaggataacccttgtcattatattttaggatgcatgttgtaagtcaaatctttatgatattagatttggttaactcgttttatttagataagttctctcatttgaccactttattgatttctagataagctgcattaggcccaacaaatatgctgctttaagctttcctactaaatatagtactttcacccacaccacaaatttcgttctccaacgcgaccattagaatcaactcacacctcaaatttcctcctccaacacgaccattagaattaaccctatcttcaaagcttaaaactcctactttacagcaactttatctgatcctgctcctgtaaaataggtttttgagttaaagcatttactatccacttcatatttcttcctgtgagtcctgaggtaatacaatgtacactttgcaaaacaagacctaatttattaaaaaaatatcttttattagcttatacatatattaatttcttataatttttaccatcgtttatattttcaagagttttcatttgagttttatatattctccatgctattcattccgtttcttaatatatgtcaatttcaactttcctatttaagctttgacaattagttgctttgaattgttagaggaaagctaaaatatttaaagcatatcacactttaataatg

SEQ ID NO: 20210 - DNA, 12745 bp, Oryza sativa
cgccacgccttttacccaaaaaagtacagatcttggccacggccttgccatccccaacccaaacctacgaaaaaaatcgtttcttttcgtcacctgactcatctttcctcgtcttgatgtgacaagccagtggaacgaatgtgcacgtgcttatccatctctacattaactaaaaaaatgtcattttgatgtgctgctaagtttcctttccaaaatgtgatccatttcttgggttgcgcgaggtaggagagagagagagaggggggaggggggggggatcttacgaacaagctaggtgcggtgcagtgagagcagcagagatgggtaccaatgattgggtcgcagtgctgaagaagggaaatggcttagcagtttgtagcacccgctgggcaaacggaaggcatgatctgcaagctggccctgggacttgcagtgcagtggcctcgtttcgtttcatcagattggctgcgccgatatgcccgtccttccttcctgtactggcgatgggaaatgttcgtttgttcgtatgttcggcctgatgtgccaggttggtgggtagcgtcatccttggtgtgtacggtgtaccattgccgtccatctgttgcatctctcattggtcgactaattttaggcttgtgctgtgtttaggagatggacggtttgaaggtttcttgtttctttttctttcatataatgatatagggaatgttttctttacgtacgcggatactaaggagctgatggccacataaatagttccacaacttttggtgaaccggtgtttatataaggtacaggtgctaatgactgcttgtgttcacttactctacaaaagatgttggtggacacaaacaaaacgagaaaataatagtgataaatgatgtttccaaacaccagattgattctaattaggactttacagtttgtactgaagatgtgacctctcctttagttgttttttatggagtttctgtttgtagcggtacactagcttttcctgttcccttctatgctagtttttaggaggctgaacatacaaaaagttcgttcataaggtttcataatttgctacattcattgtattcaatgacaatatggagcatcatgctcctcttagtatattgaagaaattaaaagtcttatgcttttatagcattttttagcatgtcaatcagttggatgagtatacaggttagtgtgcctaattaaccggaaagtgtcatttgatgcaattctacgccttctgttcttattttgacattgcaagttcaagctcataggtttgaatatgtttcaggttgtagcaataaaggttattcgtaataagcaaactggacaatcggagggttatggatttgtagagttctacagtcatgctgctgctgagaaagtacttgaaggatttgctggtcatataatgccaaacactgaccaaccttttaggataaattgggcatcatttagcatgggggacagacgttcagatattgcttcagatcattccatatttgtaggcgaccttgcttctgatgtcaatgataccacattactagagactttctccaaaaggtactcctctgtcaaaggtgcgaaagttgttattgatgctaatactggtagatcaaagggctatggttttgtgagatttggagatgataacgagaagacacatgccatgactgagatgaatggtgtgtattgctctaccaggccaatgagaattggccctgcaactcccagaaaaacctcaggttcaatcacaagtatctaattcagttcttttttggggtcaacactagtacattcataccaagcattatttgtttaatagatccttaatttcaacgctagtacccctaaatttgcgagtctttctgtccattaatgtagtatagcagaagatagtatggactctctttttttttttgaagatatggactctataaatttgctgtcatgtactatggtttcctgtcactgttcactctctaattttgttagcattttccccttccttttaaatttctcttgtactctttttcaaaaagaaaaatgtatatttatttaattattttcattcagactttagttgtattatcttgaattgttcatcaatcttgcagcatcccatattttacttttgctcatatctccctaattttttttaggaatatagtatccttctccatgcttctgagtacatcatttgagttagtaattgatggtctttggtgtttgatgtcattattgtgtatatcatttttgcaatcttccggtttcatctataaggtcctacaatgcctttccaacaaaatgctactttccctgcattttcccttcagaagaacaatgaacaacacaattttagtcttttcacaccttggaaatatttttatattattttacctaattgtaattttggatgaacatcggacatgcttgatatctgttaattgtcgcagatattttcagatttaacctcgtgctcgattcatatattattctttttagaatacagggattggttttgaaaatctgagataatttaatataccaaacctgagaatgatagtgcattattgccttatagagtgaacagtggatgggataaaacttgctttgacaatcttatacaggtgttcctattaagacacttaattcctattttctaactatgtttctcggtataggtacttctggacctactggttcagctgctcgatcagatggagatttgacaaacacaactgtgagtacagatgtatttacccataaagtcttatgtgtatacgaatttttccttctataaccgtccagtaacttattgtaggtatttgtcggtgggcttgatccaaatgttagtgaagatgaccttaggcaaacattttcgcaatacggtgaaatttcatcggtaaagatcccagttgggaaacagtgcggctttgtgcagtttgttcagaggtaatttcaacccatatttgttttctaagggtaaatttcctctgttcctgtcccattgacaagatctgattaacattgtcaatgtgttcctttttccaggaagaatgcggaagatgcattgcaaggactgaacggaagcaccattgggaaacagaccgtgcgtctttcgtggggacgcaatccagcaaacaagcaggtacaatcttcccccttgctacatttccaccagaggaactgtaaaattgtgcagtaaacataggcaaaaggacctgagactccatttcttgaccatgtacagttgaggagtgacaatggcagtcagtggaacaacgggatgtactacgcagcctcgccgttttacagtggatacggctaccctgcaccgttccctgctgatccgggcatgtacgctgctgcttatggcgcctacccgttctacggaaaccaacaacaagtgagctaagaggtcacttgtgcttcacctcaaactggagctaggcacgcaagcattagcagtagctcttgctagaagaaaaaaagaacaaggtagacgacggtttcctaggtcagctagatgcagtcactggttatgtaaagtacattactacacgaactagctagcgccactaagccgccctattgactggccatggtctgctgaactcttcttccagaaaagaagttttgacctggagctgcaccttattgaagtagaacaataaactattcaaatacctactgtgcgctatctgatcttttttttttcccttgtcctcttttttttacattgagttagctcgctttgtaggtttgggggtttagaataccggtttgactgaaattactggataaaaattttaatccaaaatttaatttttttattagtaatcaaatcttactgtccaaaaataactctatatttaaatttttgtttcaattcatatttcttaagcagaaactgcaccaccagtccatggtccagttacaccggtttttgaaaccctaatatggtttcggttatccaaaaaagcatgttttttttaggataacatagtcaactttattaaccaagacagagttcagggcatagagcccatacatcacaaaaggatacagagtaaagtaagcaaccatctctaacagagaagagaccaagcagtctaaggaagcaaacttccagtagatactaaacagcagtggagaatcagatcgacagagttctacggcaaagccgtgacgactgaatccttgggcctccattgatatgctcaccgtttgacagaccggaaagctttaccacagaaatggcacaaattggaggtaagttgctgagccgtagattttggtgtaggcatcatcggactcaacacaatgattccacggagtctcccattagatctgaggagcaggaagtgctcaactcgaacggtagaccctgtatggatactgctattttgaaaccaaaggaagtaagatttcaaagaacaggtagccaacatcacaggaaaattcagatgggtgcaatagaacatctgtctttgcagaaggccaaggattgctgaagatttgtaaaagcagtgagagcccaaattcagacagaaactggagtatgacgcagcaaattgagaggagcaagctgtgaacaaagaagagattcagatcggaaaaagaagacaccatgggagattttcaccgtcaaatgaaggcagtagctggaggcaacaacaaaggtttcatgtccatctacgccaccacacagagcaacaccactgcacagagcacccaggctcctgctactacgggcgctgccgcacggtgcgatgccgctcaaagctccaaggttgtcgttaccttcacactgcttgtaaccagcagcagccccaaaagaagtctccatccattgattcattagcagaccttcaaatctctcagctccacctccagaaaccatcaccgccgccatccacgctctggcaacccaggcccttcgccgataagacattacactggacatgcctagaataacaggaaaaaaacctgacaaaactacaacctatctactctataccttttgcatgtcttatttaatgtcttattgcgaaactgaaaaacctgacattactcttattgcatgtcgatctgcaataagctggaacggttcacaatgtcaatgaactttgtaaattttgagcatctcgagctaacttgcaatgtgcatctcgaacggtttctattaagtagtcattaaatttcaagcgaaattcgttctgagatgaatgaaaaatcgacgtctcagtgagattgtgccttggggggagcaatatgcagataggtgacctgagaggtgatacttctgagcccgctcctgcaaacacttcgcctctgtcaacgacactctcctccaccaccacctctgtcagcaaacttcctacctcttcttctcttaccctagccccctccccctaattgtcaaatctgggggcttgagactagcacatgagattggcatgagcgggttgtggcggcgaaggtgacgtccagagcaacgacaatcaccgtcgatcactcaaaaacagctacatgcacttgcgaatgagatcgacggttttggggctagatctgtgccaaattatgtcggttgtagcttaagggtgcaatggatagttgtggtggtgtgtaagggagcttggtgattgataaagggcacacaactatgtgttggatatggttggcacaatgcccatttcagatgatttggctccctcgtgtgaaaggacgatgggtggggcttgtcctccacctctaggatgttttccaccccaaccaacaccatcctccccgtcgccaccatctttagtggctacctcttccatatgcctcctctcatatccgcttttagctcccaaatatatttgtctcccaggcgatgtctccatgtaccctcttatctgcccctacccctctcctctttgtttttctcttacgatcacagaaccatgcttgatgcacctctcgctgccattgaacccccagcaacacattccgtttcgctctttcctttcatccattttacatcgatgttgtgccgatgctagcatgcctccatcgttcttagccttgcttcaaccaccttggccccgtcctattgtctaggagtatgcctagttcgtgtagccgtgttccctcttttggattcactcaatttgatatgcttcttgttcaatagcttggttatccatgtcttatgaaaaaggataggcgaaagttataatatttctctttattcgaatattttatcatagattaattcagccgagcattgacccagtcacccaacgcttaaatccgcccccccttaggctaaacggtaactactaaactggcctggaatgaccagacacgtcccgagattagttgagttgtgccaggctggccgaaggcacgataagcccaccgtgctcctccttgtaataagtctattttgcctcaattatctctttgggccatgtcttatatggctggaaataagtttattttgcgtccctcatctctttggccgtgtcttatatggttaaaataagtctaccttgcgtctgtcatctattttgcctctatgaatgttggagcggcccatgccgagccaacacatcgtgcgaaggaagagacccagacacagtcgggctgagcctgcatggacccgacaacagccagggcatgccgtgtttgggctgggccaaatctccgtgccgtggaccgggtcgttgggtttggccatctatacaccggcccaggggccagggctagacgatgttcgccatagcaaggccatttccagatctccaccccaaccaactagcggcgacaaaggtacctaccatcaccactctcgttgccggcgtgccgcgcatggagcagggcggagattctataaaccccgtgaatcgcaggaagcccggaacactggcgaagtccagggatttcccaactttcatcaagactcaatagtcctgaaactgttttcaggcaagaagaatcaacattttggattcacgtatttcatacaggaatgctgcatacatcacacgacaaaaatttactgctgtttgacataaggcgggagtgctcccctcaggaaggagctgacaacgatgagtgctttctcaggctggaagtaaggacctgatggccagctccccttacgcagatgaacactagcccacccgtgtattgctgaacataccctccaacctgacgcgaaaaggacatatttttctttcagtcagaacagaacaggggagattataatttctgaatttgtgctcatgttcgtattacctctctgtttgctgtccatgggcgccatggttcagtgacggcgaggccgaggtcaccgacggagtacctcgtggctgtgagcgggcacacggagtcgaggtcgccgctggaaaaaaggttgagtacttgtcacaactcccaagcttgcattttggtatatatgagaaattttgtggtttttgagaaagtaccctgaggtaattagactttgcactaaaaattcggtatctggaggtatctagtatttagagttactaaattttataatagaaaatatagtatctcttgttatctttttaaggatggtaaaattaccttagaaatatagtactagttacagttcgatttgaatatttgccacaagcttgcattttggcagatatgtacttcctccgtttcatattataagactttctaacattgttcacattcatatatatgttaatgaatctaaatatatgtgtgtgtctagattcattaacatctatatgaatatgaacaatgctagaaagtcttataacctgaaatggagggagtattagttagtctggtttgagtatttgttagttgtcagttgtcacaagcttgcatttcggcagaaatgtagtggttacagtttgatctgagacatgaagcaatcttacctatacaaccacactggcaatccgtgttccatcaaccatttgagcgttggcaccatggacactggtgcatctttccagtgcaagtttctaagctcagttcaagaagaaattgttaaagtggatgcatactgttagctcattagtactctgctcagagatctcacttgcagcctaaccacgttgtcactctagcatggagagccttctgtaccacgggattgttaaggtaagcgtggatgtagtagttgctgcatggatcatagcctggcacctgcacaatttagaaacagaaacaattttcagaacacacacaaaagactcgagcaaatagtactccatggaggaggtgaccctttgtatctcttacaatgcggctggggaagaattttccgtcgggtgcgttgatgcaaaccggtccgtatatgtcgtagggatcggtgttaccagaatcaaatgcgtccatagcatcagagcatgctttaccgtctgacggactgaacctgcagttcttggtgatgttggccagcacctcatctgatatcaccccatgactccacaagtagtcaatttgccccttcaggttcttgaactcgtcaaggcaagggttgccaacctgaacaagtagaggcatacttagtgctaaactgctaaccatgacaaaatgtttgaaaaagttcagttttaacattgcaaaatgatcgaaatggaaaggaggacgacgcctgggttcaagatctggctttggaatcccactctcctattacagtacacctcgtcgaacaactagtcgccctatggaaagcggtccggaatattcacttagacactggagaaccggaccagattacctggaaattcacaagcagtggacgctacacggcctcctcggcctaccatgcgcaatgccaaggaacgccgagcacaagcttcaactccttaatctggaaagtctgggcaccggggaaatgtaaatttcatgcttggctcatcatccaaaatagagtctggacttcagatcgacttgcgaccaggggttggcaaaacaacggatgttgtcctctgtgccgctgtgaggctgagacggcgctgcacctcgttgccacttgtagatacactaaaaggatgtggggccttgttgctggatgggtgggatatcagcaaattgagccggctcaatgggaggaggcacagtcagtacaacagtggtgggagaacatcgcaaacacgccaaatgttccgaagaaaggactccgatcactcatccttctagttgtatgggaaatctggaaggagagaaatcggcgaatctttgaccacaaagaggtggcaacgagtttcctcctgtcaaaaatcaaagaagaggctagcctttgggctttagcaggggctaagcggctgcgcgagttaatcccgcactatgtatagtgtatagctacagtttctcgattttttcctgttgcccctaggggttgtattttctcccgctctattcaatgaaaaggcactctagtgctattttctgttaaaaaaaaacaatgcaaaatgtttcagtctctgaatttcacgcaccagtataccctgtaggtttatgatcattctcttgctctccatgttgtgagtcaggatggtggctgcaagctgtggagcgtagtgtccagcatagctctcgccagagatgtagaaggcacgtcctttgtactccgggaacctctcaagccaattgactaggaagatgtacgagtcattggctgttctttggtcgccgctcttgtcgtagtcagaagatgtgttggagtaagaaaatcccacaccagcaggcgattccaggaagagcacattagccactgaaaaaatttcggcaaagtgaaactagtactctgaaactaatttcctcatgcaacggcagtttaatcataatcatatatatgctgcttgcgcaaatttttgtgtgtgcacacattataagaggtctacaggcatggattctcttgaaaagaactgtaaagagcataagtgcaaaatgcttagaaaacacatactactaaaactgtgagtattttttcggtgatctttactattaatattctcctatttgtattatcattagtagaagcgatcttattatcatttgtataagcgatctaagtcattgatttatgacttctactactaagtaggtggtagtataaattgcaactgctattgctgtgtctaaccattgttccaggcgtactcatttctgctgagtgttttattgtcgctgtttatcctgaatggaccaagttctatcattgctccatagccaactgacgagcacccgggacctgaacatcaattaacacagtttcagacagaggacgagctgtatcaacagtaaagtttcaggcagtgcattgagaataatgtaactatgtatgccagtagagagacagtagactagcctccattgagccacaggaggagtggctttgccgcggcgtcagtcgtcgcctcgacgaagtagtagaagagagcacggccgttcatctcgtcgacggtcacgtacccgccgtactgattgaagccgacgcccttgggctggccaggcagcgccgtgatcttatcggcggccttcagattgctctggtcggagacagagtactcttctttgagtctactgctaactcttgctcctggctcatgtgcactgtagccattgctgccactgacagtaacagtgctgctccttctggatcgcacgaactctctgaatctggcctcttctggcgatccatttgcgtgcaatgctgccacgcaaatgatgagaacgaagctaaaggatagtgtgttgctcatcatttacgatgaaatggtttagttgctgtgtttctgccaatgtgagggagattagagtggtgctcgattgcttatattggtcagggcctcagttggtggaaggataatatgctcaaactattagtattggaaccttgaagaattcttcaggttagtgctcatttgaatactgaggtcgccggcagtatgttgtccagttcctttttgtacacaagctcgactcacctcacggtttcatattcttgtcttgtccttttgtttgccaaaacagttacccagaaagattccaattggcgtatagtgtagcatgcttaattaggattagtcataatattcagttgaaaaaaaaagataatccaataccataacaaaggaagaagatctgctacccgctctagattttactcctatactttttagaaaattattaaacattgcttacataaatcttttccaaaatatatccacatctgtgctataaacaaaatacaagttaaaataactcgtgttttctaagtttctatgtgtaacatatttcaacattctctctatgtttttattttttgccttttttctcactgcaactttcatctatactcctttaaggcctttcacagtgcatctatgtagcatttagcctcaaccatccagtagaagattttcctctgagttttactcccgtctgacagcctgaaccggccggtactagtaccgggaggtacaagattaaatctggccgtccatcttgaaaggatacgattgggaaacagaaaagagaagcggaacgattccggagtcacaccgccgcttttctccctcgctgtgctctttctttcctccctctccgcatcggttctttctcatctattcctccatccgagcgcagaaacggagcagttgcgccgcatccatgccccaccggacgattttttcccatccatctgccgtctacgatcgcggtactggaaaaaatggcacgctcgccccgcatccacgcctccgccggtgctgattttttccccatccatctgctgtccgcggcagcgaagccaacgacgcgctccgtcaccagcaacgccgccgcattcacgagcgaagatgtggtggtattctgtgtcccctatccctccctcaacggctcaagcaagtacctaacctcctccgctgccatcggcgcagcctaggcccccattacggctcaaacactactccaccatatggtctagttattttgtaacgaacaattcaatctaccatgtttttttaatgaatttgtgagaaaagcacaagcttttgctggaaactttaatctttgaattgaaaattttaagctcatctgtcgtctgtttttttatgctgtttacagggcatgatctatcgttgaatggagcttttgacttaatttttgtctgctgtgaacagagcatgatatatatgtcgtattgagagccattaatattttgtctgctgtttttgctcgatctcctgtaaaatacatgtcattctgtggagtgatcaacagcacaacaatggttacaaacaagtgttttcaatgaacagcaatccatctagagatgtaaaagttgaggaatcactggagtatagtgctagacacatgggcaataattactgagaaaaagtataatttacatgattctgaaagactaaaacaaacatactcgtactagtgagtaattcagagtttcagacagcgggagatagataaacagaattctgcaaattttcagccaaacagaacgaactataacttagcaagaatctaaaactaaaggataagttagacaacccatctgaagaagctgtaatttaaagtttcagacagtgggagatagataaacagaattcacatggattggttgctgagacatcaacatgctgagtgatctccatccattaattctagtaattgacatgtacaaaatcaacaatgacaagcatagtacatatta

SEQ ID NO: 20211 - DNA, 14482 bp, Oryza sativa
ggcgttttgctagtatttataaacttgatagctatataaccaacttcagcttgaacatcagaaggataaatctcaactcccaacaacttgcgcatcttgtatttcatctttgtcctattattcaagcaacacacttgccatcttttgcctgggctgccttctcatgaatatagtaacaatctcaagatttagcatttgagcttgcaaatattttaattatgaaaaggttgcctttagagtttaaatcaatctaagtaagaggtaaatatgcaccaattagttcaaagattcttatcctgcacaagccagaaaatgtaattctctttattcagtctcccactttgatggaaacagccccattacaccttttcaggacatatctgtaagcacaagacttaacgtgagtaggcaaccaaatttcaccaaatggaagtagaaagctgactgatcattcgatcagaaattcagagaacactgaaaatgcgaatactcaaattacttcgggatatcagcaggtgggagcatgcccttcaggaaagagtagaggagaacaagtgatctcttaggctggaaagatggaaccagatgtccagctcccctcactgatgctagcgtgaatcctccttcgtactgctgaacatagcctccaacctgcaaacacccccatttcataccaaaaatcacagatcatgtctcagttcagactaatcacactattaagcttaatttgcttctgcttgtccattacctcattatcaggtgtgtaccaaggacgccacttatgcgtgatagtcagattaaggtccttgacggagtaccttgtcgcagtaagtgagcatattgaatccatatcaccactgaaaaatatatagagggaaaccttattagcaaccattaagccaactattatgcaattctcaatgtgcttggaatagcatattgtacctataaatccatacacttaatccattttccaccagccttttgatggttcgcaccatggaatcaggggaatcgttccaggccaagtctagactgaaagaagaatagagcgtaagagaggattgtatggatctcagagaccttgaagggtaaaataaatggggtcatccaccattgaatcatgattaaagattagtgcaaatcattgtagcagagcttatggcacctctcagtatgagagtatcatgtggtgaattgggtgaaaatttcagaggatctgaacattaagtaggaatacttacttgcaacttagtcaaaaaaaaaatacttacttgcaacctgaccagttcgtgtcagctcgtgcgtgcaatgctttttgcacatcgggattgttgaggtaacgagggatgtagtagtcgatgcacggatcatagccaggtaactgaatcaaaaccaagatgcaattcagttttgatgaacacagcatggcagcattacattatttatctgttcaattctcatggggaaaagctgatcctgcaaaaaagttatgatcttacatagccgctggatcgaaaggttccatcttgctcgtggaggcagaccggagcgtagatgttgtagcgatctatgttcactctctggaacgagtgcgccgccacgaagcacggccagtcgtcggaggaggtgaaggtgcagttggcgaggatcttgccccagacctcgtcggagatcacgccgtggctccacaggaactccaggttaccctccccgttcttgtactcatcaagcagcggattgccaacctagaagaagagatccacatggccaagtccagggttatacttactatttcgtcaatttcagaaaatttaaatatttttttactgaattcaaataaattttgacaattcacaaagaaatgaaaagatccgaaaattcgtgccaatatagttacatgtagggagaggggtccaaaatttaggaaatttcagaccctggttaagtcgttgatttgttctaggcttaattggattcatgccattacaaattttcatgattaaaaatctaacgccactatttgtgattaaaaaaattgtgataccagttgagtgtcactaaaattttgtaaaattcaatccatgccattgttgtcgagttttttagcacctgaccaagccaccatcttccattgttgttgccatcatggaccacaactagacagccttctccacctcgtttggcgcccttgctggcttgctgccatccacagagtagaaagggaaaaaaaatagcgatgatgactcggtgagggtggggcttggctaggtggtggtgaggtcaggactgatatatccagcttcgatgacatgtggatgaacggatatggtgtccacgagatgtgcatgagcagccagacagctacccaccatcaatggcgacgatgagcgagatccggtgtcaacgatgaccggagcgagccgccggcttcgaaacatcgaggacatgtgggatgagttgccaccaccaccaccaccagacgagcattgaggacgcgtggtagcagcggatggagtgagcagaagcggtggggagacaagcgaggccgccgctcacacatcttgtcgattgccctatgcacgccgctgctcgcatgccttgtcggtcgcctcgtataagagaggaagagggagagaggaggtggaggaggcaagaaaaggagaaggtgatggagaactcaatggtaaaggcacaccgttcaaattttacaaaacttcaattgcactcaactagtatcgcgaatagtaattgtaaattttcaatcaagaaaatttgcaataacagagatccaaagtgtgcattggttcaatcgattgctagcataaggaggaataataactcacaaagatgccacggaggttgaagggggtattgccgtcaaagagatggttgataaacgtgacaatggtggcgatctgcgggacgtagtggccgccataactctcaccggcgatgtagaagtcacggcccttgtactccgggaaccgattaaaccagttgagcaggaaaacatatgtgtcctccgccgttatttggtcacctacgtcactgtagtcggaggagttcatcgagtaggagaacccaacacccgccggcgactcaaggaagatcacgttagccactgcatgatttcacacgccacgtcactcactgttggaactttttaaaactaagaagctatctagaatattattttctctgtttaacaatgtaagactttcaagtattgtccatatttatatagatattaacaaaatcttacaatattaaacggatggggtaccaaactaccaatagagagtaccataaaaatatttttagctttcgcttaccgttgttccaagcatgcttgttcctgcttagcgtcttgccatcggggttaacccggaaaggaccaagctccttcatcgcgccgaacccgagcgacgagcaaccaggccctataaactcgattaaaaccacttgatagtatcggtagagagcatcgtaaaaatactcattagcatatcaagcgtgtatacgtacctccgttgagccagaggatgagaggtttggtggaggcgtcgtagggggactcgacgaagtagtagaacagctcacggccgttcttcctgtccaccgtcacgtagccggcgaactgcgcgaagttgacgccgcaaggctggccgggcagcgcggcgatcctgtcgtcctccttggtgctctccggtgagctgacgctgcgcgtcgccaggtggctgaatctgccgggatcggcccattggtcgtcttctccaggcccgtttttgttgggcctgtttctgagcctcttcaaggccctggactccatgaacttgatgagctgatcctcctgggaatgggacgacgcgtctgtgactgatgcgcctagtgctaggaggatgatgattaggacggataatgtgatttggtgtctcatcttggttggattgtgaagaaattttggaaggtcctccgaggatttaacagttcatatgtgagtatatatgtgattagatggggagaagaacaaggaatcgaggcattcaacacggattctccaaaggagtttcctagtttgcatcactaccactgagagttcttgaaataatcaagttctataagctattggcttttgtgtgtttgatatggttttaacgtaagccatctgttagtattaattaagaagtttgaaatttgactgatcttgattagagaaaaaataacggttggttttgcagatccacgtgtgaggtagcattttcgttgcttcctccacataaactcgtcatcatcccgtacaccggacaacatcaactttctttgccgtcgatgccgaggttaacagccctcggctacaatccacacgatggcgccgagaccgaggtgacatctacgtgatcatattaacgatttggaaaagttttactggtgtggtagtgggtttgtgagtgcatactttttttagatgatgataacttttcctaatgtaaatgaatattacacgtatatacgtgtttttaatgagattttagtgagattagagatatgtaactggtttccgtctcttagcataattgttagggtacgcatttacaggagtgtgagcgtggtgttacgtatggtggtgtttgtgtgtgtgcgtccaccatgtaattggaaaagaaaaaaatgttgatttgctaatggaaataagtctactttgcctccttcaactcatgtgcctggttgaaaatatcgcacccctcaagtgcaaaacagggtatataacccatcccctaacttttcaaaccgttgcaaatcgattcccccgacggtttcgaaggcgttttcgtcctacgtgttacttacatggcgggtcgacttgtcttcatccaatgtggcatcgatgtggcacttacatggcactaaaataaaaacaaacctaaataaaaaaataaattttgaacccacgtgtcagttacctaactcctccctctttatcgtcgacgatgagtgagattgggagagtggcggggtggcattagcaccatgactgcgggagcggagaaacagtattggtgaggaagcctcgatgtcgcctcctctcctcccttgttcccaccgtctaccctcctgacccttacttcaaggcttataccatactaaacttctccggcctaatcaacatcttctcttcttcctacccaccaccaactcccttccacactcctccgccgtgctctgtctcgccgctgttgccttccacctgagagagagagaggggttaaagagggaggtgaaaattaaaggtagctgacacatggacctgaaatttatttttattgttttacttactgacatgtgggtcccatttaaggtctatttttattttagcgccacatggtataaagaccaagtcaacctgccatgtaagtgccacgcaggacgaaaccgcctggggagtcgatttgctacggttttaaaagttggggaatgggttatactcggttttacggttgaaggatgcgattcaaccacgggcataagtagaggaaagaaaataggcttattcctttgctaattgcctggggttcaccaaagaaaaggctgtggtatccgtgtatcacaaatcaatccagtccaacaaaattaatgggccaaaacgggaagatgtaagactcgagataagtttggcggcccaaagttagtggcgtcatgtactgtagatggtaagtttgagcgccatatgctctgtttggagcactgaatttctttggattcctgcaaaagtagaatgttcaaaaaagaagtcttatgtaatatttatggaactcatattttcaatttcatgatcctcattaattccaaacagggactaactaataaaaaaaaaaagtccatttggtctctcaagttgtaaacaatcattcacccagatattaccactagcttggtgttttattttgtctacttgagtaattttgagcaataaacagtgactaaagtgagaacttgagggccgagttggctgcttaaggggggaatatggtttcaggagattatactgtttgatacactctcttatttttaatatggtgtaaagatagaaaagactgccatactcatttcgataaatctgtcacatcaactattttttctgtctgaaataacttccaacactcttgttgcttctgagactcctccaatttaacgatctgggctgtattctcaatttgtcgtctcctggttggatcggctgatgattgttctatatatttggaagctgcatataaaagcacaaccaccaacttttgtttttggcaagaaccgtgatccctgtcatcttctgatcactggtcagtagactacgagagtaaaactcatgaagaacaacatgacaagaacagcacattctcacaagtcacaaccagtgcagctagcttgagcttaccccacagcattcttgaatttaaggaagaacactgctgctaccagttagcaataagaaatctaattaagcccatgacataaaatccgcaggaaaaaaataataagctgattgctttggtgataatttctacagtgctagtctgataaatgactgtttgagattaactcccttcagtaataatgctcatgcaaccatgcaaaactttatgcacagtagtggctcacactgtgacacatgacacacatcctccagatcgaccaccactaacgtgtaatcttattgtcgtgtcatggattccagttgctggtcactacatgatctgtgaaaaaaaaaaagggaatctagagctacatcttatcctatgtcaagcctgtctgccaagatgatcagcatattaaccacattcttcttctcctctgcttgactgcctcagctgaattacagatcacagagcatatgcccagcaataattcaagaagcatatgcagatatgctctctcacctcgtctctcaaaagcaaaggattttatttcatgaacggtagagcgccaagggcgctatcaatcagccacaattaaaggagcagaaggacatttgggccatcctttctgggtgatacccgagaaaccaaccaccacctttccggtgcagattctaacagcaagaacaacatatcagaagtaggagtaaaagaggatgcatataggaagctgctgctttcctctgatttgaaggccactttaatatgtctgttggtagatcaattatctttgcttccttacatatgggccggctaattggtttgcaagatctgctttagtaccacagatgacttggatataaaacgtgcataataatgccttaatctagtattaattatggagattataatgcctagatgattacactagtttcatttgattaggtagcttgtggcagaaagattgctagctacattaattctcgattcatattgcaggatattgtgatctggggcatcattcagatcttgatcttaaatcaagtaaaataaaatgctgtcagagattactgttcaacttataatcaacctttatatcacaaactaggaaggtagcccgcgcattcgcgcgggcatgcgtcatatgctaagtttaagatagttataaaagctaaatattaaccggagaacatctgccacgatttctccatacatttttttatcagcattaattgttttataattttttaacctattagctttatattatactagcatatttttatattcttcctcatcatttgaaaagaaggtagacttattttctttagaaaacatatcatcggaagtaaaagtaaggtgttttttaattgcatatatattatgatagtttattatgggataaattggggactaataggaagaaaatgagaagagcagggagacagagaagatagggacggtcaacaaaagaatatattggaaccgtgagggtatcattgcatgttttatttagtggagacacattttttattaagtactttgtatacttaaattatactaccaaattttagtagtatataaatatttttcgtcttttaaatttgatgagtgtagttggttatttgacacattgaaaaaatagactcaaaaaacacgtaatagacacattgaaaatacgtagagcatcgttatcattgttatcatggatctaatttagctacatatatatttctagattaatacagaatagcacatttgatatcgtatttattgaaaaaaaattcatcactgtcttgatgcatagcatatcatttctataattaaaatatagttaacataggtcttaacttattaatctaatcacacatattataaatattcaaaccagttggaaattagatgcacagttaagcagttatatttatttgaaaactagcatggtggcccgcgcagattacgcggttagcatcattatattttctcacgtataatagcatatatgttttctcattttattattaaaatatattacaatgacaacataattttaaattttgcaataactttacgaaactactaatgtgtaataactactctagtctcctcttctaatattccttattttttaattctgaatttcagctatttctaaattgtatttctatatggactctgctttttctttttcttatattaatgtgagaatttctaggccatgagagcgaacgtggaggctcttttttgttccgaattttagttagttttaaattccaatatggactctatactctacttctaatatttactattcattcattcccgaaatgctatttgttttcttaagggtgcggaggctcctttttgttccaaacttctagtggttctaaactgccctgtggactctatactctacttctaatatttcttatttttttatttccaaagctctatttgttacttaattggatggaggctcctttttgttccgaattttagttagttttaaattccaatatggactctatactctacttctaatatttcttatttttttatttccaaatttctatttttttttcttaattgtatttctatatggactctatactctacttctaatatttcttatttttaattccgaatttttgttatttcctaattgtatttctatatggactatatactcttcttctaatattccttatttttaatttcgaatttcagttatttcctaattgtatttctatatggactctagtctcctcttctaatattccttatttcttaattccgaatttcagctatttctaaattgtatttctatatggactttgctttttctttttctccgattaatatgagaatttctaggtcatgagagtgaacatggagactccttttttttccgaattttagttagttttaaattcctatatggactttatactctacttctaatattcctttttttaattccgaatttctgtttttttcttaattagtatctctatatggactatatactctaattctaatattccttatttttaattccgaatttctagttatttcctaattagtatttctatataagaatctagtactctacttctaatattccttatttttaattctgaatttcagttatttcctaattagtatttctatatgagactctatactctacttctaatattctttatttttaattccgaatttcagttatttctaaattgtatttctatatggactctagtctcttcttctaatattccttattttttaatttcgaatttcagctatttctaaattgtatttctatatggactctgcttttctttttctccgattaatgtgagaatttctaggctatgagagcatgcgcggctagcatcattatattttctctcatataatagcatatatgttttctcattatattattaaaatatattacaatgacaacataattttaaattttgcaataacttttcaaaactactaatgtgtaataactactctagtcttctcttctaatattacttattttttaattatgaatttcagctatttctaaattgtatttctatatgtactatgctttttctttttctctgattaatgtgagaatttctaggccatgagagcgaatgtggaggctccttttattccgaattttagttggttttaaattccaatatgaactctatactctacttctaatattccttattttttaattccaaattttagctatttctaaattgtatttctatatggactctagtctcctcttttaatattccttattttttaattccgaatttcagctatttctaaattgtatttctatatggactctgccttttctttttctccgattaatgtgagaatttctaggtcatgagagcgaacatggaggctcctttttttttccgaattttagttagttttaaattcctatatgaactctatactctacttctaatatttcttatttttcaattccaaatttctactttttttcttaattgtatttctatatggactctatactctacttctaatattccttatttttaattcagaatttttattatttcctaattgtatttctatatggactctatactctacttctaatattccttatttttaattccgaatttctattatttcctaattgtatttctatatggactctatactcctcttctaatattccttattttttaattccgaatttcaactatttataaagtgtatttctatatagactctagtctcctcttctaatatttccttattttttaattccgaatttcagctatttctaaattgtatttctatatggactattttttttctttttctccgattaatgtgagaatttctaggccatgagagcgaacgtggaggctcctttttctattcctttaattacataatagattatatttctatatggactctgccttttctttttctccaattaatgtgagaatttctaggtcatgagagcgaacgtggaggctccttttttcggaatttttgttagttttaaattcctatatggactctatactctacttctaatatttcttattttttaattccgaatttctatttttttcttaattgtatttctatatgaactctatactctacttctaatattccttatttttaattcagaatttctattatttcctaattgtatttctatatggactctgtactctacttctaatatttcttatttttaattccgaatttctattatttcctaattgtatttctatatggactctatactcctcttctaatattccttattttttaattccgaatttcaactatttctaaagtgtatttctatatagactctagtctcctcttctaatattccttattttttaattccgaatttcagctatttctaaattgtatttctatatggactctgttttttctttttgtctgattaatgtgagaatttctaaaccatgagagcgaacgtggaggctcttttttctattcctttaattatataatagattacttttaagtagttaaccacggtatactcttgtactatgtacgtacactatattttttaactaacttatatacgtacacttagagagagaaaaaaaagggttcgttatttctggatcgctccaaggccgaccataggcatgttattttacaaatctaatttaactatctgacatgcatagtggatccatcagctttagttgaaatcgacggacggatctttatctttttttttcttttctggtaacttgggagttataatctatctaattaatattttttgtttatatattaagtgttagctagaaaaatatgaaaggtcagttagaaaataggagaggagaagagatacggagggtggagggagtatggattatgtacatgcgcaaatacggtgcggggtgttgtacaccggatttttttaatacagatctaatggttaaaattgatgggtccacctatttaaaggaaaataatgattaaatgtatttcttttctatcataatttttaagattttctctactatattagagtgtcatgtgacagtttaggagcgtttgtagagcaccacgtggcggtttaggagcgtttgtagaggatttctctaatttatttaagatccacgtagcggtttaaaagcatttgtagaaagtttaatgtacttttaatatatagcagatagatttagaatatggtttaaagaacattgattgaatatttatatagatctttatttaactaaatatatttatatttgtgaagtaatatattttatctaaaatcatattttaaaaactgttatttttatggaattatgttttttctattttttttcatgtgtactttttttttggttccagcaagattaggaaagatcatgtacattaagtttattaagtttatacgtatggaaagatcagcagtagtatcgtacaaatacaaacgtaccgatcatgaggaggttattattttttaataatagatctaatctaatggtgtaaactaacgggaccaccaatttaagtgaaaatcaacggtgagattagataatgccatgtggcgacttgggagcgtttgtagagcaccacgtggcggtttaggagcgtttgtcgaagtttcatggactcttagtatataatagattttgatgcgatgtatgatcctaagatcatgatcctgttaattattaacatgaatacaattaacaatagagtctcgctccggtgccttctacttggagtagaaattaatccgagccgttgatcgtatttaatcatagggttgagatctagttcttatgcgtgctttccttagaagaaaacaataagcagacttctagtagaagtatacttcagcatgttcaatacatcggctgtgttagagtttctattgaatatatgtacaaaattgtttacaatttagttggaagtatcgttactgtcttcgaatggaagtcatgcatcagcactaacttatggctaagtggaacgagcggactttgagttgtactaagttttataatagagtaagagtcggactctattctctctttaatagaggggtagatctgttgtaaccgtataacgacttagtataggctagaggtagcggctgtcggcgatgtccagtcgaaggtcgttgtaactccgatatactgtaatatgttggatcatggagaagcacatgtaataagtactccggagatataggctttggttgaacttcgttaacaaatatcgtgtctcacatgtcatgtattattgtgtttggatctcctataacatttcttccgcatttggtttcggatagtgattttgggccggttttctaacaactggtattgaagcctatgtttggtacccggaacaatttctatagatcacaagtcttcggggtcacatgggttgatgtaaggagaagattgttggattcaatgcgtgacggaagagactattggatttagtcccatattggaggtgctcattcatgtaggatgtgtgttggatttagtcccacattagaggtgcccattgatgtcggatgtgtgtgcgcgtttaaagtagtgactgagacagagtacgcacgacaccaaccggacaacaacaactggccaagtgtatggtataaccatataggaagtggaggaagggatagagtttttaaaggagaggctatacatgtatttggtggagcaaggagattatttgatatccaatggctacaaatttaggtgattctttttccaacaaatctcacactatgagataactatgcactcgaaaattgtaaatcgcattggttgtaacttgtaagaacaacactatttcgtcgacgtgtcatgtttgttgtccgtacgtggccctaacttaaccttgcattattggcacgagatttgtaggagaggtacgtatgaattggaaaggtgaccctggtcacatgtgtgaacagctccggttgtacaacaaatgcacaacttgtcgcgttgcacttctcataacagagtaccactatttatgctcttgttggctcgattaaacagcagttaatatgcatgtttttctttgcgttgtttcgacagtacacgcacatttaatcttacgtgatcatactgtacatagaacagagaaatgatggtcggaacttggaagttggaagttagcagtaaattgaggcggcaatgcatagtgcactggacgccagtagtttcgagtggaagtacaagtgcggttcactcgctgacagagtgactgacataatcacagcatcatcattgtggcatgcaaaacaaagcacaaaaaacacttgtctcgcaaagcaaaagctgatcaagagaaacttctatcgacacaaagttaaggccgcctcgcatgcatgctggaaatctgatcatctctgccatggttcgttgatcactttgccaaagagctttgcgtggtaattaatctgaacggaatgccactttgttctccccccttccactttcgccatgtgacgagagatacacaca

SEQ ID NO: 20212 - DNA, 8033 bp, Oryza sativa
cccccccccccccccccccaaaaacgcgctcgcgcttccctgccgtccaaggacgccacacacggcgcggagctcgcggcgagacctttaatggcggcggtgtctcctcgcggtgcgtagggccgcccgcccgcccgccgcagccgccgagcattttaagtatcctgtctctgtctcctcgcttgctgtcttgctgattgatatgcatacggcgccggagatgaatggccgggctcggaggccggcggcggcggcgcacggcgccaaggcggcctccacgaagagcgacagagtatgcttctcaatctggcaaaaacctctctcgtttctccgtgtgctctgttctcccttcttttatggccaatgtgcggttattttcggttcccgcgatggattattgaggcgtcctcggtcgccggcgctcgcgggatcggaaggcggcgcctttgccgcctacttgaggccagctgttcgaactcggtgcttgatagttttttttttctttttaactctcgtttttggttcccaaggtgtgaaattctgtgcgcctattttgttgttttgcattggtggcgtaatgtggttgttagtgatttgttgcaccgtcgatgtgtttcctgtagtacgacggattattaaatgttgttgggaagaatacaaggacgaacagtgctgttttgatgttcttgcgagctacgttttggttggtggtgtagcgtgagaagatctcgccactgactcgcgggcgtcagttagctttcgagagctactccgatagggtatctcttgattgctcttgagcccgcatttcttccccttctttaaatcagccgctttatctctttatctttcggagaagaggaatctgttgctttgctttgcttcggttagcttctttcacagctaaacaacgccttctttttcctcttttgatgatgatactgttgttttacgtgttcagatgatggagaaggatcagaggaagggcgccatgccggtgaagaagggatcatcggccaacgcggtcaccaaaggcatcacgaacagaatccaagcgaggagagagcggaagctcgcactgcagcaagatgtactacctgaattctgtcccaaattctcgcaatttgagaagcgcattggttcgtccgagttgtgttttgtgacgcaattcgctgcctggattttacaggtggacaagctgaagaagaagctgaggcacgaggagaacgtccaccgagccctcgagagggcgttcacgaggccgctcggcgctctgcctcgcctgccgccgtatctgccatctcaagtcagtgccacatttgcattcgcatttgcatcaaacgaaacgcattgttcttgctctgcttgggacaattcggctctgaattctgaacatgttcctgctctgaattctgcgatgtgcgaagacactggcgcttctcgcggaggtggcggtgctggaagaagaggtcgtcaggctcgaggagcaggtggtcaatttccggcaaggactctaccaggaggccataatcttctcctcggccaagaacacgagcctccccggcggcgagggatgcgtgccggcgcagctcatgccgtcgagcccggtgccgaactcagaggtctctccggcaaattgtcattctcctcctactcgaccttcaatgaacggggtcgccggtgcaaagcaaacgccgagaaagccttctccttcggcggcggtggcgcaagacgaccgctccggcgccgggaaagagaaccagtcgtgcagtaacacaccggctagaaattgtcgccattcgccgctgctgcagaaggcatcaaaatccagactgccgacagcagcagcgcctgagaaacgcagggctactgctcaggtaaaaacagtagtaataagatccttattgctgctgaatggtatttatttacacatttttctaccatgaactaacttcttctgaaccgtactgctgctgcatttttttttatcacacagacgattagcacagtgccggaccgtaaaaggctcgcagacactgtcagcaataattcagaaaaagcttcccaagatgactcgagcgtgccgaacagattgtcggaggaactgttgagatgcctgctcgccatcttctcgcagatgggcggttcatcagcaagcggccaagacgaggagcaggcggcattgtctccttcggtttcaggttcttgcgagagctcagaggacgcataccctcaagatccttatggcatactggaattcggcacaagagacgttgggtcatacaagcgattccatgtaatcgacgccacctcgttcgatcagacggccatggagaacgacaccatgcttacccggaaactcaagtgcgttcttgctagtgcaattttccgttcagttattacaagctcggtttggttgtctgtcgagtaggtggccgcctgacataattagcatcgctgatagaggtggttcatgtctacctggcaaaatctgcagggctttgatccggaggctttcatcggttgacctgacggggctctcccatcagcagaagctggcattctggatcaacatctacaattcgtgcatgatgaatgtaagctgtcagcctgtcactcataattgagcccacccatcctgaatttcttcatcttgatcaattatatctttgttcattttctcgttagagggaaatttccatttcggtgatagttacctccttcgttatcaatgtttgcctccgatagaatgacagaagaactactgtatgctggaatatttcgggaggttaattacttactaccgcattgcatattactagtactatatggtacagccagtacaacattacagcatgggcgtggttctgacgagtacgttctttaaccatgaactctgaacatagtgctggcatgtctgtgtactgttctcttcagtcatttagttttgcttaaagaaatgcttcctgtccccatgaccataaacaaaggctttaactaacactgatcaccatcatcatcgctttggcattattatccttaggcctaactatctcatgccatctgcgatacggcctaggaaagggtagttaaggtaggtagatgtagtagtgtagtgtcatgcctagtgcctcatacttgtccctaacacttgtcttccttgtcgtactgcaggcatttctcgagcaagggatacctaccacccctcatatgctcgtggcaatgatgccgaaggtatagcactaagtaacttcttgcaagcagcacaaatcatgatgcgccggtgattaacgaagtaatcaagtctctgacgagagagtgatctccgtgtttcgctctctgttttcaggcgacaataaatgtgggtgggcgcacgcacagcgccatgtcgatcgagcatttcatcctgcggctgccctacagcgtgaagcatgtaaggcgttacagtatagttttgtcatggtggatacggccatcgtagtgatccgggtagattggtgttccggttgcacagcaccacacgctaaaactaacaacctatatatggctcgtgaatgaacaggtgaatcctggtggagtgaccaagggcgccgccgacgacgtgacgatgcgaggcgtgttcgggctggagtggcctgagcccctggtcaccttcgcgctctcctgcggcagctggtcctcccctgctgtaagatctccatgattccgtcagatttttgcagcattacagcatgtaaaaattccgtgtagtttgtgatgaggtgttgtgtgattgtgtcttgttcttggtcatgttttttttttcaggtgagggtgtacacggcgcggggagtggaggaggagctggaggcggcgaagagggactacctgcagtcggcggtggtggtgtcggcgccggcgaaggtggcgatcccgaagctgctgcactggtacctcctcgacttcgccaaggacgtggactccctcatggactgggtgtgcctccagctgccgagcgagctgcggcagaaggcgatgaggatcgtggaggacggcagaaggggtgtcgccgccgagtcgcgccgcgtgcaggtcctgccgtacgaattcagattcaggtacctgctggcctcatgaagagaggccagtgagtagcagcaatcagcgagtgaattcgagggtgttttactgcaccttgtacacaggcttccaataattgtgagttttgttcttcggtgatgtgaatgaatgaaaggaagtataaaaggtgtttccaccagaccacgactactccagtcgagatcgagtaccggtcgcttcttctttcccttccttttcgtgcttggaagagatggtactccagtactactactcagcttctgtacacaggcctgtcagacttgttgctaaaaaagcgaaaggcgccatggcatgctgtcctgtcagcagtcacagtgattaacctgaccctgcagcttttccctgctgcgtgtttcagccctgatgattgggaccaacggtagaatctacagtacgaccgagacaagctacaggatcaccgtggtcgttgaaaatactgtacgtgtcactagcttaccgccaccgacgggataatcacacggtttcaccgccattaaacgacagggagggaagctagctggcgttggagtaaactcaggccgtgtttagttcaccccaactaccccaaacttcaaactttccatcacatcatatcacatctaaaatttttctacacacataaacttccaacttgttttttaaaattcctaattttctccaaactttcaactttttccaagaataaacacaccctcaggtaagatccctggggaccctacacagcctcgtgtcgtatgagtagtagtacgacctgtgccgtaggtttatatactcctaaaaacggacagggtggctggcgtccttgaaggacaggcagggtgtgtcacgaagctgctgcatctcatggcctccgtgcccactcgctgctcacctcccaatttcccaaacgatccacccatcgttgaatccactgcacggcacgggacaaaacaccggtacgtgccgtgcgagtgtcgcgtcgcgtcatatatcgcagcttctgttggagtaaagcgcggtgccttgtactgtcgcgtcggagcagccacggttgtttggcgtacgtacccgcggtggtgtctcgtctgtacatatggccctccgagagtccgaggcgccgcgtggcgcggggattttgccacgcttgggattgctctcatggcgggtgcacctgctgttctgccactgtcatatcagtagtccccgagggccgggctagactgatcagcggcgtgcagcgccgctcttttctctttgggaggagggaaagggggccgcggggcgggtttatgggatcgtgtgaatcctgtagtgattgaatcatggaaggacggatcgatggggtctccttcgaagagctgaggagggagcaatgcaatcagatgagattgcgtggctttttgtagagggtaagtgctacttgctggagtaggtaaaaaaagaggatttgaagggacacacgaccccgagtgtgttggggattaagcgcctattaagatttagttaaaataaacattaccaagttttggtaatactaaaattttgacaagatttttttatgtattggccaaatttggtaacaaactaaacgttgatatttttttacaacatttaaaaaaaatggtatggttcaaaattgcatcaaagtgaacaggccctaaatatagaatcttgtgttgaactacacatcccttgttactgtcctatcgagtatatcttaagtgctactgttaggtgctagcacctcaatcaaaggaaaaaaaaagatcaaagatagccagatagtatcctaaaattttaacatgaaatgctgatggctgctatgtgttttttcatgtgaaggacgaacacgcacctccattatcgacagacgcctctaacatacatactcttagagtaataactttaataatatagccaactattagctccaaaaattaaaacatcaactataatcaacctaatagcctaatcacacattaattagttgtaaatacatattatataattaataccttgccaacggtggatacccgtagaccggatatagacactacaagagatcttatgataggtgacgctttatttatgtcacaaacattgaattttacgtcatgttatgtaatctgtgacgctcacgtgacgaaaattcattcgtcatctatcatgtgtctctaatggcgttctatgacgaaacctttttttttcattaatctagtgacgatccttctgtcgtcataaagttatgacgtccattttcgtcaccatcaagcccaaaaatcgtcataaaatttcatatggactgttaaggcccatgtagtgagcaacatgtttttgggctaggccttgttaaagcccatgtagtgagaaacctattaatgggctaggcctactgtaagtccaattagattttaataaattcagcccaattcatctatattgaattaaatattaaacgggccatacattttcaaaaggcccaataggcccaagcattgcacatagtatacatatggctcatgcacactggagaagcctttatatcaagcaaatttagcccagttaagattcaatataaaatccaattagcatttgatagcccaattaacatcatttagcccacaagcaccagttcacattttagcatgtcctaatatagtcacaatctcatacacaatctcatattcacggaactcgatgataccaatgagaccgtagtcgagctggttcgactagatcacccggcgacttggctcctgtaagctccaacttcgtaggctgtggtggttgtgttggcggtgagattcgatgccttgggtcctcccgggggatcccttttataccgcgggtcagtcgatctctaagtagaattcggagatattggaccccacatgatatggtaacgacccagttccgtccgagtaggactctttccatctgtgaactccgtttatgttacgtgatagatttccttaacatatacaagaaacacccgtatacgcgtgggtataccatatcagtatatatcttatatccaaggatagagggtatgccttatccgtaaccctgacatacctaatccactcatctatctcagatataacttattggagcccgtggtatagtcggctacaactctgtagcctgtagaaattgctatagagtccattgccaactccgtatacatactatgtctatgtgcccgtggtttagattatactaccagttgaaataatttgaaccgttcgttattaagggtaaatcaataatttactaataatacaatgattaagagtaactttgttatttatgttttttttctagctaaatgaaaaaagtttagtcattgaccctacctcacctacttttttcagacaataatgcccctttctatttctactactgttaactaaggtgttagtataaataaatctaaacccttcgattaaataagattaatgggttagattgctttcttctattaatataaagcaacgtagtggggctctatactagcaatggagtagagcacgtacagtacgatctattaattgtagtactacattccaaggctatccacgttaggacaggtttagatggagatcaggcaaaagagtagagggtcttaagggagtatcatgcactcgcacggtttgtacaggcctaggtagcaacagtgctacacttgaccttcgtgtgttagatttgagcctgtcgcaagcagacaggctcgctcacgccgtcacgcgggaccaagcgtggttgatagcaccggggtggcctgctcaccgtgctcgcttcggcccaaaacttgacgccttacgcggttaccttgattgctccagtttggaataagttcacttgaggtcccttaacttgtcaacgaatctgattttcgtccttcaaccggaaaaccagatacaatagatccctca

SEQ ID NO: 20213 - DNA, 2313 bp, Oryza sativa
atgagccagcaagggatctggtatggcgacgtgttcccgttgaccagaagcctcgcggccaagcccatcgtgccgtgggacgcggcgacgatgcagtcggcggagaacctcgtgttggggaagacggtcaagggcggcccggccgccgccatggagttcgcgacgagtcgtaacgaggagatgggcgtcatcggtcatgaccagtccacggacgccaccgctgagcatggcgtcaacatctccgataccctcgtccccggcggcggccgcatcgtcactgagttcgtcccggccaggtaatcacactgttgcatgaacacagttcgtcgttgccgtctctccgattgttcgagcaggatgatggcgccgccgcccttcgactcccgcaaccctagctccgcgtcgcagaccgccgaagaagtgcgcagtgggcggcggccagctgccgtctccgccccacttgccggccggcgcctttttccctctccgtgggcgctcaccggccggcgaggaacgatgccaggagggagagagaggaggcgctggtcgctccctctcccagtctctcgtcgtccaatcgttcgtggatagtgaggatggtgggacccactgacaggtgggtccactctttttccctttggtctaactatatgtgggccctatatttttgtttttgtttttaatttttatgttttccttccagtgacacgtcaccgccatgtaggacgcaaaccggccacgtagatgccacatcggccaaaaccaccgtcaaaaccgctgagggacctgctttgcaccggttttgatagttgagggatccgttgtatctggttttttggttgaaggacgaaaatcgaattcgttgacaagttaagggacctcaagtgaacttattccctccagtttcaacgttttatatgggccagaccaaacagatcggcctatgagtaatcaaacatcgccatctccctgcactaacccccggaggcccggacgtcccaaacatcagcgcttcgatttcgcaggggtaaccctggggtcaactctgctgtcatgctattgctacctcctgcatgttatgtcgaacaacctgatctttccattgtggagcgccacgacatgtactatcgagcaacaactgaaagatgttgacaccaacgtagtgaacagtacgcatcaccatctcatttcccgacacattttggcagacagatccctaatgcgatcatgcggaaaataaactaatcgtttcttggatcgctgctccgttgctttctcaatcccggatcatgcatgaagcatcaatttaattgacagatgctatatctagcagtaagtaaaaacagagggggggggggggggcacaggtatcatcggtactcaactgaagtaggagtacatgatttttatcggaaaaatttatgagcaattaataatgcatgctgctatttcattgatatactatcatgcaagaaatcgaaatggtcccggagacaagatcgcgcggccaagtgtccggtcgcccaacgaaatcacaggcgtgccgcgaccgcaagcgcgccctcgccgtcgccggccggccgggcatgtctccggcatgggggcgttagagcaagtttaacagtacagcccactactaattttaaatcatctatagccgatgtaatagtcaattcatacaatagttgcttactatattattaatacctggtctcatctatcatacatatattacgtcttgaagtccgtgctacagctagctacagatctgtaacccgttgctcttttttttcctttatctttttaaaatatatttgtagctggcttataagcctgctatatttatagctggcttagggcacccgcaatggttatttataggctctctataagagatccatgtcagcatattatcctatctggaagagattaaatgaagagagaacaaaactatctattaacttagagatagtctgtagagaaaaacaggcaatggattagagagctatacatacccatgtagacatactattaaggtgatttactattaatctagtctattgctgagatgtacatgttttatagagagcatcttactttaccattgcgggtactcttatagcctgctatttatagctggcttaaaatatatttatagatggcttaaacgagaccggaaagcatgcgtggggcagcgtgctaggagcgagccagcgaggcaggcatatgctcagcacagggccgtacgtccttcgaggaaggggcaagcttggtacagcgtcacatgcgtgcttgggcgtcggaccagcgtct

SEQ ID NO: 20214 - DNA, 766 bp, Oryza sativa
cgccgccggcgtccttgtggtgtccgtcgactaccgcttagccccggagaacccgctccctgcaggatatgatgattcttgggcggcgctccagtgggcggtgtccgcccatgcggacgactggatcaccgagcacggcgacacggcgcgcgtcttcgtcgccggcgacagcgccggcggcaacatcgtgcacgacgtgctcctgagggcatcctcgaacaaaggaccgaggatagagggcgcgatcatgctccacccgttcttcggcgggagcacggccatcgacggcgagtccgacgaggcggtctacatagcctcgaaggtgtggccgttcgcgtgcccgggcgcagtgaacggcgtggacgacccgaggatgaacccgacggcgcctggcgcgccggcgctgtataagctcgggtgcgagcggctgctcgtgtgcacggcgcaggaggactggctggtggcgaggggccgcgcgtactacggcgccgtggccgcgagcgcgtggctcgggagcgcggcgtggcacgagacggagggagaggggcacgtcttcttccttcgcgatccggggtgcgacaaggccaagcagctcatggaccgcgtcgtggcgttcatagccagcgcatgaacttctcttcttcatctgtatatgcttgcggacttgcagctgtatcttgcttgcctgagattaataaatcaataaaatgttatatattgtggcagtggaaaacatgatcattagtccattttacctgtattgcct

SEQ ID NO: 20215 - DNA, 1993 bp, Oryza sativa
gtgcaggacgtgctcttaagggcatcctcgaacaaaggcggagtatagaggggcgatcatgctccacccgttcttggtcgggagcacggcaatagacggcgagtccgacgagccggtctacatagcctcgaaggtgtgtccgttcgcgtgcccgggcgcagtgatcggtgtgtacgacccgagcatgaacccgacggcgcctggcgcgccggcgctgtaaaagctcgggtgcgagcggctgctcgtgtgctcggcgcaggagcactggctggtgccgagggaccgcgcgtactacggctccgtggccaccagcgcgtggcgcgggagctcggcgtggcacgatacggagggagaggggcacgtcttcttccttcgcgatccggggtgcgacaaggccaagcagctcatggaccgcgtcgtggcgttcatagccagcgcatgaacttctcttcttcatctgtatatgcttgcggacttgcagctgtatcttgcttgcctgagattaataaatcaataaaatgttatatattgtggcagtggaaaacatgatcattagtccattttacctgtattgcctgcgttctagagaagttatatatgtttttgatcacgcctttgagtatagccatgtggccgcgtggcgtatagtagcctacaggtactggttcttgttcacaatcgagggagtgattctaatccctcgaggggatatcccctcgtatacctttttcttctaaattcgatgcaaatggttgtgaaaaattctgaaaaaaaaattgacaatgtagagtataatgatacctactagtccaccaaaattcatgttcaaatttgatctacacatcgaaaaacaaaaaagacaaatttagatataaatagtacgctactattcatacgctgaatttgtcttttttatatctcgacgtgtgagttgactttggacttaagattttgtgaagttgtatatatgtgttgtatgaatgttgtcaaatttttccagaatttttaataaccgtttagatgattttttgagcaaacgagggaacttcccctcgagagattagaatagtttctccacaagggatatctttatgcacttatatatatgtgtcagttgtgaaaccggtacttatgaaacaccttatcagagctgcctgacagataccaattacaaattcaacatcaaagaccgggtttacaactgatatcaaagcggttttctgtgccggatatcaaatcatatctactccctttttttacgtcatgtgatagggacttaaaagttactatccaaacatccgatgtgataaggatttaaaagtttaatatttatagttagtgtccaaacatccgatgtaatagggacttaaaagttttagtcccatctaaatatggtcttactttggttagttttttttttctataaggggtttgtcccatattgcttgtctatatcgttaggaaaactttgtttatgtgtatcaaagattctgttcggctgcactcatttttattgtgttgcagccaacaggcacaatgtcttctgtgtgcagccactgcagcgcaactgctaaacataacagccgaacatgcccaaagaagcagagacagctgtccgaaggcacgggcggcctatcgtgccttctttaaaataagtctattttccccctctctcctttttgggttatgatatatatatatatatatatatatatatagttaaaataagtctattttacgttcctattctttgggccataccatataatatgtgtatttttcctccctatactttctgcggtgccttacacatggttgaaataagtctgtttcacatccctgaatttcgtgccggcccagcgtgttgaggtagcagcctagacacggtgcggttgttgggccgggccggcacgggcacaacccgagttgggctgtgtcgtgtctgggccaggtgaaatcgccgggccacatggccatctacaccccccccccc

SEQ ID NO: 20216 - DNA, 5034 bp, Oryza sativa
tgttttcttctctagcttggctagtctgataaacggacataatttcttctctctcttcagaagaaaaacggaagcgtttcagtatgattcggatctgaatcacacactctttgtcatgtgacagactgacaggttcgttgattaatactccaggggtaagcactaagcacgggtgcccagcctttgccttgcgttaccaccagcaattgacatttgacagcgatccacttagccacggccatggagtccaacgccgccgacgagctactgctcgagttggactccctacgcatctaccggagcggcaagatggaccgcctccaccatcccgtgcttgcgcctgccggcgtcgacgcggccaccggcgtcacgtccaaggacgtggtcgtcgacgctgacaccggcctgtccgtgcgcgtcttcctccccgcccgcccagatccgtccaagaagctacccgtcctcgtcttcttccacggcggtgccttcgtgatcgagtcggccttctccacgacgtaccatggctacgccgcgtccctcgccgccgcggccggcgtcgtcgccgtctccgtggagtaccgcctcgcgccggagcaccccgtccccgccgcctacgacgacgcctgggccgcgctccagtgggccgcgtcggggaaagacgagtggctcgccgagcacgcggacaacggccgcctcttcctcgccggagacagcgcaggcggcaacatggttcacaacgtcatgatcagggcggcgtcctcccatccagcgccgaggatcgagggcgccatactccttcacccttggttcggcgggaacgcggtcatcgaaggcgagtccgaggcgacggccagggacatggccaagatctgggagttcgcgtgcccgggcgcggtgggcggcgccgacgacccgaggatgaaccccacggcggggggcgcggcggggctggagaacctccggtgcgagagggtgctcgtctgcaccggcgagaaggactgggccggggcgcggggatgcgcgtaccacgcggcggtggccgcgagcgcgtggcgagggagcgccgcgtggctggagtcggaaggggaggggcacgtgttcttcctggagaagccggagtgcgccaaggccaaggagctcatggaccgcgtcgtggcgttcatctccgcctcctgagtccacctgggccgccgattaggtgggggtggattccggcgagggagggggaagtcgaagcggtcgatctgagcagtgtgtatgcaaattcttcgaataaagtggctacatgtcaaattgatatctcaatctgcgccgcctaggcgaacggtgcggtgaagcgggacagtgcagggcactgtggttctgttagggctttcacagcgcagtgacgtggcattcagccttgagcttacacatagaagattttcagccacatctgcatttctcgtgagcaaaccaaaaacgtgtgaccatattgagacacacgttcttcatcaaccttttgtcagcgttgtcaggcactcaggctagcccacactcgaggctgatgctagccatggccgtggatgaggtagatgagtcggcgtctgtgccgcttcggaggagaagcgccgctgacctcaccgtccgccgtccctcgctctcacgccgctgacatcgtcgttgattcaggggacgagaagaggggtggatctggccgctcttcaaccgctcatgtgccgccgacctcacagtccgctgctcttgcaccaccgaccttgttgtccaccgtggtgaatcaggggacgagaggaagggtgaatatggccgctcttcaaccgctctcactccatcgacctcgccgtcccccgcggctactccacccagcaccaatgccaacaccacttgggccaccccaccgctgctccgctacgagttcgtcgccgccggtgagttgaggtggggttggtggggtaagggagagggggagggagctgccgccgccggttggggcaggggcgcagctacggggggtgccggagggggccaacacccccctatctgccccctccctgctatactatttagcgcattagcatgttaattagtccattatcaataaacatgatatagaaaattaattaataagaaagagacggagagacaacacaaatcaactcctcgtctaaattgcttcggcttcacacatctctccgtcctcccattgcatctcgctgtcgagcatggtgactcaagtctcaaactgtcaaacatccaatgatacaactaaagagctaaattcaagctttttttaggcagaacacatgatgccctgttttgtcgttggcatagcttactctgacttatgacttgttcgccctgcccacacccccctaactatagatcctggcttcgcccctgggttggggaggagatgggtctggagaggaagagaagggggcgagggagtcgccgccggagatgagctcgcaaatctgcggcgtcagtgtggtggggagggggagaggagggggcacgtgggagccgagtgagaggaagagagaggcggaaggggaagaaaaggtggtggggccgacctgaaaagaaaaagtggtggacccacttaaagctacgagtgcacggtggagaggggagcttcgactgtttttcttcttatgtggacatttgggctcctcaataagataggacgcattgctattgcccttaaaggggtatttggataaataaggttagtaggcaatctataagaatatgaagaatccaagaagcagttggttgatatccgtttctaagaaactcagtttttatcttctcggttattttctatatcttataagtacaatttcacaaaatctagataaaaagctaaattatttggggagcttttaattcgagaaatttcaaaatataccatccaacttgtagcacgttcaggatcaaccatccaatccgtgtgtcttttagaatctgccatcacaagagctaatttcttcatttcgcgtcattccgtccatccgaagcaacgttgtccatccatccgttgccatgtcctccgtctctcgccattgctcgtcgccacttccagcaccgaggtcagggatggcggccgagcatgcggataggcggacgacacgaatggtgacagcggcggacgagctcgggtacggatctagcggcgacggtggccgagcttgcggatggcatgaatggggatggcggtggacgagctcgggtacggcgctagcggcaacgagatgcaaggtcggggacgacggccgagttagtggacggtgcaaatgccaaatagcgacggcggtggactagctcggtgctagatgcgacggcggcagtggtggccgagctcggagacggcttcgcgcggacgggcgtcggacggatggatggacagcgctagcggcaaccggacggagtggcgtgaaacgaaggaattcgctccccccaatggcacgttctaaagtacacatggattggatggcaaatcctgatagggctgcgaattgggtggcatgtactgaatgtagctgcataagctccccaaacagacatttataagtgtatagtgcagcttctaaatagtctacactatactgagccacatactgtatgtttgccacccgtcagaaaccgttccttgcgaatgcgcgtatgcacgaattagcatttctgatctcctattgcctttgggagaggaaatgctttggtatcgcatcattgccttccacaagtggtggttcagcttcatccttccaggagcagcagcagcagagccatggctggagctagggagccaatttcctcagccagatttattttgtttatacatgattggtcgatacagatttgattttttttcagtttttggcaatgctacggtatacttttacccagggttggaaattttggactgaaatttcggaaatttctgtcatttcagtcacctccgatacgatattatttcggctgaaatttttcaattttttaaatttttcatgaattggggtaatatttattcaaattcaactaaattttgcttaaaatttcggaaatttcggaccgaaatttctgaaatttcgggatgtcggtaacccccgatacaaaggcatgttccgatagagtgaaccctgcttttacctctctaaaactcaaattgtgcattggtttcatcaattttgtggtgctgatttggcttggcaagggtgtatagttgttgtttcagagttcagacactgatccaataagaaaaacaacccaagtttgtaaagctgattgctgaataacgatattgtgcattagcagaagattcagtatagtgcaggaccacaatctggtgtagtgcaaactacaaaaagcccgacccggcaaaaaaactacaacaagcctgtctcagttgaagggtcttggttagataattcagtgtaggtatactataattgattgaattataaaaacactgttcagaaacaagaagagtactcctacgcaacttccacggttacttaatggtattgaaatcatgaagtatcagtagaatgtagcttaactaaccagaggcatactgcgatttggccatgactaatatgcatgcgtaacatccttgattgctgccgctcttgtttatctttcttgcaccagtaatgaggaagtatttcagaagcaatctgcgctcaaagcacttcaagctcaccttgtgattaccttcggtgtgttctgacttggggctctgctctttcctactagtagctgcaaattgcgatgagaatcgatagctctcttgcaggcagcgtataatcaaaggttggaaccttctctcataaaggtggcttagaccgtagcagactagcagtgtgtgttttgtgtttgtagtgccaactgcattcccttcatatcatactacattactgccaagatcaagaacaaaaggttgtgctcgtttctctcattctctcactctcaccatcgccatgcctggatttgcccaagaatttcaggccaacatatgagtatattaggcct

SEQ ID NO: 20217 - DNA, 8753 bp, Oryza sativa
attttgttagttgaaagaacataaactcgataagcccgagaatgagtagcatagccaaggaaaatgccatccaatgatcgagattcaaacttgtccaaatttccagatttaagaacaaagcatttgcaaccgaagaccctgagatgtgaaacttttggtcgacgaccaaatctgagctcatatggcgtcttgtgcaagatagttctcaaaaacacacgattggagataaaacaagcagcagaaatagcttcagtccagaactttcttggagtcgtaaactcatcaagcatagttcgtgccatctccacaagggtgcggttcttcctctcaaccaccccattctgttgtggaacatatggcgaagaaaactgttgttcgactccagaagaatcacagaaaaattcaaatgcagaatttttgaattcagagccattatcactgcgaatggctcgaagagcaccaggaaactccaaagccaaactacgagcaagagactggaagaagccaaatgtttcctcctttgattcaagaaaatagacccaagagtagcgagagaaatcatccacaacaaccaagacataccacttccccccaactgactggacccgagcaggaccaaccgtatccatgtgaagcagttgtcccggtccatctgtcataaccattgtaacaggcttgtgggaggaagatgtcattttcccatgacgacatggtgcacacacaagatctttcggagctttcaacttaggcaaaccccgaatcaaatccataccactaatgcgagacaagtggtcaaagccaatatgaccaagacgtcgatgccagaaaaacaaatccctattctctgaggcaatgagacaacgagaaggaccgggagcagaagagtcgaagttagcaaagaaaactcgaccaactcgagaaatgtcaaaaacaggagattcagaagcatcaagaactcgagacctgtcctttttgaaacgaacttccagattttcatcacagagttgtgaaacagagagcaaattgtacttaagcttacttactagtgccacatctttcagcatgaatttgtcattgaccttgattgttcctttagccatcacgcgtccactgctcgcatccccaaaagtgatggtctcatcaccggatgcacgagtgagagaagtaaaccacttggcttcaccggtcatgtggcgtgagcaaccggagtccacaagccaagaattacttctccccactccaaaatcctacaagaaagacacagcagatctcgatgattcagtactggggttagtgagaaatgacttaggaatccagtactgaaccatgcgaggagtacaagcatctttagtgttatgagcagaattatatgcaagatgaccatgtctgttttgccccaaccttgctaggtcacgtcgagggtgcacatctcggcgaggaaagcgagatacaccacttgaacgacaatgacacgcacactcgaacctctcagggactctagtagctcttctagtcctaagacgttcttgtcgctcttttctagcctttctaaagcagaaacctaccaaatgaccagctttcccacaataggtgcactcatacttggttttctctacaggcatggtttgtttctggttttgcttgtgctcaacttgttttggatttttgggtctaggtaactctacaggcttagacttgctagtcataggtaccatctttggttctgaggttttgggtgtactagaactaatgtttccaatgaaacctgcagacttgaaggttataggtttttgagctagttctatcatcccatctgtgacacctaaaatctcatgggtacctatcctcaaagactcagcaaaatcatagcctataccttgattgtttatggacactttggattggtctaggatcatgttcaactttttctttccttgagcaaacctctctaaagattgttgtaggtatgagttctctttcttagcagactcaagatcaactttcagagaaatgcatgatgaacaagaatcaatagatttgatagaatcaatgacagttttagcatcttttagttcagtttccaggatagcacaattagcacatgaagaatgaataggttccttagtagcaaaagattctaacaaatcattcttggtcctaagcatggcaacttgttgtcttaattcattattgtcactagtgagaatgggacaattttcacacctaccaatcctatcatgaacaaatttttcttttagttctttcaattccatctcaagcaaacccatatcaactttcatttcatagcaagtagagcaagcagcactagcactagaagaattcccagctcctaaagcacatgatttcaacttatccttgaggagattaattttagaaagatatgaagcacaagtagaacaggtatcctcctcaggaatcatggatctaagcctagcaatttctagcgccattccatcattttcagattttagtttctcaattttatacttagaagacctatacttgtcactaatttcaatcatcaagtgtgccattctttctttgcttagttcatcatcaacagagtcattatctgagcaaaaatcatcacaaagagaaccatccaaggaagggatatcatcaagacatacctcaggatgctccgatgagtcatccttatcctcaagtgccatgagacacaggttgatgaagtcctcgttgttggcgagacagcacatcccggagaagtccttgtcccccttttcttgatcatcgtcgtcggagtcgatgtcgctaagctgcacctcctcaagagccgccaagaccttgtgaatcgccttcttcatcaaatccttcttcccctttcgcccttgtccctcgggcttcttggtcgtcttgtcactcttcttctttaacttgggacaattcactcttatgtggttaggctctccacactcaaaacacacaaatggttcattggtttttcctctctttttatctctcacatttttgtaagctcttgagaattttctagcaaaaagagcaagatcatcttcagggatcttctctaattgctcctcagtgactgagtgtaaagcggcaagagagaagccaccacacacaaaagctgagtcattagaagaagtactaccagagggatcagctaccaaagccatggagtgtttgaggcctttccgatggaaaacatccatctcatgggtttttagctttgagtaaagcttgtccatggtaaggtcactcagaggagcactctctgtgatggaagtaactttcatttcccaaacaccataatcaagacaattcaaaagatgacgagcattatcattatcagaaaactcttttccaacagatcttaactttgaaacaatttctccaaaacgcttgaaataagaatcaatggactctcctgggtgcatctcaaatctttgatattctttatgaaattgattctgacgaaccaattgaatatcattgtttccctcatggaaattgcacaaagcagtccacatgtcatgagcagacttgtggtgttgaacacgattaaattcaccagaagaaattccaccaatgattgcatttcttgcacgataattaaaatcaacctgagccatatttgcaggcgtgatgtcagcatcatcgggcacagtgtaaggtgatttaaccttattccacacattatgcccttgcgactggaggtaggcctccattcgtgccttccaaatgacaaaattgtgtccatcgaaaacaaatggtttcgcagagtatttttcttccatagctgcgttcgttgccacggttaggttacaacgaacttaaccgggctctgataccaattgaaagaccaagaacagctatagaggggggtgaatatagcaattcaaatcttgcccccgaaaatactcatcaagccggatttctcaaaatccttactagaaccgcagctattagagaagccggatctagaaaagaagagagaaaaagaagagagaaggaattcccgaaactagaggaggaagagaaaatgaattcccgaaactagaagagaggtgaggaagagagagcaaaactcatcatcgcaaagttcaaattgcaagcggaatttaaattgcggaatttaaatggacaaggcaaaaatgaaatccttcaaatcatttcatttataggtgatgcaaaataaccgctcaactaggagcaaacatacaccttcagaggaacattaacacaaacttaaaatctctcggacaaacacactcaaactaatcctaatacaaaagcctctcgggcaaacacactccaaactcaaactgaaactctctcaccgagcatctcaaaaggattgccaaagaagcaacctccacccttgcatccatctctctatttataggctaagacccctaagacattgtctcaaatacccctagggcgaaaccctaactcagaatggatctggtccacccattcttccttagaaccgaaggaagcctcctggatgcttgccacgtcgttgatccaaactctccacgccgcactgatccgcgtgctccctctccaaaccagtgacgagccgccacgtcacgcctcagcacgcgagagcgcgcgctccaccgcgtggatcccacgctcacctgcgcgcatccagtccaaagcctccacgcgtcccgccgagctgctcccgcgcatgctcgcgaaatcgcgcgtgggtcccagtacaactcccgcctccgagccacttgaaacagcgtggaccccacgcccgcacgcgccgaattccttgccgccgcgtgtccactgcgcgcgcgtgcctcgcgcgatctcccgcgcttgcccgcgcatggtgccaatgccgtgggccgtcgtcttgtcttgggcctgctcggcctggcctccctgcctgctgatccatccatcatcttgagccacgaggaagggctggattggcttggcctccctgccaaccaatcacagctcacatgcaccaatgggctagcaagctcctcatgcacacatgcatgtcttgcccccgtgcatggcattcggccatgtgcacgcatgcacaaccgaagcaccactgtccatgcttgcatatgcacatgccagtgcatgtatacaagctcctcttccattctccattctgttcgcgaacccggcacttgcacttgaccttgcgaagtccgttgcgaagacctccttacacggtgttcgtccaccgtgtgcaaccttatgtccaatcttgtcatccggcatccttgatcgctttggacctcaactcctccctgagtctagtcccgatccgccgttgaccaagatcgaccccgatcacctgcacacacatgaaccaaacaaccgttgtcttggcacagatgtcgcaatctgaccaatgttagtccacgcacacacttcttgcacttccagtacttgtcaatttcccatcacaaaagaactataaccacacatggtttcacaatctcccccttgatgggaacattgacaatcccaagcaaaaattttgaaaatttgatttttgattcacaaagcaaaccattttgcaaacgtcgaactttggtcattttgaaatcgtgaaaaatcaagaccaagtgaagtgacaagaagaaaagggatgcgaatgcaaatgcaagaatgctccccctatgtgccaaactcccccttttaccaagatctaaagcaagttttaataagtgcaaatttctctccccctttgtcaatgatgccatcaagatcaaaagagacaaaaatgcaagataaaaatgagatgaaacttacaaattttagtgttttgagagctttgagagttatctaaaggcatcaaaaggtagacatggatcacacagatacaagcatgtgctcaagcctagctaagcatgtgcataagaagtatgaaacatgtcatggatatcaagttagtatcgccagcaagcaaaaagttttcaagtgaattagtgatttagtgtgcaaagctatttctagaagaagcttaaaaggaagcaaaccagctcataatcatgcaagatttacataatcaaagcaatgaacccatgctaatgtgctaatgcccagttcataaagagtatcaacatgataacaaagcatagaacatgagcttttaatcttttctcatgacttttatatttaagatttttttttaatttctttaaagacaatagcacaatcacgacggtccacctgatcttatcagtcagcaagtgatggttgtgccaaacactgccgtctgacctcaatcaagttttccagctagagttcccattacaggctgtctcagtgctatcttcggcactactcatgcgtaaacgcactcagtagcccggacaaaaacagagataaagcttgtaaagcatgattgatacaaagtatggacgcataagcatgagcattcataagcatgtactgacagttattgcaaaaagaatgtaaacatggcatgagtatgagagggatacttcaatttaaacaaacttctagagcaagcattgcacattgattaagttcaaatgaatagtcaatttaagcaggtttcaacaagcttgaacagcataacatgatcacacaagctacttaagcaaatgaaagctagacaagagatcaaactagcataagagtgatacatgcatagcatagtgatgaccaagagataacaagcaaagctcaattgaagagtgtataaaacaatgcataaagtaaacatgatgcaatatgttacaaatgcatgcaaaagaaaaacaactccccctcaaatcaagccataggggtggatcacccctaactcactccgcaagaactcaaaacgagagcgatcaagtggttttgtaaaaatgtctgccaattgtttttcagattcaacaaattctagcacaatggcacccttctcaacattgtctcggagaaagtggtaccgtatctcaatgtgcttggtcctggagtgttgaactggattttttgcaatattgattgcacttgtattatcacaaagcagaggaacaccagagaaaaacagaccataatctttcagagttgaaatcatccaaagaacttgactacatgcactagcagcagctacgtactcagcctcagctgttgattaagcaacagaagactgcttacgagaggaccaagagaccaaagaagtgccaagaaaatgacaagtgccagaagtacttttgcgatcaatcttacacccagcaaaatcagcatctgaaaaagctcgaactgaaagggcagaagagcaggagtaccaaataccgtactcaagtgtagacttgatgtagcgaaagatgcgcttgactgcttggcgatgtgatgttcttggagaagcctggaacctcgcgcacaggcacacggagaagtggatgtccggccttgacgcagtcaagtagaggagggagccaatcatacttctgtactcgcgctggtcaacttcttcaccgtcctcatcaggaccaagcgatgaagtagttgccatgggagtggcgattggcttgcagtcggccatgtcgaacttcttcaggagctctttggagtacttggtctgatgtacaaagattccttccttggtttgcttaatttgaagtccaaggaagaaagtcagctctcccatcatgctcatttcgaattccctgctcatcacatcagaaaactgggcaacaagtgcatgagaggagccaccaaatatgatgtcatcaacatatatctggacaagaagaaaatcaatgccactatgaagagtaaagagagttttatcaactgcccccatttcaaaaccattttgaagcaaaaaggttttcaatctttcataccaggctctgggagcttgttttaaaccataaagagctttatcaagtttgaacacatgatttggaaattttggattttcaaaaccaggaggttgtttgacatagacctcttcctcaataactccattcagaaaagcacttttcacatccatttgaaaaagcttgaaaccttttgaagcagcaaaagccaaaagaattcgaatagcttctaatctagcaactggtgcaaaggtttcttcaaaatccaagccctcaacttgggtgaaaccctgtgcaaccagtctggctttgtttcgaacaattgaaccatcttcacctagtttgtttttgaaaacccattttgttccaatcacattaaaacccaagggtggttctaccaaagaccaaactttgtttctttcaaaattttctaactcttcatgcatggcattaacccaattctcatcagataaagcatgacaaacatttttgggctcaaaagaggcaacaaacgctgaattgacaagatcataagaccgatttctagttaccctttcacccaggcctctgatcatcgagtcaggcggatgtcggttctggatgtgtcggggagctgtcggtcctgatgtgccaccatcaatctcctcagctgctgaagatgatgtagttggtgcatctcctgaaggtgatgtagtcgaaggagaaccggtttcttgcactggtggtgtactgtctagaggtggaggaatggaatcatcgtcatcatcatctgaatcctcatccacaaagatgctttcatctagaacacctgaaatttctggtctagctcctgggctagcctcatcaaaagtgacttcacaagtctccacaattttgttagttgaaagaacataaactcgataagcccgagaatgagtagcatagcca

SEQ ID NO: 20218 - DNA, 8284 bp, Oryza sativa
  unsure (1)..(8284): unsure at all n locations
caatcacagctcacatgcaccaatgggctagcaagctcttcatgaacacatgcatgtcttgcccctgtgcatggcatccggccatgtgcacgcatgcacaacataagcaccactgtccatgcttgcatatgcacatgccagtgcatgtatacaagctcctcttccattctccattctgttcgcgaacccggcacttgcacttgaccttgcgaagtccgttgcgaagacctcctcacacggtgttcgtccaccgtgtgcaaccttatgtccaatcttgtcacccggcatccttgatcgctttggacctcaactcctccctgagtctagtcccgatccgccgttgaccaagatcgaccccgatcacctgcacacacatgaaccaaacaaccgttgtcttggcacagatgtcgcaatctgaccaatgttagtccacgcacacacttcttacacttccagtacttgtcaatttcccatcacaaaagaactataaccacacatggtttcacacgaagctacggtggctcctagcgttcaagggagaggatacaacactaagcatacactaccccgtctcagggctatcaagctcgtgcccaagtgtcgcccggtgccggagagcagcacgagcctctccaaccttgccctccaggaaccagccaagcttcccagacttgcaagtgcgacgaccacaagcaccatcaaacgcgatgcgctctattgcgttgaatactatggaggagcacaatggcggaacacgggaacagtacggtgagctcctacttcctcgaagtcgtcgctctgcccgattgtcaccttgccaacttcatctcggccatcgtttttccgttcatggctgcatcgattggctactctctcacgctaccgtcgggcccagtcttttggagcgcgtgtgtagctcagcgactaaatagtcatcggcttatgttctttctcttcatttatcccctccagctcactattcgagcctacatggaatcactatcaccagcgttcacctgaagcttgcttggtcatctctcccagacccatctattttctggtgcaggggtgggcggtggcacgctccggtgtcacccgttgccgctgggagtggatacctatcaatttttgatactgtgccatttccctccaccaatgttgcttcagcttcatgctgccggaagtagcaaagccattgctggggctgatatttcgggatttggtccctatgcagtttttagcgtgactacaactcaaatagtcacactatggttgttgatattacattcaaggattcttggagcactgttcaacagaaaaaaaaaacacggtatagctgatacaacaatggtattgtagctctcgatatatagacccttcatctgaaaaataaattgatatgatatgatgccgttactaacttgcggttctagttaggactgcatgttatctcaatccaattgtgaggtgtggcgtttaccagatccagcaaaggtaacgcctttccagtttcctcagcttgtttattgattgctgttcacttgatccggtcgataaagtgtctgctttacgcaatgccatgctacttttttttttccacgctgttagtcaatcaggcgttttttggtggtctacgcggtagtgttcgttgtctgttgtctgtagattctagtaaatccaaacagaaaagacaatcccctgcaatgcaaactaaaccaaagcttgaactgaacggtgtggttagattgttcgtcggcaagctagtgagcgcagctctacaccaatcgaatcgtgaaaatgattattcagaaacaaagattcatattgccgaactctagtaccgagtaccgacaaccagcatcaatatcacctctcctcctccttccataacgggtggtgttggtgtgccctgcacgtgaagagccgaacaagcttacacgcgagagaaccgctaatccgtggaaagggaagccaagaaaaacctaagaaaagaacgctcacatgcgcgccgggacggggcctacccccggcgggcggcgtgcaccgccatgtgaccgcgccatcggctggcccgcgtgtagcgtgctcccccccgcaagcaaaaaagccgcgcggcatccgattctgcacgttgctgtgctgcgatcgctcgtccgttgatggaatcagctaccatgaacgcacagatcacacagacgctaaacgccaatggcgcgcgggccacaccctggacagagcacggcgcgcagacttttgtgtggatttggaccatatgcagacacgtacatgcccagtctacatgaacagagggacccgttcttcgctacccgtagatggtttacaggccggcgtacgtgtctagctgcttatcttttctacggccattttgccgaatttgcaatggcagctgcttggctgttcgagaggtataattcctgaaagcggaaaagtactaatcctatttccactaccaaagtgcacggctaattgaacatcccatgtgacgcgagtttgggcgtttgacaagctaagctatagctagcaaaggcgcgtgcttccgttccgatcaaaagctgtcctggagcacaaacacgccatgatgggttttgccgtttcctgtgcaaccaaagctcccccaatgcacctcgtcggtggtccaaaaacactgatatgccgcggcagtgcgggcaccgtccacggccaaacacactaatccaacgccaaactccactatcaccggcgcgaggagaggcggagcgcatcggtgaaacagagcccacgaatgcgggaaacacacaccgggaaaaaaaagaaaggtggaggcgagacgcgcgcgagaccgacacacattctccgccgcgacgaccggcgcttcagcacgtgaacgcgcgctgcggttgctgtcaccttgagaaattgacaaaattttccacttcgattaatcaccaccgtagtagtagcagactagcagtacaaaaaaaaattattacagattgcgaccccgtaggtagtagaaacagagtgacactggctatgacacgtgtatactggtagtactcactattactagtaactgcacgcagcggccaaccactggatgcgtcgtcaccgttgcacaacgctggccgtagctgtaataacacggtaacagtaggcaggctgcagttaatgaaacgagacgcgagcgatggatgggatcgagcacggtcccggcccctctccgtcctgccggtttgtggcggaggaaccaattaacgtactcgtggccgtagcgatggacgatggaatctcgccgtactactccaaagaaaggtaaaaaagaaaaatgtaatcacctcatcaatcctcactagtggctaattactcactgtaatagtacggtagaattcgagttactgcgtgcgtgcgtgcgtgctagttgcggttgatgaaggcgacgagcgtggccatctcggcttgcgcctgcggcgtgctgagcttggtgaggaagtagacgtggccctcgccgggggtctcgtagagctcggcctgctcccggccagccgctgcttctgtagtcgtggcgtagtaggcgcgctgccatgggctcaagcgggcctgctccgacacggtgaccagcacgccggagcaaccgaagcgctgccacgacgacgccgggagcgcgagcgggttcgcgtacgggtggtcgatcgggtacttgccggcgcagatgaagctccaggtgcgcgccgccgactggaggtaggccgggtccatggcgtcggcgcccatcggactccgaccctggaagtacgggtcgagcagcgccacgcccttgatcctggccccgccgtcgaggccctcctcgccggcgcgcaatgcgaggttgtgcgcgatgtttccgccggcgctgtcaccggcgaggaagaggcgggacaggtcgccgtactgggagacccactggtccgtcccgggcgccgcgttcgccagcacccacttgagcgccgcccacgagtcgtcgtacgctgccgggagcgggtgctccggcgcgaggcggtagttcaccgacacggccaggacgcccgccttggccgcgagcgtgttgaggtaggcgtggtagatgggcgtgaacgccgactccgacgacgaacgcgccgccgtggaagtaaagcagaaccgggaccttggcggtggcgcggaagctggggaggtagagccgcgcgcggacatcgttggccggatcaatggcgacgtccctggacgacacgccggtgagcacgtncgtcgacgccgncaccacgtcggtgcccatgagccgcttcaccctgccgctcttgtactcgatcaagaacggggagaagtcgaacttgaccgggtccccacccaacggcggcacgcgcattccccgcctcgccgccggcgccccgctgccgccacgcgagcagaggaggaagaggaggatggggagcaagatccgcgaggccatcggggggaggagacacgcactgctgcgctgcagctggagagtggcagtggcagagtgtggagtgtgagagagtgaactggctcggctctccgctgcctgcgagtgtctcggagacgacgctgccacgggatgggtcgggttttatgtggagcggggcagccgacaaggctgggcgcaccgcaccattttccgggcgcggatcgtggtgggctttcgaccgctttaacggcgcggcccgggccttctctttcccgcgcgcgcgccaccgtgcatgcaccgcatgtgcctgcgtgcccgcgcggttcacacttcacactcgatcgcttcgcccccaaaaaagttcagagaccatctctgaaatggcgcgttttctgcacttaatttacacccgaaattcctctctttttgacgaactgtacagcagcgctttatttcatggttagtactactgttaatgctaaactatgcctggttgtcagaacctctgctgatcgatgagtttaaaagattcaggtttttctgaaactgtcagttcacacgtcttttactaatcgtttcggcgctgcaatgctacggtacaaacctacaacgacaagccgaccctgagccgctcgttgcttgaggcccatcgaccattcaatgcccttcgtacaattaggcaattagcacgctcgctttgtgttggttgtgtgcccgtcttcctactccacacaccggcgcttcgcctagatggtctcgcatggtaggactaggagagtatagggtgcccccatatcggcctgtctcagttgagtggggcggcacgtaccaattactgctcaattagtggcctgaattgaaagattcagcaccgtcacccaagagcacgtccctaactttgtcgcaaaagcaaggaactcgcagtgatgcccggagcttgcacaacctgtactcgtgaaagtttagggctcctttgaatcacacgaatgaaaaaacagagaaataggaaaaatataggattctaacaggaatgcaagtgtaaaacagaggattgcaaaacacaggaaaaacataggaatgactgtttgattgggccgcagaaaaaacacagaaattcgaggagagataaagattcaaagaattctttccatgaggttctacctcatgttaaactttctccaaaacttgcatgggaaaagacaattcatagaaattttataggattctatagaatccattccttaattcaaagggctatctctaaaatttctatgaatatcctttgaatcaaattggggggggggggggggttcagtagttgtgtgttctggcagtttcactgctgacaaactgtttgccactactccagctctctcccctttttgatcgtgcggtttatgcagcaatcaccattaccgatcccaaagatctcggttgatgataggctttcggtgccgaggatgatcatttgcctatttggtgcttcctttgtcatcgggttatactgccggcaggatctattaataaaccttaggtagcgccttctgtgccatcgatgctgtgctgtggcgccaccaaacccaataattccgaactgaaaccaacctgacatgacatgagtaatacagcagcaacatcgtgcagacacgtagtgatgcgatctgctgaaatggaaaaggagctcctatcatatgtacagtgctaccgcgttatgtgatcttgggaacgtactgattccgagcatggccgaatcaataaaccaatctgatgcactggttcattttattggttcgatctgtggtgatcatcatgtgggggcaatgctacaaggtgtgagctttactcctactatttcccggctgtaggttgcgttgctctcggtgtaaaactagctcccatctactaacagtccatcttgtactaaattccgagctgccgagctgtgcccgttcttaaataggatgacaatgatctttgacagcgatttcgagtcatcattctgaagatttggagctgctgaaatgacgagccgaaaaaaccgtttctctgctctttccgaagagaattttcctcacctgtgaatggagcagtcttgtaatggatctgaatgtgcatcagcctcactatcgtatcctgctgtacttcaaggtttggcggaaccgatgtgtcggatcgaccctgcacgggttctatcaccacgaagctgacctctcgacttttctttgcctgaaaagctgaaactgttttgcgatccataacgctaacatgatcactcatggtcccggatcactgcatgtaactatgtaagtatacacatgcatgtgtgcgtgttctaggtcgccggagctcggaaggaatgcgccatgaatgatgttgagcagatcggcgcactctgcatggtttgcctggcgaatgctgagcaaacgtgagcctgcttctgctccgtgccgttgtactcctatgcgatgtccattccgccctacgctgaattttcacagaatcactgtgctcctggtgagctcaggcttgtcagtgaaactgtaccggtcgtagcccaaaggacatgccaaacaatctgcaggagtagtaattatggggtgtttagattcaggtgtaaagttttagtgtattacatcgggtattatatagggtgtcgcatgtgatgttcggacattaataaaagaactaattacaacatatgtcagtaaaccacgagacgaatttattaagcctaataaatccgccattagtacatgtttactgtagcacaatattgtcaaatcatagagcaattaggcttaaaacgttcatctcgcaaaatagtcacaatctgtacaattagttattttttagtctatatttaatacttcatacagatgttcaaacgtttgatgtgatatggtgtaaaattttaggatgaaatcaaaacagaccctcaaccatagtaccatactccctccgtccaaaaaaaaagtgaatctaggactagatatgatatattctaatataacgaatctgaacatacatctatctagattcgttgtactaggatgtgtcatatccggtgctagttggtatttatgggacggtgggattacacagctggtgaattgcactgcacatgactcagatggtgtttggaaaggagggactaaagtttagttcctctcacaaaaattttagtccctaccataaggacttgtacttttgtgcgagggactaaatttagtccctagttcccaaaaaccacctcaagtatgggcgtatggcgtcctgaacagaactgtttattactcccctccatcatcgacagtaacaaactgtactacttctagactctagagttgcatggagtgccacacagcggtgctgaactgctgcctggtcactgccatatcctgcatccaattcgcctgtcagagcatcagtctgttgcgaagctgtactgaacttccgtgcacgctggtttaaaaaaaaaaaaacttccgtgcacgcacaggttcggagcgcacttggcatgtcacatggtggcaactttgcttcgctagcttaagcaccgcattcacgaaccacgatctccatccagatgaatgaatttcgacgaaacggtgccccgttgcactgttctttacagaatgttgatgggggtgtgcgtgtgtgtgtgagagaaaaagagaattgatttccagtctgtttgtacctcgtgaaagttcagttcggagtcctttccagctaatatgttctcgcgaacctctttttttgcgagcaatgcgagcaaatgcatttgttgagcacaggcgtgactcccgtaactgtgatgagcgatgcatgactgtgctc

SEQ ID NO: 20219 - DNA, 1129 bp, Oryza sativa
cactcaggacactgtaggacgatggcagtagattgcgtttgaaacacgcagacttgggcgaaaaatgtttccgtgaatactactggtactgggaggctgggagcatcgctaactgtaccaaacgtgcgcaccaaccaacctaaaaccgatcggacgacacgcgcgcaccacacagtaccaccacgcccatgtgcggcgttcaatgcggtccggaaggcggaggccgacgaagaccgagacatcagcggcggagcggcgtcgtcttgtacgtggctgcatctgcgtgtacgtggccgcgcgcacgcacgagtccccagcgcgtgattgttggcgacctccgctcccggttcccggccgcgcgaagcgaacgcacgagccaaagtagtaggagtaaactggagtagtagtagcagatgccgcaaaacacggtggaaaccgtggaatcacgcggcaatcatcgcgaaaactgtggcagtgaccacaccccgcaatgataacgtaacgccgaccaccgctccgcgaggttaacgccggaaaatcacgcgcatcaatggatgcgcgactcgcctcttttcccctgcaaccggggctgctccggcggttgggaacggcgagtgattcgatcgagctcctttccggcgatgattagatcggctttatttcctgcatggttgttgcatggccaggaggagcccacgatgtacagggcaccaactctgggcccacaccattttgtgtcccgtgccctccgggaagagagagaggaccaaaggaggagaggcatccacaccaccgagctcgtcggaaagagagaaagaggactggaccggcgccggcgatggcaatgcagccacctcggaggaagactgggccggcaccgacgatgacgacgcagccactgcggataaggatcggaaggggtgaagaagaggggagggggagaggggagctcgaggtcgatccgcgccgtcgcttgggccacaccgctgccaccgtcgttgggggtggaggagagggcgccgccgctactccgctcgacagccgccgtagcgaggaggaggagaggagtggtggtcgccgcggagcttgtccgcgcgttggccaggaggggcgcccgtcaaaggaggag

SEQ ID NO: 20220 - DNA, 10939 bp, Oryza sativa
ccaccgtcctggtgttagtcaattaaaatataccatctagtgggctgtgggtgcatggttgtgatggtcgcgcccatggcacttgaggaccggttcgcgggaaaccctagaacaattcctcgtacttaccacaagctagcgtgggcaacggctgggcttgtagtgtagctttcctctagttgacgcatccaggcaagggtgggcgtgatggtgcggggcgggccctgcgacagcctctgtcgctttcggattcaccgaggcacgagaggggactgtccgttgcccgctagggacgggggtgaaacctgaggtgtggtgtgcttggctagagggggttatgtgaagggtcctgtcacggcctctttccggtatgtcgtggtggcatgtcggcgcacggaaacgtgtcgtgggattgtgtcttgtgggtatagttgtacacctctgattagagtaaaataaataccctttgccgcggattgatgatctgtttgatcagctgaaaggagctagggtgttttccaaaatagatctgcgatcaggctaccaccagttgaggattcgggtagaggatattcccaagacaaccttcaccactcggtatgggttgtatgagtgcacggttatgtcttttggacttaccaacgcacctgcattcttcatgaacctgatgaacaaagtgttcatggaatttctggataagtttgttgtggtattcattaacgatatacttatctattcaaagtctgaagaagaacatgagcaacatctccgtctggtacttgagaagttgaaggagcaccagttatatgccaagttcagtaagtgcgacttctggttgtcggaagtcaaatttctgggtcacgtcattactgctcaaggcatggtagtggatccatcgaatgtggagtcagttaccaagtggaccccacctaagacagtgtcacagattcggagtttccttgaacttgcgggttattaccgtcggttcattgaaaatttcttcaggattgccagacctatgactcagttgcttaagaaagacgagaaattcaagtggacagctgagtgtgacaagagttttgaggagctcaagtagaaattaatatctgctccagttctgattctgcccgatcagacgaaagacttccaagtctattgcgacgcgtcctgtcacgggcttggatgtgttttaatgcaagagggtagagtggtcgcttatgcctcgcggcagttgcgtccacatgaagaaaactatccaacacatgacctggaattggcatcggtggttcacgccttgaaaatctagaggcattacctgattggcaaccgctgtgaagtgtatacggatcacaagagtttgaaatatatcttcacccaacctgacctgaatctccgacagcgaagatggttggagttaatcaaagattatgacatgagcattcactaccatccgggcaaagccaatgtggtggcagatgcattaagcaagaagagctattgcaatgctttgtgcaccgaacgcatgtgtaaggaattgcagcaggagcttgaacatctcaacttgggaatcgtagaacacgggttcgtggctgctctagaggcacggcctacgctcgtggatcaagtcagagcagctcaaataaatgatcctgagatagctgaactgaaaaagaatatgagggtcgaaaaagcccaggatttccttgaggatgaacatggcacaatctggatgggagaaagattctgcgtacctgctgacaaagagctgaaagatctgatactcaccaaggctcatcagactcagtactccattcatccaggcagtaccaagatgtaccaagatctcaaagaaaaattttggtgggccagcatgagaagggaaatagttgaattcgtcgcactctgcgatgtttgtgagcgagtcaaaacagaacaccagaggcccgcaggattgttaaacctctccagatgccggaatggaagtgggaagagattggaatggatttcataacaggtctgcccaggacatcatctggccacgattcaatctgggtagtcgtggatcgactcactaaagttgcccatttcatcccagtgcataccacgtatacgggaaagaaattggcagagctgtacttagcaaggatcatgtgtctgcatggggtacccaagaagattgtatctgatcgagggagtcagttcacctcaaaatattggcagaaactgcaggaagaattggggacccgtttgaatttcagcacagcctaccacccgcagactgatggccagaccgagagggtcaatcagatcttggaggatatgttgcgagcctatgcgcttgattttggcagagcttgggataaaagtctgccttatgctgaattctcttaccacaacagctatcaggccagtctacaaatggcaccgttcgaagcgttgtatggccagaagtgccgcacacctctcttctgggatcaaacaggtgaacgtcaattgttcggaacagaagtgctaacagaagcagaggagaaagtcagaaccgtcagagaggctaagaattgcacaacctcgacaaaagagctacgcaaacaaccgccgaagagagctcacttttgaagcaggggattatgtgtacctccgtgtcactccgctccggggagtacaccatttacagacgaaaggcaagttggcactacgcttcgtgggaccatacaaaatcttggaacgacgaggaaaagttgcctatcagctagaacttccatccaacatgatcggcatccatgacgtgttccatgtgtcccagttaaagaaatgcttgagggtacccgaagaacaagccgattcggagcacattgacatccaagaagatctgacttatgtggagaagccagttcgcatcattgagaccagtgaaaggtggactagaaacaaggtcaccaggttctgcagggttcagtggagccaccactcagaggaagaagcaacctgggaaagggaagatgagttgaaggccgcccatccgcacctcttcgccagctcttccgaatctcggggtcgagatttcgtttatgggcggtaggtttgtcacaccctgaagttctttccccaagcctaaattggatttataaatcaccgagagaaaatatcggtgtaaaagcaagagagaaaccctaataaattaatgcaaataataatcggaattggcatgtggaatttttcttgagttctacatgttgaaatatgctaacaagatttttggaggaattttcagagctctagaaaaaattttaaccaattaaaaacgagcacaagcaatatttaatccctggaaattcatttcccttttcttttttcctttttccctcctttttcccaatgggccgctatcacgtcctaataaattcatcccaaaataaaaatcattctctaaaaggagtaatagaattaattaaaattcgaaaagaaattggcaagcactaaaatacgtataagaaaaatttgaatgtggtccggagaatttttgttaaattctccttggtctaaaaggagccctcaaattttacttgaattttcagagcaacggaattatttattaagcaacaacaacctttatcaaagtttattaaaaagaaaactaaaaataaatcctccttcctcctttgggccaagtctggcccaaagcttccctctctctctcggcccacggccaaagtccttccctcctccctctctttttccttccctctctctctcttgggccgccctccctctttcccctcggcccagctccctcctcctccctctccctcccgagctgcctctccctcctcacctcctgggccgcctccaggcccaagccgagcggcgccctctcgcccgtgctgcgcacgtgcgtgcgctgacgacacacgccccgcgtgggtcccacccccggttgtctccttcctcccgcacggcctcttctctctcccgtgcaaaccctagttcgttcctccctcgaatccgcgcgatttaagcgttggattccaaaattaattagggggttttaatccccattccttcctcttcaattgcctctaattttctccttgaatagcgccttcaatcgccgggaacggacgcgccaaccccggccaccttccatggccgccggccggcttttccgccgccgttccccgctcctcccgtggccggctccttccctttgcctataaaatggaatccccatcctccgatctatcgttttagccccctcccgcgttctcccgtggcctcaccacctctccccgcctcctccctctctctcccgtgccgccggccgacctccagccgcccctgccgccgcctcagcacgccggccggccgtgccgtcgccttccccagcgtcgcagctgcctcctcttccccggcgccgcctccgattcatggggaaattgccggagacgcggccccgccggcttcaagtggctttgcctccactgtaccatctccagccatccctgccgcctcgcctgagcgccggccgacgtcgttgccacctctgtcggtgctgctgcgccatcctcttctccggcccggctgtggcgtcgcccgaagttcgccggaacgccgccgccgcgccaactgcctattcctcctcgtcggctcgtcgccccgctgcaccaccaccttcaccaacatcgcagcgttgtgttccacctccgcgcagccgctgctggctgccatcgtcatttcctcgtcaccgttcgtcctcgccgatcgacgtcccatcggtcgcccggctcgtcgtctcgctgcaccgccaccgtcgtcggcatcgcagcggcgtgttccacgtcatccttgcctctgtgcagctgctgccggctgccatcgtcatctcctcgccagccccggtcgtcatcgtcgtctcgttgttcccggtcgtcgtggcgttcgtccctccgtcaagccgttctcatccgtcgtccgcgtccgtcaagtgtgccgctgcaaccccatcgtcgtctttgtcctcgcctccgcgtcatcaagctctgcgccagccacgtcttgccttcgtccaaggatcgccgccgaagtcgccccctcgccgttcgtctccgccattcccgtccatctccgccgcgcccgttcgccgtcgtcgttcccacgcctcgtcgcttggtggtaagggtccgtcctctcgctgccccgtctagtcctttcagtgtcacccgtgcccgttgtgcggctgtcgaccccggtacccgtgtactggtgtcggtagttgttcgcttgtgcgtgtggtgaccgtgttagtgtgcacgctcggtagccacgtggtttccacgtgtgcagcccgcgtggtgtctagtggagtccgtttgtcggccactcgcctcggttggcacacggggtccgcttccatcgacccgtggaccgtctctgtgtactcggtctaccgtggtcccttaggttgacatgtgggatccacatgtcaacggcgcagccttcctgtctttttgtcacgaccggaattgacccaacgggcgttccttacgtgcgtgtattattccttgtcccaggaggcaaggtacaccaaaagttgatacatttcagagtttatcaagcggaagcgtaaatagttaatttattacataggcagcgaaggcccagcacacacaaagacaaacgagaaacaacggaagactagggcgacgaccacaggcgcttgacggcaggcacgagctagacaccaaagccttcatcttccagggactcctcttctgggtttggaaaaattgagcaagactgagtacaaccaccgtactcaacaagacacacccacaagtgcaggataaatgtaaaggagtagaagggggttatgatataaagggttagggtttgcagtaaacagcattaaaagacacttagttgctcaaagctattttgtaaacacgtttctagagctatacaatattattaatcaaggcggtgaacccacacgagcctgccttaacccaaggcctctgatgattcagaccgaactggtaacccgaccctgggtaccagctcgtcccaagccaagccaggccaaccattccacattttagttgttaagcaggttttaagaattaaaacactaacttgggtacattgctcggcttgcccataaccgagggcgcggctattcgaatagattatactctgatcagaggtgtacatctttacccacaagacacatcttcctcacgtgtagccacgtgccacataccaccacggtatacggacggaagacgtgacatagtttccaacccatcctagccatagacaagagtaccgacccaaccccacctacggccggaacccccgggacaggtaggcaggactgagcccctagcagcaggacaccggccctgtgccatgacatctcgactaccgggccgcagctcgtgtagccttcatttgtcctagagatgtccatcgacccccgacttcgtccatctccatccgtgtacttttgtttataaccagactgagccacaaactaagccttacccactagacatgtggaagtacggtagtgctttgcaatagaggcccgaagaccggtccatatatggccgaggtgctactatcaaaaccatgcaccccgagcccagcctaaaaccattttggggattttgaatagagggggcggtgtgaatccaattccacaataatcaaaccattccatagtgtccaggtgatgagaaaatcccacagtctagagttgtaaaaccacctaatgttgcctaattaaccagcgaagcatctacctaaaatcatactagtggtaccatgagtagagtgtccactagttggggttttgtttattctagggtgaacaaggaaataataacaataacaataataaggtcataacaaaggtaaataggcatggctagataaaacagtgataacgcgggaatttaaatgaagcgataatgcaataatttaaatcaaaataattttataaactgggattcaatatgttcaaggatgatgtgacttgccttgctcgctttcccaaacgtcggcttcaacctccacgaagagcggatattccgaagctgcagcgtctacacgaccaacggaaaagaaaatgcttttactctaataaactccacataacaagctgaaacaaaaaacaaaaatgggttcttgacttcttaaggaaaaattagagacttgaacggtccaattccgagttccaatggccaagttatggccatttgaagtttatatgctctttaaatgaatatttgcgaatttcttcatttaaattttaaataaaaaaaggtttattgcgtcagccgaggggaggggcgcgcggaccgggtccacgggagtggggcccacgcggcagccccacggtcgacgatggaccgggcgcacccgggctcacaccggccggcgccgtgggtcccacgcgtcagccgcacccgagggcgtgggcggctgacgtccgggccccacgcggcagccgctcggtgcgcccgaagacggccacgccggcgcagcggcgggaggcggcgcgtgtcacatcctgatttttgtttcaggatttataaattatttaataaattattattagaatttatattaaatgttcattaatttacaagtgaagttaaatgtgggaaataaaatttcctaaatataaagcatggttggatttaatttttattaaattctccatggttaattatactctctggaatattctcggatttttcggagctcaattcctaatttttaatcatacaaagagcatttcagtaattacccacatattaaattaatcattaaatggtctaattgtaatttttttaagtactttgagtgtccaagtattttcaggatttttcttgaaattatttgagcattggaagtatttttaataattcaaagatcatttaagtgattattttaattgggaaagtaataaaatcctcctcctcagcttgggccattttcggcccattccttcctttccttcctctctcttccgccggcccaacctgagccgcctcctctcctctcagcccagccggaaaagtctacttgtcctccctgcgctactgttcatcttccaactcaggcagagcccgagccagccgtgccgtgcacagtgccgccgcctcttccttccaaatctcgcctccccgttgctccttttttccaattttgttgaggggaaatattcctcttatcctcctctatctttaccccaaaaatcggagctaatcgttgagtatcttatccgaatcgaactcgttttcgagtttatctccaaaaccgagtttttgattttccggatcgatttcttgcgggaggagtccgatctcttcaatccaaggctataaataggaccccctagtcctcctctttcgtttgccccctctcccgtgatctcccgtgcctcgtagcgccgccgccacgtgctccaccccgccgtcgtcgccggccgagctccatccgcgtcgtgccgccgcctccgtcgtcgccgcgggtcgccgtcaccgccgtaaggtgcgcgggagggtggagaagcccggccgcctgacccccgaagccgctgatcaccggagccccgtcgccgccgtcgaccgaagccgcgccgccgctagacctagtcgccggccgtcttcgttcgtcgtttggttcgagggtgagtaccgttgggttcgtctcgtcgtcctctacgtgtacatgtcctccaaagtcgcagccgaccatccaatctccggcgaggtcgccatcttggtccggccattgatgaggtcatcatgacgtcatcatcgtttttcttttttctgtttttctaatagattaaatcttcggaaattcataactaaatcatcgtaactcggttttgagtggttcaagttgctaaattcatctaaaatcatctacatgtttgtttactttatatgtactgtttatttggtttttattagtctttttcttcgttttgcgtgttagcttgtcgtttccgtcgttgcgaaggttcgtgattgcgccggaagtattcaagaagattaattgaagaccgattattgcaaggcaagtcacacagatcctaaacacaatcctttgagcatgttgatcctatatttaaattctctatttatttcaactgtgtatttattttcgaatgtcaccgggtggtgtgaacttattcctttgttatggccaatttgcattgattactttattccttgataccttgggttattataacttgactagttgggctttatatattggttcagctagatattagttatgattgcttagccatgcttagaaacattagcacactattgggataacttatgactcactattatttaaggatggcttaatgatagttcacgatggttaatcgtgattggttaattaattacttgccaactaaaacttgatagtggtgggttgtgagcacatggttttgagagtcgtgctcatgacaattaaggaccggttcgcgagctactattgtgaaacattaatcgtgccaaccacaagccagcgtgggcaacggctttacctttcgtatagcatggttcattgcagagcacaagactgagaagtggcggagataagcccacgggggtcgctggggagtccatgcctctggttattgagggggtgattatgatccaggaaaggtgcgctgtagtggattgtgttgtgcaaggggtattgtcacagcccctttccgaggtaccgtggtggtactgaggcacatggtgacatgatgtggggctgtgtcttgtgggtacagtggtacacctctggccagagtaaaactattcgaatagccgtgcccgcggttatgggcgggttgagcaatgtttttcgtgattagtctcacacctctcacaataattatggatgttatacctggtaataatttgcttagctcctggtttagagttagatctgtacagccgggtatggttgttcaggatggttgggcctgtgcagcatgggtgtgctgttcagtgttgattaaaatttttaattaattactctactgttttactactcttaactctttgctaaatgctgcttttgcaaatgagcctatattatgccatcctttggtatccttgtgcacttgcatatttgctgtgtggcttgttgagtatgtcatatgctcaccttgcaataatcaatcaacctcagttgaagaaaaaggatccagaaggagaagacgtttggcttataccccagttgagctgcctgtgggagtggagccggagcttcgctagaccgtaattccgctgcagttttcttttcttttgtaagtatgtaacgctattattgatgattatgtatattaaattgtcagtttgtgtacctcggctgattcctggatgagggttctatgcacaaattagttcggaaattactagtgaatttctgggcgtgccctaggcacggcggagcggcggccgagagaggggagggaaagggggaaacgaagcggcggtccacggctcaccccgggtcgacggcgacgacggaaacggcgaccggagcggaggaaggtggcggcgtggctcgggtggacggggtcgacggtgctccggcggtcggcgaccgaaacggagaggtggacgaggtcggcgaggatgcggcgaagccgaaggaggcggcgccgaggtgggaggtggtccggggcgacgacagcggcggaccggagctcggcggcgacggcggagagagagcgacggcgcgagctcgattccggcggggagagagggcggtgagtggcggaaacagtggtggggagctcggggagggtttatatagggttgggagtaagagagggcggccgaggaggggggaatgggcgcgggagacccggccgccattaatggcgccggcgaggttaggggagagg

SEQ ID NO: 20221 - DNA, 4756 bp, Oryza sativa
atggcccgcggggagaggagagggagggggaaggagatgggccgagccggcctaagagggagagggagggaaaagggactttttagagcttttctttttataaaaccattttaactttgtttatttcttaataattattatttgtgctctgaaaattccactaaaatttatttacgcattttagacttttaggaaatatacaaaaatcctccaagccttatttgacttttaactttgcacattttaattgttggaggctttcacacggattttaattattctaggcataatttagaggatgtattttagagtcgttttgggacgtgacacttttccaggctagcgcttacacatgttttatagttgcaaaacctaactataataatccgcaaatctccatataacagcattaaacttcggatgaccatgtcttggtcatacgagctctgaatcgagccgttcaagtctcttaatgtttgttataacttaaagaaccatgtgctttgttttaatgtgttgttattgcttctttataggcttgtagttttgcttgtgtgcttcgcgtagctttcgtcgttccggaggttcccgaagtgtggttcatggtcgtcgccgaaggttcggaaggccgttctctctgagcaaggcaagtcacatcatccttgagcatattgaatcccagtttataaaattattttgatttaaattaatgcattatcgctttatttgaattcccgcgttaccactgttttatttagcattacctattaatccttgttatagccttattattgcaattgttattatcaccttgcttaccctaggcaaataaaaccccaactagtgggtactcgattaatggttccactagtatgaatttaggtacatgcttcgctgattaattaggcaacattaggtggttttataacttagactttgggaatactcatatcacgtggacactatggaatggttggcttatggtggaattggacatacccctctcttcctctttcaaaacccctaaaacctgttttccggtggggtttgggtgcatgccagttgtgggaagtagcaccccggccaatataaggattaagctcgggcctctgttgcaaagcactaccgtactaaccacatgtctaatgggtaaggcttaactcggtgctcagtctagtcctgaacaaaaggacacggatagagatggatgaagtcgttgcgacgatggatatctctgaggcaaatgaaggctacgcgagctgcggctcggtaatcgagatgtctaggcaaatgaaggctacacgggtcggtgcccattagtcgagatgccatggcactggactagtacacgggtggtctcacccctatgcgtgtggcgcacccagtctagatcctgttgctaggggctcaatcctggcctgcctgtcccgggataccgaccgtaggcagggttgggtcggtgcttttgttcacggctaggatgggtaaaagggttatgtcacgttttttatgatgggttccaattgcaatggaatgcagagtaaaggcgtgtcttgtgggtaaagatgtacacctctgatcagagtataatctattcgaatagccgtgccctcggatatgggcaagcctagcaatgtacccaagttagtggtttaattcttaaaatttgcttaacaactaaaatatggaatggttggcctgggttggcttgggacgagctgggacccaggtcgggttgccagttcggtctgaatcatcgtaggccttgggttaaggcaggttcgtgtgggtccacagccttgattaataatattgtgtagctctaggatcgtgtttacaaaatagctttgggcaactaaatgacttttaaatgctgtttactacaaaacttaacccctatattattaccccttgtacccccttgcattaatcatgcatctgccggtgtggcttgctgagtactgtggttgtactcattcgtgctctatctttccccccttcagtaagaaaagcttgaagaagaagtcctaggtggagtcctggcttatacctcagttgagcgcctgtgaagatgaagccgtaggcccactagtccgctgctgtttatttttgattgtcaggccttaagtgcctttgtaataatgtaaatattatcgatataataaagatgtgccttttgtatcatgtttgtgtggtgtaccccggcttttcctgggacggggattaatacactagcgttcgggaaaagttaattttcccggtcgcgacagccgccagcccattttcctctccctccccgctgggccggctgaaggccacggcccagctggccgcccgagcccccctcctctctcccggggtcgccgataggtagggcccaccagtcgggtcctcccccaaccaccaaccactgccgcgcatcccgcaaccgccgccgccccctcgctcctgtgcctcccgggccacgttgcccacgtcgtcgcccgtgccagcgccgaaacggccgggattcaattttgaatcccaccggccacgcccactcaccccctccccactactccggtgaaatcaggccgctcccggccacgtccgagccccctttgccctatttaagcatccccgctctcccctctctctttttctgcatttcgccgagctctctcgtgccctctatcgccctagcgccgtcaccctcctctccgccgccgctgccaccgctccggtagccgctagccgccgctagctgccgcgccgagccgcaccgtcgccgtcgtcgggttcgcaaacccgagggccacgccgtcctcctctccgccaccgctttccgccacgggaaccccgttcgcaccacgcgccggtgagctccgccttcggccggcgtcctcaccctcttccatcttcctctctctctctctaacccctttcttcgtgttcgctaggtggttccggagctcgtcccgctgccgtcatcgccctcagtcgctcgccgtcgcctatcgccgtcggtgaaccacctcctcccctttctccctctctcccgcaccgcttggccgccacgccgccgcctagccgcttagccgccgctgtcgctgtccacgtcgccgcgtcgccaccgcccaccgccaccggccggtcgccgccttgcaccgccgctgcgtagagccgtgctgccgtgcgccatggccgccgggccggcttgagccacccgtgcgcgccggccacgcgctcccaccgccgtccgatctacccaaccccgccgcacgcgtggctgccacatggccgccacgtgtgcgccgcgtcggcgccacgtgtgcaccacgtggtgcgccgctccttccccggtccgtggacccggtccaccgcggacccccccgagtcactgccatgtggggcccgcatgttggcgctgccctctctctccccgggattttaattattgcgcaataaatcaattaaggatttttctgtttatagtaaaaacacagtgaatcttctaaaattcaattctaattcatccgagctccgtttgagcctattcaagtctcagtaaatcaagaaaaatgcattgaatccattaaaaatggttttgttctctgtttcagtagtcttatagcctgtttgtattatttgctttgtatgtcgcttagattccggctctcccgacgctccgttgtactttgaaatagtcaccgaggttcctccagcagcagagcaaggcaagtcatgcttgtcacttgaacatgttgatcctatattgcaaatgctctaccgttttcccttaaatactgcattgttttataatgatactatgggatgtttacctactgttacagccatgctacttttgtaccatgctcctttgttagcttgggatataacatgactagagattggactagggattgcttagccatgcttagttcaactagcacaccgtgggggaaatcacattaatgcatagtcttcacgttctagtgttggttttggattaaagccaccgtcctggtgttagtcaattaaaatataccatatggtgggctgtgggtgcatggttttgatggtcgcgcccatggcacttaaggaccggttcgcgggaaaccctagaagaattcctcgtacttaccacaagccagcatgggcaacggctgggcttgtagtgtagctttcctctagttgacgcatccaggcaagggtgggcgtgatggagcggggcgggccctacgacggcctctgtcgcttctggattcacctaggacgagaggggactgcccgttgcccgctggggatgggggtgaaacctgaggtgtggtgtgtttggctagagggggttatgtgaagggtcctgtcacggcctctttccggtatgttgtggtggcatgtcggcgcacggaaacgtgtcgtgggactgtgtcttgtgggtatagttgtacacctctgatcagagtaaaactattcgaatagctgtgcccgcagttatgggcggtcaaccagattcaccgtgattagtctcaccctagtctagtctaatggaattgattagttcaggtggatggttgggcctgtcgcagcgtggtgtagcgttggacagtggatggttaatattgagtaattattacaactgttttacagctttcaactaccgtctttaaaatgctcgctttatgctaatgaagcgctcgagctattctttgattataccctacatcataccctctattccggtatgccttgctgagtacggtggttgtacacagtc

SEQ ID NO: 20222 - DNA, 12688 bp, Oryza sativa
gaccatttttactgctgtattccctctttagtcccggttggtaactccaaccgggactaaagatagcgatctttaatcccggattcgtagtcccggttggacaaccgagactaaagggggttatgaaccgggactaaaaagcacttctccaccagtgtatatcaaacaacaaaactatgaaaactcaaatatttatattgactacacgtgatacttgattctatgtttggtgaatgaaggaatacaattcgtactaaaccaatatattatataatagttcataagatagaatatactctcctagaattcacgcaacaaaagaagactaattcaaatgacggaaatcaacttttgtttatggcactctagcatttataagtgctctgcacatagttattatattatacagttgcaatattattacatattaaattcatcttcaaataaaataagaaagatgatgaaaaaaagaaatttaaatccaagatatgctaactagctagccacacagttatgtggatctttatttacttacgtactttatatgtaaaaggaagtccatacaacgactttgaattagatggggaaaaaaacaaattgtgggaatattttagagagagaaaaaaaggcaattttgattttgtatatgtggcgtgggcgtgaaaaagacagtgcaaactaatatgaatggttttagagaatagtgattaaaagtgagaacatctaaacattcatgtagaacattcatgtagaaaataacagcattaattacatctgtacttcaatgtaaatttgttagaccaactttttaagtcttaacagtaagaagaacgtccaaccacgtaattgtgcgggctatctttctagtttgtcatgttgtcatgtaatggaacatattttttttattagtccataaggatacttcaatagtatgtgtttacgtattcttttttataaatactaatttataattaagtaacgtgtgaatttgggaaggagtatagtgacagcgtgagtcaaacttactgtatatttattagtccttgaatcgatataatgtcaacgatcaaatatggagtacacggtgagagcgtataggccgggctgctaacataccttttagggtacggcataggcggtacataggccgtgttcagttcctccttcaatttttttttttacatatataaatgtacatttgaagtattaaacatatactaataacaaaacaaattatatatttcgtctgtaaaccacgagataaatttattaagcctaattaattcgtcattagcaaatgtttatcgtagcaccacgttgttaaatcatggcataattaggctcaaaagatccgtctcgcaatttacatgcaaactgtgcaattaatttttttatccatatttaatgccccatgcatttgatgtgacggaatttttggaagtttgaaggtaactaaacacaaccatattcgtccaagtgattgggatagctgattgacatgtttctagaaatacattgtcacataccaggggtgtgtttagatcccaaaattttttagccaaaaatgtcacatcaaatgttttgacacatgcatagagcattaaatgtgaacgaaaaaaacaattgcacagtttgcatgtaaattgagagacgaaacttttgagcctaattgcgccatgatttgacaatgtgatgctatagtaaacatttgctaatggcggattaagtaggcttaatgaattcgtctcgtagtttacaggcggaatctataatttgttttgttattagtctacgtttaatacttcaaatgtgtatccgtatacttaaaaataattttggccaaagaacaaaacacggccttggagtagaaccatgttcaaacatcctaatgagagatgaaattatcatgatatggataccacatacttaataatagtaggttactaagctcggcagggcccaccacataccatgtcttacacggaaacaaacctcgtatatagaaggagttccgaataaggaaggacaagaagagttctacatggaaacgacaaggattacttggattatatccatattgatctccctaattctacttggacaagggggcatctatgggtataaatacaagcctccctaggaagagagggaacaagccacaagacgcaacatatacacaagccaacacacatcgcccgatctcgacatcagagattagactaaacatactccatccggtacctacggaggccggcaagagggatctagctctatctctgatctcgacaagttcacgctagaggaggaagactaccctgtcgtcgactactagttggttatccatgccgccaagtccacgacaactagataggttatcccaattattgtacttgtgtgatcaagatgaataaagagcaacaccggcttcggccaacaggatgtagggctattacctgtcagataaggggcccgaacctatataaaaatctctgtctccatctcttttacctcaatctcgcatataccctggtaccaacgatccccataccatccaaataccgtagtcgtgatctcaaacgtcgacaatggcaccagtggcggacgcaggattaaaataaagatgggacgaagatgctcgtctcaataagaacaactaaacgcaaaaaataccatatttatgttgtaatcatataaacatatagtataatcaataaattaaggcaaacaaaaaacaaaaatgatattaaaataaagtaataatttttgcgccatacataattcatcatacataaaaagatactagtaaacatatcaatttgcaaatatgagtcaattcataagccatggttgatagatatcttttaaaaaataaatatatgagaagatatcgcatgcccagaataagatgattattattttgcttagaagggagagagagagagaaaaacattaggcacctaactatagtaggggacgggggtaagcagtgtcaaggaattgactcaggaaagcatcacatacgcatgattaaaattacacttgggcagcttatttatgggacagttgtgaatcggatgtggtggtagctggcccaagaaggatatggagggttggggcagagcgggccatatgatgaggatataactacctcggatataaccatgactaccttatgtattagtcaaccaaatgtgcatatgttctacattagatttacttgttatatatttgaacaaatgttactacacaatgatcaacttcaaacggacctaggcgctgatctagaaggaattttggggcccatgagtacttgttggaaagcttatggagtctactttcggatggttttggtcccatgtcaaaactcctaacgagctgccgggaatctgcaaaacaagccacgtacctcatccagtccgaatctaattttgagttttgggctctgtaattgtgtcgtgcgttagcccaatggggtgtgtgccctacgaaaaccctaggacgtccctaatcacatttattcagtagccgtcatcgtttaaagtcgggtttatcttagattattctgttgagaacagtttcgccgctagatcggtttgtggaaccccaaattcgagtgctaaatcaatctatcttgttcttgcttgtgttcttcgattcgcatgcagggattagccttctcggcgaggtcaactagatttcggcacggttgataaccagaggagacgtggtgctgcgattgcggggctcagtagcgtgttcattcagaagccggatcgagttgtgtcgcgactctgcccaaatcgactgtttatcagtacctattggaagatcgggacctaacatccctcatcagttggtatcagagcgtggatgcccgttaggtaatttatctttccataaccagaaaattgccacacaaaaatatttatactttacctagataatttgagccgttgcattgttctattagattttgctttgttgaattctagattgcatcgttatgtcaagtgttagtttagttttacatttcatttttagttttgagtattgcatctgttcatcacttaggtctagggttcatcactcaagtctgtgagttgtacgtcagttttgggtctagtttttcatctcgtcagttgttgccaggaccttgaaaaattgaatcgtctcgtcgtcgggtttccgtttttgtgatttggagaaatttttatcaaacggttttgaagatgcttgcgtgtactgtgcgcgtgaggagagactccggagttgccgtactgtgcgcatgaggggagtactgtgtgcgcgtgaggagagactccggattagatcagatctatccatgactgtctgtattttcctctttatagaattgttaagtagtggatttgagatatttttataaaaacggaacctacatgatatgagcaatctatttttgaggtgatccaattttagttttgcactttgcatttgagtccctgtaatattcatatttatatttgagtccatgttcgaggtcagtggttagttcttgttaaaaaaatatagtacaaaaactaaagaaagaaagaaaaggcacaaaggtgcaaagaaaaaaaaagaaaaagccgcacctaaaaaaaaggcagaaaggtgcttgaaaaaaggcgcaccaaaaaagaaaaaaaagatgagaaaatttagtgattcttttgagttgtatccagagtgcagagttgtggtttgagctgcttctagtccttagtattgtcgggtgcttgcttgagctattgttgagtttaggttaggccagcacattgactagaactttgaactattattcaactttgcattttcggattagcacaattgcgttcctttgctactatatattacacctcccaagctacacatatatacttctggttagcaccgctttgatccttgcaatcgccatatcacgtccttcaaggtgtcacgaaccagccaccggttgtaccgtccttagcattactggtaagacacttatacgagcttgatatggtgctccatttggctgagttgttgtgaggcaccactacaccgcgtagcagattattagggataaccttcactctttgctgttgtttttgtgtttgcaataacaggtatgagtggcgctcaaaatcagcgataccaacaaggtgcacgtgatgaaagtactttggtgcaacaagtgctaagttctcaaatggagaaagcggagcaatggtagtaccacgaattatttgaaacaaagtttgtggttaaggatagagcctgtcgtactataatcgataatgagagttgcaataactttgtgagctcagatttggttgagaaacttgagttgcctacacaaccgcatcctcatccatattacatcaaatggttaaactcttggggtaagttcaaggtaaatagaattgtgagactgaacttttcgattggaaattaccatgatactgccaattttgatcttgtccctatgaaagcatgttctttgttgtttggtcaaccatgggtatatgataataatggttcgcataattttgttgctaatacatacacatttagacataatgggcggaaaatgaaattggtacccatgagttttactgaaattttcgaagataatcttgaaaggatgaagaatggaatcgaggaaattttcaaaaatagtgctgaaaggacgaaaaatagaatcgatgagattttcagagataccaggaaagatactaatattgtgatgccttcaactaagtctgagttattacaaaatgaatgtattgttctgcctattgctttggatactaatattttgcacgcatctgagaacaaccaaggtaatgtggaagagaagaaagatgaagaggaagatgaggatgaagagtttaattttctatcttctttaaatacttggggctatattcaatttgatgatctttgttcactcaactgtttagagaaaaattatttgctagatttgaattgccatgcccttctaatgtgatttttcatgttattggcaattatgatagtaaaggagaatataatgtgcatcgagtatatatttgttcaaatttgaccatacctccttttcatgatgaaatgtattgtctagaggaccacatgcgtataagtcattctctatctagttcctctagttgtttaaatgagttacatgttggcttgcaagaaggggagtgttgtgattttgcgactacaaagatttcaggatccaaccataaagccatcaagaaatgttcctgatcggatgttgtgatagataaagataagttcgatacgctccatgacaaggtgaaacagaggacggtttctaatcaagaaggggaggatgatgaggacacaattagctcggatataaccatgactaccttatgtattagtcaaccaaatgtgcatatgttctatattagatttacttgttatatatttgaataaacgttactacacaatgagttttgtgtgttttcatttgcacaattacttgcttgggcaaaagaaaagaaaccgaacgtaaggaatgtatgtatgattaaaggggttgattggggaccaaacaaagaccttctccaagtctacttccatctcaccacgtcacttttgatccatagaagataagagataatgttctacatgttttggattcggattcgggcctcctgacagcatcaatttcaaacggacctagccgttgatctagaaggaatttcgaggcctatgagtacttgttggaaaccttactcctaccgagctaccgggaatctgcaaaacaagccacgcactgtcacgtcccaaaacgaccctaaaatatatcctctaaattatgcctagaataattaaaatccgtgtgaaagcctccaacaattaaaatgtgcaaagttaaaagtcaaataaggcttggaggatttttgtatatttcctaaaagtctaaaatgcgtaaataaattttagtggaattttcagagcacaaataataattattaagaaataaacaaagttaaaatggtgtaccttgcctcctgggacaaggaataatacacgcacgtaaggaacgcccgttgggtcaattccggtcgtgacacgcacctcatccagtccgaatctgattttgagttttgggccttgtaattgtgtcgtgggcttagcccaagggggtgtgcgccctacgacaaccctaggatgtccctaatcacatttattcagtagtcgtcatcgtttagagttgggttttgcttagattattctgttgagaacagtttcaccgctagatcggtttgtggaaccccaaattcgagtgcttaatcatacctatgcaatttggttgcaatctatcttgttcttgcttgtgttcttcaattcgcatgtagggattagccttctcggcgaggtcaaccgggtttcggcacggttgataaccaaaggagacgtggtgctgcgattgcggggctcagtagtgtgttcgttcagtagccggatcgagttgtgtcgcgactccgtccaaatcaactgtttatcagttcctatcggaagatcgggacctaacatccctcatcagttggtatcagagcgcggttgcccgttaggtaatttatctttccataaccagaaaattgccatacaaaaatattgcatcatttacctagccaatttgagccattgcattgttctatttgattttgctttgttgaattttagattgcatcgtcgtgtcgagtgctggtttagttttagatttaatttttagttttgagtttggcatctgttcatcacttaggtctaagtccgtgtgagttgtccgtcagtttgggtcctgttttgcatctcgtcggttgttgccgggacctttaaaaaattgaatcgtcacgtagtcgggttttcgtttttatacttttgagaagttctgtccaccaattttgggagtgctttgactagggtttgggagctaccatcagagtcgtgtttctgtgcgcagaggaagaagatacatggtgggtctctgttggaagttgtgtaaatagcttggtttcggctaggagtcaggagtttggtagtttttttccatcatacttggactccctcttctagtctgcctgtgggtcgagtccaccgtggtggtttaggccgagcgcccagccaccaagctagtccgactcctctcctgcctgccgtgtgcacctccagaatcagtccattggatattttggcaaaaaaagaggaaaatttcctttagcagatttgaaatatttttgcaaaaacggaatctacgtgacatgagcattccattttttaggtgatctaattttagtttttcactttacgtttgagtccctgtaatattcatatttatatttgagtccctgttcgaggtcagtggttagtttctgttgaaaaaacacataataaaaaaagaaaaggcagaaaggtgcaaagaaaaagaaagaaaaagctgcacccaaaaaaaagaaaaaaaaggcagaaaggtgcttaaaaataagccgcacaaagaaaaaagaaagagaaaaaaagaaaaatcattcatcctttgagtatgttttgagagtgccgagttgtgcattgattcgtatctagtccttagtgtggtcgggtacttgcttgagctagagttgagtataggctaggccagcacattgactagtacgttgaactattattcaactttgcattttctaattagcacaattgcgttcatttgctactatatattgtgcctcccaaactccacatatatacttctggtcagcaccactttgatcattgcaatcgccacatcacgtccttaaaggtgtcacgaaccagccaccggttgtatcgtccggttgtatcatccttagcattgctggtaagacacttgtaagagcttggtaaagtgctccatttggctgagttgttgaggggcaccactacactgcgtagcagattattagggataaccttgattgtttgttgttgtttttgtgtttgcaatgaccggtatgagcggcgctcaaaatcaatgataccaacaaggtgcacgtgatgacaatactttggtgaaacaagtgctaagttctcaaatggagaaagcggagcaatggcagtaccatgaattatttgaaacaaagtttgtggttaaggatagagcctgtcgtactataatcgatagtgagagttgcaataactttgtgagttcagatttcgttgagaaacttgagttgcctacacaaccgcatcctcatccatattatatcaaatggttaaactcttgtggtaagttcaaggtaaatagaattgtgagagtgaacttttcgattggaaattaccatgatactgccaattttgatcttgtccctatgcaagcatgttctttgttgtttggtcaaccatgggtatatgataataatggttcgcataattttgttgctaatacgtacacatttagacataatggtcggaaaatgaaatggtacccatgagttttactgaaattttcgaagataatcttgaaaggataaagaatggaatcgaggaaattttcaaaaatagtgttgaaaggacgaaaaatataatcgatgagattttcagagataccaggaaagatactattgtgatgcctattgttattacaaaacgaacgtaatgttgtgcctattgctttggatactaatatttttcaggcatctgagaataaccaaggtaatgaggaagagaagaaagacgaagaggaaaaaaacctatctatagctccatgcattcttgaggaatgttcaattgaccaagcgcctacaatttcttaagctaagaaaaaagataaagataatggtgctacaactgctcaaggtatgcatagttataatgtgccaactatgtccactacttgtgctatattagagcaacccatagaggaaacaattgttgaaataccttttttacaaaacaatttttttgatgtttcttgtgataaagaagtgttgtgcaatgtttcacttttatccatgccacaactagtgaatgaacatgttagttctacagtagagccaccatgtgttgagtttaaacatgttattcacattgctagcgagaatgaagagcttaaattgctatcttctttgaatacttggggttatattcaatttgatgatctttgtccactcaactgtttagagaagaaactatttgctagattggaattgccatgcccttctgatgtgatttttcatattattggcaattatgatagtaaaggagaatataatgtgcatcgagtatatatttgttcgaatttgactatacctccttttcatgatgaaatgtattgtctagaggaccgcattcatataagtaattatcaatctatttcctctagttgtttaaatgagatataggttggtttgtaagaagaggagcgttatggtttttcgactacaaagattctaggatccaatcatatggtcaacaagaaatgttcagcataggatgttgtgatagacaaagataagtacaatacgctccatgacaaggtgaaactgaggacggtttccaattaagaaggggaggatgatgaggacacaactaggtcggatataaccatgactaccttatgtattaatcaactaaaggtgcatatgttctatgttaggtttatgttaggtttacttgttatatatttgaacaaacgttgctacacaatgagtttcgtgtgtttttatttgcagaggtagttgcttcggcgaaagaaaagagaccgagcataaggaatacatggatgattgaagaagttgattggggaccaaaccaagaccttctccaagtcttcttttatctcaccacttcacttttggtccatagaagacaagagataaagttctacacgttttggatttggattcgggcctcttgacagtatcaaattcaaatggatctagccgctgttctagaaggaatttcggggcccatgagtacttgttggaaagattatggagtctactttcagatggatttggtcccatgtcaaaattcctaccgagctgccgggaaactgcaaaacaagccatgtatctcatccagtccgaatcagatttgcgttttgggccttgtaattgtgtcgtgggcttagcccaagggggtgtgcgccctagggcaaccctaggacgtccttaatcatatttattcagaagccgtcatcatttagagtcgggttttgcttagattattctgtcgaaaacagtttcgccactagatcggtttgtagaccccaacacgtgagcttaatcattcatatgcaattttggttgttttctatctcattcttgtttgtgttcttcaattggcaaacagggattagccttcccggcgaggtcatccacgtttcgacatgggtgataaccagaggagatgtggtgctgcgattgcggggctcaagagcgtgcgcgttcaagaagccggatcgatttgtgtcgcaactccgcccaaatcgttgtttatcagaaccttttggaagatcggaaccctagtgcacatcaataacaatcaaggaaaaatcaatctgaactctagttattatcaagttaaataataatccaaaatagaatcaattgcctagttgctgatcttaaaatctaagtgaagaaccaagcaactcacacgcaacgatgatggcacttaatgcaaccaaaggagtataagccacgaagtaagcaagctcgtgttgcacaagtgatagagagacgctagctatgctcaaatgtaaattgggctacaatatttgcaccgaaataaccaaaggagcagcaagtaaaaaattttgattttttttaaccaaccgtagcacctttttttcttttttttctttctttctttctttcttcctttctttctttctttttttttcaattttctttttaaccacggttagccaaaaataaggtgtttatatactgctcaaaatatttagtaacaagtgcaaagcccaagagcaaacctatagctagtctcaaataggatcaatgtattaagttgtatgcactagccagttgtacataaaagcctaagctgatagggaaaggcgggccattcactttatacactccaacactccccctcacgcgagaacccctcaagtctcaagcgtggaatattggagtgggcaattcacttttatttaattgcacgccagccaggattcaaactcgagacctctgaccctgataccatattaagttgcatgaactagccagttgtgaaagtgcattaatccccctagtgggttttggtgattaactacaaatgtggttaagggactaatgagttcattgagttactttcaggtgtattagtccaaggtgtggaagatggatgccttgagaccccccaaaagtacaaaataaaagcggaacggaactcgggaagtgcatagaattgtttatttatcgcaatcgagttttcaggaaaaatcgtactattaagaggggttccaggtgatgctctgagatatgtcatgtgctcttagtgtgaaccaagtatcaagtttccctatgagtcattcttgccaatactccatctgtccaaaattgcaagtctggaacttcctgtcttccaggtccggaagttccggtcttgtgaaaaagattttcctaagtgtagtctggaaattcctgtcttctag

SEQ ID NO: 20223 - DNA, 2497 bp, Oryza sativa
gttttatgcatgtgacttcaagcctcttccttggtaatactttccacaaaccaaacatgcatacacgttcaagtttgataaggagattgagcagaacttctcaaaatcaaaatcaaggacctacaatgtagacaaaatatatacaacaatcaatgaacatgtgaaatagcccatcaatgatacagtccagcacacattctgccagaagagtgtaaaacatatatagaatatagcgtggaagtgattccatagattttaattgtacaaacaatcacatcacactggccatctaaaacagaaggatagatttaaagatcctacaagagcttacaattgtttagtttaaagctattttaaggatctattttagaaaaaagccaaccacagctcacaagatactgtttagtttaattaaagcttttatgtaccggccagtgagaacgaggaaataaagggatacacaagttgaacggataagaacttgaagggaaaagcctacagttctttttaaaattgcagcaaacataagaggctttctgatatgtcctaagggaccgtgtctcagttaagaaacagtccatagtggaatggaccagcgttcaacccaatacacccataaacccaatagccaccagagcaaggaagaactaaacataattatttgataaatatgttccgttcagttattatagtaatgtacacagtagagtagcagtagaacagtgctctcgaacaaaaaaaaaaaaaagataaagtaccaagacagacatatgacaaaaaaataatatattacttcaaatgaacaggctcacatgttgcacactacaacaaaaataaaatcaattggaattcactatgaagatataataacaccatgaacattaagtttccctttagcatctgtatatgttgttcagctctattaaatcaaacatacacacaaaaaaaggaacttctatcacaataccagcaattgataatcaaaatactaggcgtaaatggtggatcccaagtaaattggagatcgtgaacataatgaaaaactatatttcatcgaggttattcacatcaatcgaatcacacagaatgtctaaaaaattggcacctgaaacgctgctgctgctaaaagccatacctggcggttcacggtgtcgaggtaagggcagtcccggcgcagctccacttgcctcggcctccgctccggagccctcctcacgtcgttgtcaacctcgtcgtcgtcgtcgtcctcctcctcctcttcctcgtgtcggccattcgcgcggcgcctccccgcagcagccgccgcctcctcgtcctcctcgtcctcctcgtagttggcgagccccagcagcgccccgccctccggatcctccccgcgcgcgcgcttctgggcggcctccccgtcgatgacctcctcctcctcctcctcctcctcgtcgcggccgcgcttccgcgccggggatgagagatcgtccgcggccatcgtcgtcgtgcgccggaaccctagctagctagctagctagcccctgcgcggggaagccgggaaatgacggcgagcgaagggcggagctgcgcccgcgcggcgagattctagggtttggggaaggaggagaggtgggcgaggatggagcgacggttaggccgtgaggatcgccgtgccgtgcgtgtggacggagacggggtttgggcccggatggggatgtcggttcttctttgtgggtttcgtcgggccaggccggtatgccaggttcgtcgcacaaagtttaacggcctttgatgtttctaggaaaaggcgaaacaaattcgaaggacttcaatcgtatgaaaataattcctatagaattgttcattctgataagggattttagagagatagttagccaaaggtcctttgagcctatatctcttgtccgattgcagcgttttctgggatccaatcaaatggttatttatacgttctttttttattttgtgatcatccgttttacacttgtatgaatgagatgaatcctacgttttcctatttactacatttttacattctttcgattcaaaggggccatatctatgctttgataattatttgaactttgttctcctgacatttttgcttcatgaaaaggttaatactgttaatttaagcactaaaccaaaataattttttcaattcatatactacaagtaaaataagttgatgataaaaaaaaacttgcaatgatagagccagcatcatcgttgaacccggacaattaatagtgtttcatggcggtcgaccaaactttatacttattaaccacaatcagtaatggaggcggctgtggcgaagcttgggcaatcgccccgacctacccaggagctgcccctaccactacaaacttgtttcggatttgtcctgcaatagcttctttctctaaaacataagacattgaaatgtatcttccttcgctactccaaggtagcaactatcatgaacaaatttcaatcggtgctaaaccct

SEQ ID NO: 20224 - DNA, 1481 bp, Oryza sativa
attcctgtgaagaccacctatggggggaataaactagcggagctctacttcgctaggatcgtgagtctccatggtattcccaagaaaatcgtatctgataggggaagccaattcacctctcacttttggaagaagctccaagaagagctgggtactcgattgaatttcagcaccgcctatcacccgcagacagatggacagaccgagcgtctaaatcagattctagaagatatgcttcgcgcatgtgtcctagacttcgggaagacttgggataagagtctcccctatgccgagttctcctacaataacagctatcaagccagcatacaaatggcaccctatgaagcgttgtatgggcgcaaatgccggacaccgctattgtgggaccaagttggagaaagccaagtgttcgggactgatatcctgagagaagctgaagctaaagtcagaatcattcgggataatctaaaggtggcacagtctcggcagaaaagttatgcagataaccgtcgccgtgatctggaattcgcagtggatgactttgtgtatcttcgggtcacgccattgcgaggtgtacacaggtttcagacaaaggggaagctcgcacctcggtatgtgggtcccttccgtatcattgctcggcgcggagaagtcgcttaccagctggagctgcccgcctccttgggcaacgtgcatgatgtgttccatgtgtcgcaactcaagaaatgtcttcgagtgccatcagagcaggctgactcagagcaaattgaagttcgcgaagacttgacctacgtggagaggccagtgaaaatcctggacaccatggagcgcaggaccaggaaccgagtaatccgttttgcaaggtccagtggagcaaccacgccgaagaagaagccacttgggagcgtgaagacgagctgaaggcagcccatcccggtctcttcgctagttcttccgaatctcggggtcgagattccgtttaaggggggtaggtttgtcgcgtcccaaatcgactctaaaatctatcctcgaaattgtgcaaagaataagtaaaaattcatgtgaaagcccccaacaattaaaatgtgcaaagataaaagtcaaatgaggcttggaggatttttgtatatttcctaaaagcctaaaatgcttaaataaattttagtggaattttcagagcacaaataataattgaaaagaaataaacaaagttaaaaaggtttataaaaagaaaaatcctaaaagaagttctctttcccccccctcccctcttgggccggctcggcccattccctccctctctctctctctctccctcccggcccatcggctccccgcgcgcgcgcgcgccgctgacaggcgggcccgcccgccgctctcgctgacgggtgggacccacctgtcatctccctcctcgcgccgcgtccgccgccgcgcccgtgccctagcgccgccgccgccgcggattgcgccgcatcccg

SEQ ID NO: 20225 - DNA, 1749 bp, Oryza sativa
acaaaacctcaactagtggacactctactcatggcaccactagtttaattttaggtagatgcttcgctatttaattagataacattaggcggttttacaactctagactttgggatattctcatcacctggacactctggaattgttggattattgtggaattggattcaccccgccccctctattcaaaatccccaaaaatggttttaggctgggctcggggtgcatggttttgatggtagcacctcggccatataaggaccggtcttcgggcctctgttgcaaagcactaccgtacttccacatgtctagtgggtaaggcttagtttgtggctcagtctagtcataaacaaaagtacacggattggagatggatgaagtcgggggtcgatggacattctccagggcaaatgaaggctacacgagctgcggcccggtagtcgagatgtcatggcagagggttggtgccctgctgctaggggctcagtcttgcctgcctgtcccgggtgttccggccgtaggcaggattgggtcggtactcttgtctatggctaggatgggttggaaactatgtcacgtcttccgtctgtataccgtggtggtatgtggcacgtggttacacgtgaggaagatgtgtcttgtgggtaaagatgtacacctctgatcagagtataatctattcgaatagccgagccctcggttatgggcaagccgagcaatgtacccaagtcagtgttttaattcttaaaattttgctcaacaactaaaatgtggaatggttggcctgggttggcttaggacgagctgggacccagggtcgggttgccagttcggtctgaatcatcataggccttgggttaaggcaggttcgtgtgggttcacggccttgattaataatattgtttagttctaggatcgtgtttacaaaatggccttgagcaactaaatgtctttaaatgctgtttactgcaaccctaacccctctatgttataattcctttgtactcccttgcatttattctgcatttgtgggtgtgtcttgttgagtacggtggttgtactcagtcttgcttaattttcccaagcccagatgaggagctccttgaagatgaaggctttggtgtctagctcgtgcctgccgtcaagcgcctgtggtcgtcgccctagtcttccgctgtttttcgttgtctttgtgtgctgggccttcgctgcccatgtaataattttatatacgcttccgcttgttaaactctgaattgtatcaacttttggtgtaccttgcctcctgggacaaggaataatacacgcacgtcagggtcgcctgttgggtgatttccggtcgtgacatctcgtcacaagtcctatggttattttatatggaatctcggcaaataacagccgcccaacaacagtcttatatgtgtgcatatatcgaagcgttgatgcacgcaagctggtccggtttatgttatttcttacataagatatttttactccatacttttgtttaaagaatcattcaaaggatttcatggaaaaaaaaagttccgccaagtgccaaggatcgacattttgaactagaaatgttagatggcaccggattattttttttccacctggtgctcttacaaatggagagaatggaatgagtagaattgattgcacgacatttattacataaataaccgttgatactcggtacgtgtccggtcgtctaccaatgtcggcggtgtagtagtagacctttat

SEQ ID NO: 20226 - DNA, 1883 bp, Oryza sativa
ctcgcccataaccgcgggcacggctattcgaatagttttactctggccagaggtgtaccactgtacccacaagacacagccccacatcatgtcaccatgtgcctcagtaccaccacggtacctcggaaaggggctgtgacagtaccccttgcataacacaatccatcgcagcgcaccattcctggatcataatcacccccttataaacaaggcatggactccccagcgacccccgtgggcttatctccgccacttctcagtctggtgctctgcaatgaaccatgctatacaaaaggtaaagccgttgcccacgctggcttgtggttggcacggttaatgtttcacaacagtagctcgcgaaccggtccttaattgtcatgagcacgactctcaaaaccatgtgctcacaacccaccattatcaagttttagttggcaagtaattaattaaccaatcacgattgaccatcgtgagctatcattaaatataaccataagtgatagtgaaacattagttatcccaattgtgtgctaatgtttctaagcatggctaagcaattatatctaatatctagttgaaccaatatataaagctcaactagtcaagttataataacccaaggtatcaaggaataaagtaatcaatgcaaacaggccataacaaaggaataggttcacaccacccagtgacattcgaaaataaatgcacagttgaaataaatagagaatttaaatataggatcaacatgctcaaaggattgtgtttaggatctgtgtgacttgccttgcaataatcggtcttcaattaatcttcttgaatacttccggcgcactcgcgaaccttcgcaacgacggaaacgacaagctaacacgcaaaacgaagaaaaagactaataaaaaccaaataaacaatacataaaaagtaaacaaacatgtagatcataattttagatgaattatgagacttgaacggcctcattctgacttcaaatgaatttattatgaattttacaagattaaatctaattaaagcccatttaaaaagaattaaataaatttaattcaatttatggacaattttaatatgtagatctttattttacacaacttttgcaacttgaaccacattaaactgatttaagatgaattagttatgaatttttaaagattaaatcggattaaaacctttatatggattttaattaaattatgacgcaataatgaattatttttgaaaaggaaaagaaggattattgcgtcagcggctagggtttgcggtggaccgggtgcatggcggcggttcacgcgaacggacggccgagatcaaccctatccaaaacggacggccgagatcgatcggtccacgcccggctcacgggagagggcgacgatgacgtcagcgacgacgtcagcaccggcggcggctcggcggctcggacggctcggacggcgcatgctcgccggcgaacggcggctctacggcacaaacggagggcaccaagacgtagatcacggcgcggcgaactcaccgatgaccaaaacgtcggcggaagaccaacggacggcggcggcgtcgaggaaaaggcggcggagaagatcgggtcgacggcggcgacggtgctccggcggtcttcggcggcggcgaagcggtggacggggacggcggcgaccttgcgaacccgatggtggcgacggcgactgacgacggcggctgcaacggcggcgcggcgcggctgaaccgacggcaacgacggcggcgactagggctacgcggaggcggcgctagagacgacggcgggctaaggcaaaggtggcggcgggtagaagagacactgggggtccttataaaggggctagcgagcggcgacggaggcccacggctgc

SEQ ID NO: 20227 - DNA, 1849 bp, Oryza sativa
aagtgggcccggccgtcagccgcccgcgcccgcgggtgcggctgacgcgcgggacccacggcgtcgaccgccgccagccgcgtgcgcccggtccaccgtggaccgtggggctgacgcgtgggccccactccccgtggacccggtccgcgcgtcccctccctcggctgacgcaataatccgtttttttttaattaaaatttaaatgaagaaattcgcaaatattcatttaaagagcatataaacttcaaatggccatatcttggccatttgaactcggaattggaccgttcaagtccctaatttttccttaagatgtaaagaacccatttttgtgctttgtttctgctgttatgtggagttatttagtgttaaagcctttttcttttccgttggtcgtgtagacgctgcagcttcggaagatccgctcttcgtggaagttgaagccgtcgtttgggaaagcgagcaaggcaagacacatcatcttgatcatattgaatcccagtttgtaaaattatgttgatttaaattattgcattatcgctttatttaaattcccgcgttatcactgttttatttagccatgcctatttacctttgttatgaccatattattattgttattgttagtattattaccttgttcaccctagattaaacaaaacctcaactagtggacactctactcgtggtatccctagtttaaatttaggtagatgcttcgcaatttaatcaggtaacattaggtggttttataaccttagacttgggaaattctcatatcacctggacactatggaattgttggagtattgtggaattggcttcaccccgccccctctattcaaaatcccctaaaatggttttaggctgggctcggggtgcatggttttgatggtagcacctcggccatataaggaccggtcttcgggcctctgttgcaaagcactaccgtacttccacatgtctagtgggtaaggcttagtttgtggctcagtctagtcataaacaaaagtacacggattggagatggatgaagtcgggggtcgatggacattctccagggcaaatgaaggctacacgagctgcggcccggtagtcgagatgtcatggcagagggttggtgccctgctgctagggggctcagtcctgcctgcctgtcccgggtatcccggccgtaggtaggattgggtcggtactcttgtctaaggctaggatgggttggaaactatgtcacgtcttccgtccgtataccgtggtggtatgtggcacgtggcaacacgtgagggagaggtgtcttgtgggtaaagatgtacacctctgatcagagtaaatctattcgaatagccgagccctcggatatgggcaagcctagcaatgtacccaggtcagtgtttcaattcttaaaatttgctcaacaactaaaatatggaatggttggcctgggttggcttgggacgagctggaacccaggtcgggttgccagttcggtccaaatcatcgtaggccttgggttaaggcaggttcgtgagggttcacggccttgtttaataatactgtgtagctctaagatcgtctttacaaaatggctttgggcaactaagtgacttttaaatgctgtttactgcaaaacctaacccctattattatccccttgtactcccttgcattaatcatgcattctccggtgtgtcttgctgagtactgtggttgtactcattcttgctcaatccttcccctcttcagtaagagaagctttggagaagaagtcttaggtggagtcctggcttataccccagttgagcgcctgtgcagatggagccgtaggcccgctagtccgctgctgtttatt

SEQ ID NO: 20228 - DNA, 873 bp, Oryza sativa
taggcttgtgccagatgttctattgcttacgacattgttgacaatgtatgccaagtgtggggtgatggagactgcaagggagatcttcaattcaatgggtgaaaagagtgtcccctcgtggaattcaatgatcatcgggtatgggttgcatgggcaaagcgaaaaggctcttgagttgttcttggagatggagagagatggacctaggccaaatgaaacgactttcatctgtgtcttgagctcatgtgctcatggtggtttggtgcttgaaggttggtggtgttttgacaggatggtcaggttctacagtattgagccaaagtctgagcattttggctgtatgatggaccttcttggtcgcgccggactgcttgaacaatcagagaatctcattgagaatttgcaaggtaaggtgtcagaagcattgtggggcatactaatgtcagcctctcaaactcagaacaacatcaaacttggagagtttgtcggaaagaaattgatcgagatgaggccaacagaagtcggtccatacatccttctatcaaacatttatgcggcagaaggaagatgggatgatgttgagaaagtaaggaaggtgatggaggagaagggggtggagaaggatgcagggttgagcctggtaggatcaagggaaggtggtcatttcattaatgaaagtggagcttcagctccaaggaatgatgtgatgctgtgcatgctgggtgagatgagtgtgcatatgaagcaaccatctgaagggtccaactgcaggaaaagaagcccctctgctccttgaaacttgaacatacagggcacattattttgctgtgtgactgtcaaaggagaacacaaagatgggatgtttatgcctca

SEQ ID NO: 20229 - DNA, 894 bp, Oryza sativa
taccgacccatttttacctacggccgggatacccgggacaggcaggtagaactgagcccctagcattgggcaccaaccctccgccgtatgacatctcgactaccgggccgcagctcgtgtagccttcatttgccctggagaatgtccatcgaagcccgacttcatccatctccaatccgtgtacttttgtttatgactagactgagccacaaactaagccttacccattagacatgtggaagtacggtagtgctttgcaacagaggcccgagctttagtccttatagtggccggggtgctacttcccataactggcatgcacccaaaccccaccgaaaacaggttttaggggttttgaaagaggaagagaggtgtatgtccaattccaccataatccaacaattccatagtgtccaaatgagatgagaattcccaaagtctaaaattataaaaccacctaatgttgcctaattaaattgcgaagcatctacctaaagtcaaactagggataccatgagtagagtgtccactagttgaggttttgtttgtctagggtgaacaaggtaataataataacaatgacaataataatatggtcataacaaaggtaaataggcatggctaaataaaacagtgataacgcgggaatttaaataaagcggtaatgcattaatttaaatcaaaataattttataaactgggattcaatatgctcaaggatgatgtgacttgccttgctcgctttcccaaacgacggcttcaacttccacgaagagcggatcttccgaagctgcggcgtctacacgaccaacggaaaaagaaaaagacttttactctaataaactccaaacaacaagcaggaacaaagcacaaaaatgggttctttacttctta

SEQ ID NO: 20230 - DNA, 2741 bp, Oryza sativa
agtgttgaaaagaaaatctaagtttaattaataaattccaatataaaatggggccagataaaatttcattaaatactttgcttaattctataattcctagatttttctgggatttatttgagctaagaaagtatttttaataaatggaattgcatttaagaaataatttaaattgaaaaaaaggttttaaaagttctcttttggctttgggccgaaagtcggcccaaaactctctctctctctcccccggcccaagtcggcccagtccgcagccgagccgcccgcgcgcgcgtgcgttcggtcgctgacaggtgggtcccacctgtcaggcccgtcgtcttcctcgggccgaaaccctagcgcgccgccgccgagccgccgccgccgttcctttccaaattcggccgttcctttccttctccggccgaattgataggggggaaatgatcgccgggatctcctctaccttttctcctttggaatcatcggctaaaacgttttggaagctcgtggaatcgagttcgattcggatcggtttctttctctccaagcccgaggtttccttcgccgtcgccggtcgccgtgggccttcgtcgccgcctccgagcccctttaaaaggacccccggagtctcctctacccgtcgccaccttcgcctttgcctctcgtcgccggaagagctctagcgccgtgtgccctagctttgccgtcgtcgccgccgctccagccgtgcgccgccgccgttccagacgtcgccgtcgctcgggaaggacgtcatcgtggtcgccgtcgcgtcgccgtcctcgttcgccccttcgccgtcgccggagatcaccggagcagcgtcgccgtcgacaacccgaaggtttccgccgcttccttctcgtcgctgttgtcgtccgttgttcgtccgccgccgttttggtcaccggtgtgttcgccgcgtcgtcctatacgtgctggtgctcttcgttagcgtcctcgcgccgccgttcgtcggcgagcgtgcgccgcccaagccgtccgctccgccgagccgccgccgctgtcggtgacgtcaccgctgacgtcatcagggtcgtccgccgtgagccgccgtggacccgatcgatctcggccgtccgtttggattggatcgaatctcggccgtccgttcgcgtgaaccgccgcccgtgcgcccggtccaccgaaaccctagcccgctgacgcaataaatccctttttccttttcaaaaataattcattattgcgtcataattcaatttaaaccgatataagtgtttttaatccgatttaatctttaaaaattcataactaattcatcttagctccgatttagttggttcaagtctctaaatttttctaaaattgagatctacacattaaaaatatccacacgtactgttcatgcttgtttatgtgttgttttggtaattttgttcttttctgcttagattccgtcgtttccggagagtccgttttcgccggagaagagtttgaagagttccaaggccagcaaggcaagtcacacagatcccaaacaaccctttgagcatgttgatcctatttaaagctattatttcttttcaactattgcatttattttcgaatgtcattgggtggaaataacctattgtttgttatagcccttttgttcttgtttaccttattccttgataccttgggttataataatttgactggttgaactttatttatattggttcaactagatattaggtataattgcttagccctgcttagaaacattagctcacttttgggataacttatgattcactattatttcatgatggcttattgatagttcacgatggtcaatcgtggttagttaattaattaatgtgccaactaaagcctgataatggtgggttgtgagcacatggttttgctggtcgtgctcatgacaattaaggaccggttcacgagtttcggttgtgaaacatttatcgtgccaaccacaagccagcatgggcaacggctttatcttttgtatagcatggttcattgcggggcaccagactgagaagtggcggagataagctcacgggggtcgctggggagtccatgccttgtttataagggggtgattatgatccaggaaggtgcgctgcaatggattgtgttatgcgaggggtattgtcacaactcctttccgaggtaccgtggtggtattgaggcacatggtgacatgatgtggggttgtgtcttgtgggtacagtggtacacctctgatcagagtaaaactattcgaatagccgtgcccgcggttatgggcgggtcgaacaatgtctttcgtgattagtctcacccttctcaccataatagaagatgctataactggtaataatttgattagctcctggtttggaatggtatattcctggtttggagatagaactgtgcagccgggatggttgttcagaatggatgggcctatacaacagggtatgttgtatagtgttggattaatattgtttaaatacttaactgttttaaattctcaaatgtttgctaaatgctgcttttgcaaatggagccctattatgccatcctttgttaccctgtgcacttgcatatttgctgcgtggcttgctgagtatgtcatatactcaccttgcaatcattcatcagaggaagagttcttcaatgaggctgatggtgtggaggagtaggtgtagccttggtcaagctgcctgtggagtggagccgtctgcgcc

SEQ ID NO: 20231 - DNA, 538 bp, Oryza sativa
ccggcccaagaaaggaagggggggaaaaggacttcttttagggtttttctttttataaacctttttaactttgtgtatttcttctcaattattatttgtgctctgaaaattccactaaaatttatttacgcattttaggcttttaggaaatatacaaaaatcctgccaagccttatttgacttttatcttcgcacattttaatggttggaggctttcacaggaattttacttattatttgcacaatttcgaggatgtgttttagggtcgatttgggacgtgacagcagcggtggtgcatgctctaaaaatctggcggcactatctcattgggaatcgctgtgaaatatatactgatcataagagtttgaaatacatcttcacccagtcggacctgaatcttcggcagaggagatggttagaactcataaaagattatgatgtgggaattcactatcatcctggtaaggccaacgtggttgccgacgctctaagtcgaaaaagccattgcaacactcttaacgtccaaggcattccacc

SEQ ID NO: 20232 - DNA, 1279 bp, Oryza sativa
atataccaggagtatttctgcgtcattgctgggaattatatttctagtaatgtcgttaagaaatactaacaggcggggtgtctcagcatcccgtactgttgacgttcttctgcgtgccatcgcatcaatcttgcatgctctttgttgctgaacaaacgtctgagccatggtattatagggcaaataccacattaccttagcaggaattctcttcctcgaaggctgtccgtcaacaccacctggatcgtctcttctaatcttgtatcgtagtgtattacagaccgggcatgcttctaggttctcatactcctcaccacgatagaggatacaatcgttcgaacatgcgtgaatcttttgaacctcaagtcctagagggcagactatcttctttgcttcgtatgttgtttcgggcaatttgttttcctccggaagaatgttcttcactagtttcaatagctcgccaaatgccttgtcattgacaccatttttgtccttccattgcaacaattccagagttgtacccaattttttgtgcccctattcatagcctgggtacaacggcgtcttgtgatccgctaacatacactctaatttctgagcctccttttcactttcgcagtcctccttgatgtcttgcagcatctgaccaagatcatcgtcaacgtcaatatcttcaacagccccttccacctcgcacgttgtatctccttcaaatccatcgtactgagcccagtccggaatgttctcgtcttctacttcatcttcttccatttgaaccccttgctccccgtgcgaggtccaaacattatagctcggcataaagcccgtctcaaacaagtgaatatgaatagttctaactgcagaatactctctctagtatttgcaattagtgcatggacaacggataaaaccattattctgcttgttagcttctgccactttcagaaaattatgcaagccatcaataaactcttttgaccgtcggtctgcccgcatccattgccaatccatctacataaaaagcacaaaaatcatgaaaaaataatccacgaaattcaaaccaattaaacaatattaacaatagttatatatattattataaaataataccacaaattattcatgttttcattccacataaaaattgtaaataaatatttattttgttgtacttattttaatttaaattaacttactgcactattcttttacaataattttctatcattttctttctcatctttttatcacaagtttttttcttccaaattctaaataa

SEQ ID NO: 20233 - DNA, 2638 bp, Oryza sativa
aaaaaagataaaaaacttgccaaggacatgtgcgctgcatcggattttctgagaaattataaagtactttttcaagttttcacctaagatcatctacctgttaattataagccataacaaaatttaaatttcaaaagttgattttgaagtttttttttattgtgatcattttctatcatcggttttagaaccataaacaatagatataagcacttttaaaagataatttttcacgcttattttttcttgcttaatatgtcaaattgacacgttataaaaaaaaatatggttcaaaacttcaaatcatgtccattgttttgtttaaacactagataaggctaaaaatatatgttgtgtccatttcctcatatggacctataatcccacatgtcggtagggtggtggcagaaccaccaccatcaccattactatagatgtgctacatggtatagttaaaagaaacaataatcatttaaaagtgcatataaaaaacattttaatttatgaattcgcactctatgaaacatgttttaaaaaaatgaagcatatattttatcttatttgattaatgtaattacctttttttaacaagcgtatattatatcatatattataaatgtacgtcttttataggattttttaagggaattgaacttattctttataaaagatatacacagtaatttcttttgatccaaatatactttatgtagtatgcaccaggtaaaaatagcgagcgcgccttctagttttgtttagtccgtgaataatatcccaccctaaatatctactcctatattcctagagaggtactccagcgaccagcctgtaagcctgccacgcagctgctagtacctctaatgttgcactgttcatagttttagtacaaagtagtactactcctacatgcttttactcaaccatcggttttgccctctccacagatgcagactctttgactgttgcataactccatactccataaaaggggtccaccatcggttggaccaatcattagtgatacaagcggaccaatcattagtgataagaggcaaactgttggtttgtagcttgggccatttgtcagtgagatataaaatactgcaatgcatgttactgggtgtttgcattttgtaaaagagccattctcttccttttaagtagtgtaataatatgttggtcttataaacattgagatttgtttacctgtaaattaggggatctgccaatgaggtatttgggctttccaattgataaagaaatacttctgaacaaagattggaagaagcctgaggaaacaattgaaaaaaaaagttggttgctggcaaggaaatcttcagtcaattggagggagggtgagtttaattaatgcttgtcttagtaatactcctttgtacatgttatccttctttagggtgcctattggggttagagagaacggatctttataggaggttcttatggcaggatgatcagggtattaggaagtatcatttggttaattggaatacggtttgttctcccagggagacagggcgtttgggcattttggacttagaaatcatgaacattgctttgctggggaaatggctctggaaccttgaaaattctgaaggtttatggcagcagatgtatcagacaaaagtatttatccaaaaacattttggctgctgcaaaaacaaaatctggggcctcccatttttggcaaggggtgatggaggttagaaaaagtttcttcaatttttgttccaagagaccaggaaatggagataacatccttttttgggaagataactggttaggaggaaaacctttggcagaacaatttcctttttttgtatagagtaactcagaaccaattcattactttggcaaaagttaaaaaaaaaagggtggggttgcatgactttcagaagaaatgtgattggagatgcacttgctgactggaacaaagttaagtcttcttgtgatgagataactctgaacaatcaaagagatgtgacagtttggactctggcaaagaaatggaatgtttagtgttaaatccttttatagagctctaaagttgcaggggactgtttccatgattgggagttcacacaaattttttttttggaaaattaaagtccccttgaagtgaggatttttctgtggttgctgcttaaagagaatgttttaacaaaagataatttgataaaaaggggttggaggaagggtaatgatctgtgtcagttttgtgaacagaaagaaacaattcaacatttattttttgactgtcctctggtgagattcacctggactgttgtgatttgtgcttttggtatgaaccagattaaagacatgagacatatgttaagttcctggattcaaccttgtgacaaattacaaaacaactaatgctagttggtgtggcagctgtactttgggccacttggaaagcaagaaatggcttgttttgatcaaaggcctgtgcactgaggtctagctggctttcgtttgtctttgtttcttttgtgagcacctaggggttctatccttctggttctaagactctgtttttgtaagaacttctgcgtttctttaatgaaaattggagggttctgccctttgctcaaaaaaaaaaaaacattgagatttg

SEQ ID NO: 20234 - DNA, 2742 bp, Oryza sativa
agatcgaaaagacaggggaagacggatcctgaaagcttcacattgaaaaggttagatcgcatttgatcgaaatgccagggggcgatcaaatgacaactctagtggtgcgaatcctgtgtttggtcgctccgtgcaagaaattgcactgtaaccgctggaagaaatgctctgcatgcaccttattaaaagaaaaaaaaatatatcagtttttgcctctgtagtttgccacctgtgtcaggtagtaccactccaatatgtgcacttaccaacaatagtttctcaaatgctcagtgacaaaaaggaaaggaatgatatacgacaatcaatctccaaaagtactatcataaagttatcaatatttttaaacttattctaatataaaattggttttcggaatttctaaagttcaaccgagtctattaaacgtcgtattgaccagagggagtagcaatctgtgataaacaagaggaacagaaaaattaaattgtctgtcaggcttggccttctgtgtgttctttttggtacaaacaccatgaaaaaaaattaggtggataggacgttaaagtgattatctgattccaatttttgtggatgggacatcaggtggataggacactgttctatgatcagattcaccatctagagttttaggcaattgtgccttgtgaatgattatcggttccaattctttcagacctctggcttcatcagttccaattgaggcagttctgttcgacattgatgggaccttgtgcgactcagatcctcttcatcatgtggccttccaagaaatgcttcttgaggtatggaattcttatacttcttgttttccattaacttttgtagaaagctaattgagaagatgtctttttacagattgggtataacaacggtgtgccaatagacgaggagtttttcataaacaatattgctggaaggagtgatgttgaagctgctcagaatttgttccctgattggccccttgagaaggggctgaaattcctcgaggacaaggaagctaaatacagaaggtacactgcagttaatgacaacatctattgtgtctagtttcagtatactccacagttgtattaagggtgttttcttttgggtggtgagaaacggtaactaccaaccgttgttaacattactgaatcagtatattttcccagactgaatatttataatttttaacttttgcagtttggcaaaggagcgtttggaacctgtaaagggccttgctaaagtggttcagtgggtcaaagatcatggatacaagcgtgcggctgtaaccaatgcccccaggattaattccgagctcatgatctcccttcttggcctcacagatttcttccaggccgtcatcgttggaggcgaatgtgagaagccgaaacccgccccattcccctacctgaaggctctcaaggagcttcaggtgtctgcggaccacaccttcatctttgaggtaaaccacttcttcttcatttgcatctgttgcaaacttgtcatctggttttatttgcagttgaaaaatgtgtgcttttgttgcaggattctgcttcaggcacacgtgcaggcgttgctgctggaattcctgttgttgctgtggcaacaaggaacccagagaagtccctactggatgcaggagccacgttgatcatcaaggattatgaagaccccaagctttggagcgcacttgaagagatagacagagaggaagccaagctaaagaaagctgatgcatgagatgagggttctcgattagatgatatattgcaggtttagctccttttgcatttgcagtaatattgtagccgaagtgatggcgcacagagctcatctttgcacttttgagcttctgtggttttattattctttgttgctactcagcctattgagttggtacagagaaataaagacccaaaactcccattgagttattctttatggatggatgttacttctgagaagtttcaggggtgatcttgttcatcctgccaaaactattgcatttgcttggcttcttgttatctttatccaatggttaagttaaaaaaaaaagaagaagacatatttaaccaatacaggagctacaaaaggacgaaacttgcagacagattaaagtcaagaaaagacagaaatatatgaacatttctccactttaaaagggaggaatgcaggagcaaaaatataaatgagctgacaagaaccagtaatttccagtaaaatttgcacggttgatgtaccaaacattgcagccatctaccatgtagttacaaagtgggaaaatactggcagagctcagtttacaattaccaaacattgcaaccatctaccaagcatttcttccctcttatagtcatgcactcggtcagtagtcactacatagctaaacacccacctggtgatcatccttggggctgcagtagagagtgcggagaaatgttgcaaggaacatttacatgggcaatccatgtatccagacccagttcttcacttcttcatttgaacttggaaaaaaaaacagtagcagcagattcaagaaccttgaagattcctcaatgagtgcattaagcccacaacacagcactctcaaaatgaagccaatccagaaaaaaaggtcaccaaggtggcaaaaatggggcagccctcgattaaattgatgggcaaagcaattgcttattctccaatgacctgcaccttagcacgcttctgcacttcatggagcatgcctaaacttga

SEQ ID NO: 20235 - DNA, 746 bp, Oryza sativa
cgcaaaagagttgattttccacccatatttgggccagtaagaacaataaagctggcatttccaggcccacccatcttaatgtcattgggtacaaaagatccactgcctaaagaatcacttcggagggtggggtgccctaaatttcttgcatggagagtaggagtatcatctggaccatatgattctttgataattggacagcaagttggtccctcaaaaaaatcactggcaatagcaagactaatcaaaacatcaagctctgcatgttaaaaccaaaggtagcatttagagacccactaatataatgcatgtgaatgtgggccattgataagaacttttaactatgcatcacattacaagtcacagttatctactaatcttactcctcaagaaccaatcaaataatcaatacaatcatgtgtaaactattgtaaacatcactattgctattttcatactcatcatgttatcagttgaattacaaagtaatcttttttgtactaagcatgtccttagaaattgatatcatcattgctacctagcagctagtttttgttttcaaatacagtaccagcatcttcaatatctcttttcaaataagatggcagatcagagtaaagtgaaaaggataggtagcagtcagacaacagagaattagaagagtggcacagagtactgctcatctaagttaaaactacaattggttacagaaataaaataacattagatgaaggggctgcaggaat

SEQ ID NO: 20236 - DNA, 4739 bp, Oryza sativa
tcattatttccttgagttatttaatttatttctagttgaattgaaccttgtaactatcattagttgaatatcccttgtaactaccattagttgaatatagtggcttatccgtagttttgctccataggtgtggatagatctggtgtggagggtggtttgccgggttgccgtcgagtttaaaaggcaaatacatgatgaactaattgtgttattcatggatggtttgctttatctatttattaccgatatatttctatgtgataagtgattgcttacgttcaaattattgttcatgctatttaggtttcgagttcatcttatgtttacgatgttattcttattttaatattctatgcttgacatggatgtgcaatatgattttcaatttagttctttgttttcggttttaattattcatgttccatgtgagtcatggatgtgctatctgattttctattcatgtccctgtgggtaagcgccgatcacgtttactcggctttgccagaatgtattcactattgtctggaatagaaactaatatttcaattcatgcctatccaagatgggaactactatttttcttagcatgcgcccagcctccatccccctcctgtgagtgaaaagaaacagagacacagcaaaggaaaaagggaatagaaagacgtaagacagacagagcagagaaggatcgagagtaacagaaagaaaatagaaataaaggaaaaggaaaagaaaaataggactattcctacctgtgcgccatcttccctctaaaaagtctattcgatctcctctacttccatgttcaagcccagacattaatccttctatagaagtctagctgacctctatttctttctaggccagagaaattaatttctcggtaaaagtctatcgaagttccctatattttctgaccaggcccaagacttcaatcctctgtacaatcctccatgtttagacaaagttcatatcaggtccctctactaccccttagggaaaagtctgtacttaccccaacaattttctcagcccaacccgaaggaccaattcccacgagtccgcacacgccaaccatcagtaaaggtctactgctacatcgccgacattggtagacgaccggacacgtaccgagtatcaacggttatttatgtaataaatgtcgtgcaatcaattctactcattccattctctccatttgtaagagcaccagggggaaaaaaataatccggtgccatctaacatttctagttcaaaatgtcgatccttggcacttggcggaacttttttttttccatgaaatcctttgaatgattctttaaacaaaagtatggagtaaaaatatcttatgtaagaaataacataaaccggaccagcttgcgtgcatcaacgcttcgatatatgcacacatataagactgttgttgggcggctgttatttgccgagattccatgtaaaataaccataggacttgtgacgagatctttcggtttgcccaaaacctccatgtcaaatatcccgcttcctaggcatcttgcatttagataggttgcaaaccgccttgaatcaaaagcacaactgcgctagcctccttgtttcagccgctggacctattcaaagagttagccaaagaaatatttatgtacgtagctccctattcggcgtgcccttcagtaaaacgggcatgaatttttcatccgaattctttctaggacttacgacaacccgccatgtctttttttccgccataagtaccatatgagcggctaaaactagaacaagagcatcatacccggcgccgtccaagtgcaaagcacttcctatctcaaatacgactgcttcgtcgtaacccttagcgagtaacgtggcatattcaccatcgatgtcctcgacatttacttctcctttgctatatacgctctaaggctgcgtttttggcatccggagaaaaaaaatccctcgttcgccgcgcgcacgcttctcgaactgctaaacggtgtgtttttcgcaagacaattcggtacaaaagttggttaaaaaatcctactaatcaatttttaaggtataaaataattaacactcaactaatcatacgctgatgactcacccttttttgcgtatattctcttttcccctcctcacaaacacaccgtaagtaacattggcgaagtttgatgcctaggaacctgaatgatatgtttatagcttcacatgctattggaactttagtgaccgttgcgtagactcgtataagaatcgctgatgaccttgtcgaatttgttgccaaagtggttcttacctttgtttttctttgacaacacccctcgacacgtcgttcatgctcattcgcgtacctattgccaaccggacaatgggttttctgcccttaacatcttgcgtacatataaatttcatatcggggttgtggaagtccagatttggatcttgcaggctcagtcaagacaaaggatagcatgcactacggaccgaacacttggcacacatgcatgcaaccaatcaattttggaccatgaagctctcttggccttaggttatcatggtacgtgtttccctatttaaagccccgatgatccctacaaactcacacagcaaatccgcgcgcagtagcaacatcttccaacattgaaagatccctgtccagttcattagcaatggccaaagccgtcgccctactccttgcagccatcgcggcatcggccgtgttagtgcaagtggaatgcgacgcccccgtcgagaagagcttcaacaaggccctcctcgcccctgtcgataagcgcttggatgaggcaactcaggccatcaacgaggccgccgactccgttgtggctgctgccccaccagcaaaaaaggatgaagttgaagctgccacgtggaagcggagaatgttcgcctttgctgctctcgggatggcccaaggagatgagaagaaagttgctgcaacttcacttgcctacaagaaagcagctaaagctgtcctcgatgccgccccagctgacaagtttaagttgatggatgaatccttcaaagtggctgctatggaggtaatcgcatcatgagccacacgccaaccttcaataaaggtctactgctacaccgccgacattggtagacgaccggacacgtaccgagtatcaacggttatttatgtaataaatgtcgtgcaatcaattctactcattccattctctccatttgtaagagcaccaggtggaaaaaaaataatccggtgccatctaacatttctagttcaaaatgtcgatccttggcacttggcggaacttttttttttccatgaaatcctttgaatgattctttaaacaaaagtatggagtaaaaatatcttatgtaagaaataacataaaccggaccagcttgcgtgcatcaacgcttcgatatatgcacacatataagactgttgttgggcggctgttatttgccgagattccatgtaaaataaccataggacttgtgacgagatctttcggtttgcccaaaacctccatgtcaaatatcccgcttcctaggcatcttgcatttagataggttgcaaaccgccttgaatcaatagcacaactgcgctagcctccttgtttcagccgctggacctattcaaagagttagccaaagaaatatttatgtacgtagctccctattcggcgtgcccttcagtaaaacgggcatgattttttcatccgaattctttttaggacttacgacaacccgccatgtctttttttccgccataagtaccatatgagcggctaaaactagaacaagagcatcatacccggcgctgtccaagtgcaaagcacttcctatctcaaatacgactgcttcgtcgtaacccttagcgagtaacgtggcatattcaccatagatgtccacgacatttacttctcgtttgctctatacgctctaaggctgcctttttggcatccggagaaaaaaatccctcgttcgccgcgcgcacgcttctcgaactgctaaacggtgtgtttttcgcaagacaattcaacacaaaagttggttaaaaaatcctactaatccatttttaaggtataaaataattaacactcaactaatcatacgctgatgactcacccttttttgcgtatattctcttttcccctcctcacaaacacaccctaagtaacattggcgaagtttgatgcctaggaacctgaatgatatgtttatagcttcacatgctattggaactttagtgaccgttgcgtagactcgtataagaatcgctgatgaccttgtcgaatttgttgccaaagtggttcttacctttgtttttctttgacaacacccctcgacacgtcgttcatgctcattcgcgtacctattgccaaccggacaatgtgttataagccattaacatcttgcgtacatataaatttcatatcggggttgtggaagtccagatttggatcctgcaggctcagtcaagacaagagatagcatgcactgcggaccgaacacttggcacacatgcatgcaaccaatcaattttggaccatgaagctctcttggcctttggttatcatggtacatgtttccctatttaaagccccgatgatccctacaaactcacacagcaaatccgcacgctgtagcaacatcttccaacattgaaagatccctgtccagttcattagcaatggccaaagccgtcgccctactccttgcagccatcgcggcatcgcccgtgt

SEQ ID NO: 20237 - DNA, 7150 bp, Oryza sativa
agccggaactaggtatgcactggcatgccgaggctcaccgccaccctagccgccatcgccaatgactccggccatctcatcccgccaagatcaccaccgatggcctgtcgccgtcgttccctcttacttttctcttttggctgccaagcctagttcgccgccgttccccgctggcaacggcgacaagttcaccggccgccctgcctctgctccctccagtacctcctcactgacatgcgggacccacatgattaggccctaagaactcacactagtaaatgcttaaaacttgtgaggttgtattgttaaatacctagagaatgacatgtggacccaaggacatgcatgtaaatagattaaagctcaagaactcttaataaagatacttttaacatgtgctaaggacttcggattatatttcttagaactctagggacttttctacaaaagatctctcactgaccagtgggccctatgtgtttaaaatctggaaaaatataaggaaaatgactagagtagatattttacaattgaaaacttgcccaaactagtaaaatacatataaaatccattttagctcatttttagatgaatcaaatttctgtgaactcatcaaattatgaactttaatttagaaacataaaacttggcacttacagtagaagaaatagctctaaaaattcatataagaaacaatgaacatagagcaccctccaacttataaaatttgtagaaaattcaccttaactgtttttaaatgaattaagttccagaatgttcacaaaatcatactctcatttgtcatgaactaaaacttagcactctctgtaataaaaatgtcaccaaatgtttatttaataaaatctataagtaattcattttaactccaaatgtgcaaaactaaaatttattagttttatagaggcatgtacattagtctgtaaataagtcttagaagaaaacatatctagaaacatcactaaaatttgaataatgagttaatattaaagaacggtttagaaatttctgaaattcgtatcaaaatgaatacaactccaaatgaggtgattcagttctgttagattggcaaaatcatgtacttagtttttataaaataaaatatggcacttacggtacccaaaacatatctaaaatttgaaataactaataactactatagcatatcacttagcttgaaaaatttataataaacatatcacttagcttgaaaaatttataataaaatcattttaactctaaaagttatgaaaccaattttgttgtacacctaagaacattaccttcactgcagcaagccaacaattcataaatcatggacctaaaatgcacctaaaggataatagagcttaattaatctagtgctagtattaaactttgaaaattaataactctcaaatgcaaaatgataaaataaaaattctttcacctaaattcatcttagaccagcactaaccacactagtaaactcatacattttagagcattttagatttttgcatgttttggcatttatcgttaccgttatttcttttagatggcaaaatcgttatcgatgaggggtccgacatgaactttatctgaacaaggaggatgataatgggctctgccgaaagatgaaggaccctaaatggacttgtacagagggttgaagtattgggcctggtcagaaaataggggaacttcgatagacttttactgagaaattaatttctctggcctagaaagaaaaggcaggtaagctagacttctatagaaggattaatgtctgggcttgaacagggaagtagagggggtcgaatatactttttagagggaagatggtgcacaggtaggaatagtcctatttttatttttcttttcctttactagcaaaatgcccgtgcttcgctacggtgtattgaactaaaaatatttgtttttaagcgaagttattttcccactgttttggtatttttttgctcgctagaaaaagtctcaaatgatagagagaaatatagtacctcataataaattattattcaatagtgcgttgcaacgggaaaaattaatattattaacttagtaaagtaataaaaaaagagcatccacgttagctcttatagtctagaaattctcatattaatattatttaattttagtctaaatttaaattctatatcatgacaaataaacaattacatttttagtcgaaaaataaatcaatatcttgagaaaactctagccaaatttttagttaattcagtttagttggaattaaattaataagcagtaataaataattaaaatggtactaatgctatttctgaaaatacaaagatgcttaaaattactgagagagaaaacactaattttatcccatcccaaacttacaggcccatttggaggcccaatagtgcggcggcccaatgtgagaggagccgaaggcgtccgatcgaatggacggtctagattgatcccaacctataaaaatatctgcagccaaaaccctaaccctaaatttcatttcctccctgcccccgatcccctctctctctctctcgatcgaaaagcgacgacggcgccccgaccccccacgagcgactgtggcggtgcccttcccccactctccacgagccgctgcggcggtggcctccccccaacgagcggctgccacggcgtcctccgccccgtctcacctccctcaccggtagccgctccctccggcccatctcgcctccctctccctctcgtctcctctcgcagtggcggcgggttggcggcggatttgaggatggtggtggcgtcgacggcaggtgtgggcagatctagcggcggcggctccctccgccccctctcaactccctctcgcggcaaatccggcggcggtggctggatccgtcggtggtggcggcaaccgtgggcggattcggctactatattttcctctatcatttgagactttttctagcaagcaaaagtaccaaatcagtgtacaaataacttcggttaaaaatatatatttttagttttaatacaccgtagcgaagcatggatattttgctagtaagataaaatgcacggtagatgaagagtcgatttggccaattaaaaacctacttattcatctgctttgctgcattgagatttgtgaagatagagctgatttctgtaatttcttacgtgggtccaacaggtgatgctagcggtgcacttcgtttttctgctgcacacgcgtccacccgagccgagagcccgagagagcggcgcctcgaattcctcgattcttccgccccgctcttatcctttccctttccttctccaatctccaccgcccgcttatttccttatctcttccgcacgcgctcctctcagccggcgacgccatccctctccctccaccaacgacgccgctccccctcctgcttccctcaccaatgacgccgctccccataccccttagccgccctttcccggcggccggcgccctatccttatctcctcgtttttcccgatcaatttctcttcctctcactctcggtctttctctcctccgctgctagtcctctcctcattgcgccttctttcctttccctctttttcttcttctctccacacttccacagtcgacgacaccctccatctccgtccctcccactccccccacggcggcgtcgctccctgtacccctcagccacggcgccctctccccagccgacggcgcccttcccctggtagcggcgccctacccttggcggccagtgcctccgccgctgcgccctgcccccggccggcggcgtctttcacccggcgagcagcggtgcgcaacgggccggggagcggcggcccgcgaccaactcctcggtgtcggcggctctctcctcccgcgagcggcaacgtgcgtcggcgcctctccgcccctcacctcctctcccttgccataatgccacgggagggctcgacggtggcgggcggtggcaggctgcggcgccggcccttccggcgggtagggaggcggtgggcaggggcggtgccctcccctccgccggatccagcgggagggaaggggcggcggccgggcatcccggatccagcgtgaggggaggggatgggaggagaggcggtggcgacccggcggacggcgtcccagcggcggcggcgccctcccctcgccggatccagcgggaggggagccagcggcggcccgacggcgacggcggcaccctccccttcctgtgtcggcattttttttgtttttttagggaaagtgtcggtattttcttgtgttcttgttgataaaaatctgttcaatctgttcttgtcttcttgtagtagtgttttttctaggatttgggtccaaatttgatgcgtactcggattaaggcgcacgggggtaggctgtgaaggccagtaccgaggttgccaccgtgacctttttctttcttcgttttttttttaccatcggataagggttgaagcgggatagatcgcacgcgcgcgtaggaaggattttttttgtgacggacgaaacggacgatcggaaaccttacgaattttttaagtaggtatagatttctattttctttctgttactctcgatccttctctgctctgtctctgtctctgtctcacttctttctctgcctttttcctttgctctgtctctgtttcttttcactcacaggagggggatggaggcttggcacatggtggcagtgggttgaggccggtcggctcagtagggaaggggagagaaaatccaccgggagaaataaaattgattcctaaaagaaggggctgattaataggtagttttaattatttgggtgatgtgtttcatacgcttggtgagcataacagggaagggaaatgggcaactaaatatcctaaaggctactgcacaatcaacgcaatcaatacaacgctgcctcatataatgaaaattcgtaacatgaagcggatcatgctcaatacatcgtctacagcatgcatctaaggtctttgatcggttagtatttgggttgactctattatattatctatctcttcattcttaatccttataggctgcataggattatttgaatattgaggtgagttgagatttgataaatacatttttcaaaaatacttgggatagggaagagcagtaagaatctatgcttttatcaaaataatttttcgcaaataattgtctaaagggtaatgggctatactaaaccaatcctagatcttaatggtggtcgcaagggtccttaggtcctgtagtcgtctagctcaagtaccatgtctgtagggacccccggttttatacaccggtaatcccatgtgttaggtagggaaaactccctggatcagtaggtggtacacgcatagcacataataacatcacaactgacatcgtttacaaatgtttctacaataataatataagggtaacctcattgggtcccgaaatagaccaagcatggtcacttacaatccaaaataccaaagcaatagataagagtggaagcgaagcagcggcggtccatcgaactccataagcaacaactggtgaacctatggtccctaatccatcatcttcaacacgtacttgacaacagcatggcataaatctaatcgacgccaactcctttctaaaagatttaattaagcaagggtgagtacatacgtactcagcaagtcaccactacaagatgaatttaatgcacacaggggtccaaggatggcttggtttatttgcataaagctagttttcacaattcatttcacaaacctattgacctagcagtttgaactgaaaaacatcgttattgttgaagttgtaattatccagggttcatccacctccccaagcctcgcttggctcagtttaccctcacatttcatcttataccaactccaccatatatataaaattatagggttcgttttaagtttatatctaggcctttacctttccaacactgcactcatcatcacattcatacaaaacctacccgacttaggtgccgccccacgagatcttcctaatccgccggtctatacccactaaagaaatgcggtcgtactctgttcgtttcctgtatagcttcctaagtcaatccttaactgaccagggtcggcgactaaccgtttccagacccacccatattctattcatgccgcctaagtcgaaatagttttgttgtattaagttttagttttcgcaaaaggtttgtgtgtggtgggtggcgctcatgtctcaacccgtaaatcatcaatcactcacatcgagtgatctcacatccatagtcatctagcataaatatggagtgtaagtatgtctacaatagcattaataagcattgtcaataattgaccacatataaataaatgactcaggtattcaaaggcatacaatatgtataaaggtaatcaatatcaagggcaggctacattcaattgtaggtacgcaatttataaatagcatgcgatttatttgtaagcaaaacatttagatcaatatgtttaaggtagggagcgtaatgacttgcctttttttttttgagagggcgtaatgacttgccttgctatcggtactaatggtcttcgaggtatccgcaacagttagacaattagaaaactccatatgcgatcagcaatagaaaaccatatagaatcctcctaatgcagtactgaatacctcaaactaattgtgccatttggtagatcaagatttgagatgaattccagaagttgaacgggtctaatcggagttacggtttgaatttccaaagtctaaaggtttataaaccgaggagggagtaccatcgggaagggaggtgatttagactttctgagaggactctgggttgcataaaggaggtagtgtggactctggtggatgtgggtggaggctatggtgggctctatctggttatttcacctatagactttcataaaggggacatcctcatgggttcggcctagggaagtataaggaacttgttcggagggatgaaggatctagtagaaggtacatgtaagtgactcctaataagtctaaaagttggtttaataagggattaaggatggctggcccacatgtcattgagctactataaaagggactaggaagatcgtcactatgcatgagggattgattaat

SEQ ID NO: 20238 - DNA, 705 bp, Oryza sativa
tgcacccctttccctctctctttacatcggattcgctcggatttattcccgcaaagctcgccggcgcatcaatggcggccggatcttccgcggccgattccccctcatccggccgacctttctcactcccgacgctatataaacgtttcccgtgcctccctcctccgtttccgccactcgccactctctctccccgtcggattcgagctcgcgccgtcgccctctctctccgccgtcgccgccgagctccggttcgccgccgtcgtcgccccggacctcctcccgcttcggcatcgcctccttcggcttcgccgcattctcgtcgacctcgtccacccctccgtttcgcccgccgaccgccggaacgccgccgtcctcgtcgacccgagccgcgccgccgtcttcctccgctccggtcgtcgtttccgccgccctcgtcgtcccggggtgagccgtggaccgcccctttcgcttcccccttccctcctctccctcgggtgccgctccgccgcgccgttggtcgccggcggcgaccatcggggcgcgggcgcgccgcatcccgtcggccgtgccggcgaggtcaccttcgggtgcgccccgcggctgccaggtgggcccggcccgtcagccgcccgcgcccgcgggtgcggctgacgcgtgggacccacggcgccggccggcgcacgccgcgtgcgcccggtccac

SEQ ID NO: 20239 - DNA, 642 bp, Oryza sativa
gcttgtggtatcctaagggttgtggctttgagcttttaggctattccgattcggattatgccgggtgtaaggttgatagaaaaagtacaactgggacttgtcaattccttgggcggtcccttgtttcttggtcctctaagaaacaaaattccattgccttatccacggccgaagccgaatatgttgccgctggttcttgttgtgctcaactcctttggatgagacaaaccctaaaagactttggctacaacttcaccaagatcccactcctatgtgataatgagagtgccatcaaaatagccaacaatcccatccaacactcaagaaccaagcacatagacattcgccaccacttcttgagagatcatgagactaaaggagacatatgccttacccatgtgagaaccgaaagccaattagccgacattttcaccaagcctttagatgagaaaagattttgcgagcttaggagtgagctcaatatcttagactctcgtaacattaggtgatgggtggttggctaattcatagccaaacatgtgtcactaaaatgtaaattaaaaaaaagagcttttgtgtcttgagatcacttcttgtgtagaagatggtcttgataccaggaataaagctcaaacattccct

SEQ ID NO: 20240 - DNA, 14427 bp, Oryza sativa
gtgctcctctcggcgattttctcttccaaccgtggaaatttgattcctctccgtggaaatttgattcctaccacattggtggctaggaggttcatcccgcgatcgatttgcgatttcccctctcaaggtagcacttttgatcttctcttttggttcatcatgtttttgccccgatctctaaatatgtgaacctagggagaaaaccttttggatagaattgttcctgctaccttgtagattgtcgatctataggattgtcacatgcactggcctggttaaatcctctattcttcagttttgcaggccggaaattccggtgttcttggcccggaacttccggtctctgtccagccagccagtaaccttgattttgctactgtttcatttaaccattgcactccaaccttgttgattcttgttgcagtggtcattatgcctcgtgagaagagacagaagctttctcaagatgttcctgctgactcaagccccccggttcgtggtcctagggggagattgggcaaagaaaaagttggagatttttacagtgggagtcagattccgatccattccaggagggctagtagcattgtcattcgtgatgcaccccgctctccctctccagctgcatctgactcagatgatggtggcaatgaggatgagcctggttctgaaagcaatcctttgaggctatacaagacaagggctgttgatcctgatcctaaacgcccaagagtgaactatctgaagaatctactcaagtgtggaagggacagaatggttagtcctgatactctgccagctaactctcaggatgacagattcaggaccttggtgtaggttgattggtataactctgtgatcatgggaagatctcatccagtggtagagatgaagtggctagactggcagtacatgtcctcaaagaacaacatagtcttcaatgaggtacgcaaggtgtgtgagcgcaagcacgtggcagatttgttggccttgcagtattcctggaatgaggaagtgattggacagttctactccactgctttctttggcaccactaagaaggggcttgattttgtgaagtggaccattcaagggcagcagtatagggtttctatggcacagtttgctgcagctttggggttagatgatgatgacctgagtcgtccacatatctttgtagaggatgctctgtcaccgaccagcactacctttatgtatgagaaggatgctcccaaggattgtttggggactactcgagggttgcgtccatattatagagtgctgtactctatcttcaggtggtctttgctccccaaagtgggagatgctacagctcttccaggtaggcatgcactcctccttagtcgcatgcgctataacaagcccgatttcagcatcatgaagcttatctggagtgagatctatgagacagtgtgtgagccaaagagaggcttcatctatgctccttatatcatgaagatgattgaggccaagactgggatttgttatttcaaagacaatcaacacaagcctttccgtcctcatgctcccactacttcagctactcctaccaccagagtgactcgtgcttccacctcagctgctccttctttctctgctgcacctcagcgttctgagtcttcttctcccataaagaaggctctcagggctatcttttgcatgtgtgccaagacagctaagaggtaaagaagatagagaggcgtcaaaaggaagattggattgcaacaggcaaggatgtctctgacatttctgatgatgagtttgttgatccttttgctgcttatgagactgctcgagacattgctagtgatgagggtccctctggcacttctcgtttctttaatgaggagtcctctcactccgaggagagcagtgatgatgaggagtcagatgcccctactgagaatgctcctacagatcccaatgaggcagtggatgccgccgggcaagacatcgactctcctcactctggcgacactgagatcattccttctgatggcgataatgatgaggcttgatcctcttcttcccttgtgattttgtctctttttagtgcattgatgtcaaagggggagaaaattgcaatcgaagggggtcaaaattttgtttttgatgcttactgcctgctgtctgtttaatccggaagttccggatcctcttatccggaagttctggacctggcagctccctcgccttattgtcatgtcagcttgtccggaagttcctggtattttatccggaagttccggaccttgcaatcctttggcccctattcttaagaactcatggacatgttctaattctctatttgtgtgaatgtaatggctgttagatgctcttagctgccctttatttatactcctcttcatttatgctatgagtgtcttatttgttgtttgtgatgtgatgttgattttatctttttgagtgctcaacgtgtcgtatcttttgcatataatatctattcttactgctttttgcatcccacgaatgagtagggatgaaggaaactctcctcggttgctcccttatatatatgcatatgagctccactcatatcttccatatgcatacattaagggggagtttcattcacctctaaccattcaaaacaaaattcttatcaatcttttgtaagctttaaccatgttatcatcaatcaccaaaaaggaggagattgaaagtgcattaatcctcctagtgggttttggtgattaatgacaaatgtggttaagagactaatgagctcattgagtagctttcaggtgcattagtccaaggtgtggaagatggatgcttggagaccccccaaaaagtacaaaatcaaagcggaccagaactcgagaagtgcataggatagtttatcttctgaaatcgagtttttaggaaaaaccgtactattaagaggggttccaggtgatgctctgagatatatcaagtgctcttagtgtgaaccaagtgtcaagtttccctaggagttctttttttttttgcaaatactccatctgtccaaaaatgcaagtccggaacttcctgtcttctaggtctagaagttccggtcttgtgaaaaagattttcctaagtgtagtccggaagttccggtcttccaggtccggaacttcctgtcttgtttccagttcaaatttgtgagtaacggctagatgacgtcacctagccgttatacatatacagttcgtttccagctcgttcctcggccattccactttcacttttcgaacctagagctattgctagcctctccgaagtgtttcttgtctttccactgaatctagagcctaattcttgtatgaaagagagattgagagggagagaagaagatttggagaggtgtgaagactaggatcttgggtgagcacttggaatatctcgtgggttgtcatctgagtgcttattactcttggagatgatctcctagacggttaggtgtcacccgcgagaatccattgcgtattgtggatgtcccgggtaagtttgtgaaggatttcctctcctccaaaagggaacgaggtaagttagtgaagttcttgtgctgagattctagaggctttccaagtatagcaacccacacttgtagtggatttctagaagtaggttgagttggatcttggtggtcactcaattctagaaatttgcctaggggtgtttggggttgaaggctgtggatttccactggggtttttgcacaagtgaggcaaggggttaatcgagacccagctctttggagctcctcaacggagagtaggatcgcaagatccgaacttcaaaaaaaaatcgctcttgtctctttctgtgatgtttctgtgaatgattctgtgatatatcctctgcttagaatacctgtgcaccatcttgtgaagattggcttagtctcctgtttcgaaatttgaatttcatctctgttttgttacccggaagttcttgtcttagaacaccggaagttccgggcctggcaggccggaagttccggagttccttaccaggaagttccgggtctgtttgaattttaccgttgcgatttgtttttaagatttcagggacaacctattcacccccccctctaggcttcatcagcgcgttcagtgcgaccgccgctgtggaagccgtcgttgtcgaggacggcaacacctggaagctctcgcgtgggggaggacatggggccgagggatggagaggagggcgaggtcgaagcagtcttcctcggcagtccgctcctctcagcccgcgtcgagaaaggcggcaagccgcagcggagcggcgggcagccatgccagggattgctttttcttttctttttttttgcgcgatggcagattgacgaataacgagcagtctcgttcgtttttgtccctccgcggttgctcgtaaatgggctgaatgggccgtcctcgccacgctcgtgcgatgcggaacgaaggaagcagcagcgccgtgagatgccgatcggatgatggatcgacgctggatgtccctctgacattgtgcgcctaacgtcagacgatctgcttcccgtaatctcgtatactcatgggcacaatacagtgacaaaacaatcgcaatttggccgagtttagtttcaaactttttcttcaaacttcaaaatttttcgtcacatcaaaactttcctacacacataaactttcaactttttcatcgtatcgtttcaatttcgaccaaactttcaattttatcgtgaactaaactgtggagattatggatatcccatatctacacggcgatggtatttggactgaatataggataccgaatataggtagaatatcttatttgtatctcgggtttgtttcttaacttgtacatcaaggaaacaccttgagacttagtcggttacgactgtattttatctgtatctgtatattccgttagggatatagattatcttttgtaacacggactccttcccatatataaggggggtccgggtgcctctaggggcagaggttgattttctccaaatcatacaatcaataatacactcggcggattcatccccggacaggagtagggtattacttcttgaataagaaggcctgaacctgtataaatcctttgtctccaaacccatacacttttccagctagatagccacccccttttattattgccgaaatctagtttcgacagttggcgcgccaggtaggggtagcgtcaagcttttcgccgatcagtgcaatgggttccgtctccggcatcgacgacctcgtcttcccacccgggcagacgtttcggttcggcagcctcgacttcgtcaccaacaacttcggcaagatctctctccttgactcggtgtcagtccagtcgggagagaaccagatttcagtcccgtttggactcccaaacgcggctgaaagttacttcaagaccatctcaatcgagtcggcttcaaaccactcggctgagatcgcatcttctccaacgacaccagatcgagatgatggggcttacccaccggtcctgatgaagctccccgacgatttggctgccatctccatcacgacagcgtctccatcccgcaggcctaggcggaagtcggcttctacaccgatttcgcatgcttcagggaagtcggcgtcatcctccaaccactcggcacggtttcgacggatcagctggatggctactacagctctcccaccgtcgactcgcgccccaccgacatcgtggagtacgacgagtttagctctcgctacaacgacccggatctcgacgacttcgatgaaagcctagatgacaactacacccctctcttcttcggcgtcttcatggccaataatgagacggaggagcaacgccaagcccgggagaccgaagtgcgtcgcgagactgagcgtcgccgactggaggaggagcatcaagcacaagaacaagaacggctacggcgtgagcagcaggagcgtgagcggactgcgaaggaggctgaggatcgacggcagcgagctttggaagcaggacgccgagcgcgtgatctcatcggtcagcaagatgttgaagggacaccggtttttcgcacccctcaacagaatgcggttgccgcgatcaccctcctcgacaccctcctcaaggaaaacgagctcaatcaatctgatcacgtcgtcaacatcctgaaccagacgaagaccatgattgcagcttcggtcccagttaactccgaaagcgtccacacgccgactggcagccgagtcccccacttccgatctcatgactaccgtcatccaagcctcagcatcactggcgcaggatccaatcgcaggagcaggggtcacgacgagcggtccattcactcacctcccgaccatcatagggagcgccgagtggaacggcctcgctcaccacctcgtcgtcgccccgtcgatcttcgcgacacaatcatacagcgccgagcagctcgaggctatcatcattcgccggaccgccacgacgacgaccttgacggagtagcagccttcaccgacgacctgcgtcgagtggattggccagccggcttcaaaccgactggaatagagaagtacgacggtaccactaacccagaatcgtggcttaccgtctacggtctcgcaatccgcgcagcaggaggagacagcaaggccatggcgaactatttaccagtggctctagcggattccgcccgatcttggctccatggattgccccgtggtacaattggatcttgggctgaattacgcgaccacttcatcgccaacttccaaggcaccttcgagcgtcccggcacacaatacgacctttacaacgttattcagaagtccggggaatcccttcgagattacatccggcgattttctgaacaacgtaacaagatctccgacatcaccgacgacgttatcatcgccgcattcaccaaagggattcgccacgaagaattggtcggcaagttcgggcgtaagcctcccaggacagtcaagcttatgtttgaaaaagccaacgagtacgccaaagctgaagacgccgtcaccgcatcaaagcagtcgggtcccagttggaagccaaacaagggtacgccggccacgggaggaggtggaagtaacaacaataaggaccgcaagcgtaagcctgtggaacttgttgcaaccgccacccattcttctcgacagcgttcgcgcgttaacacgttcgacaagatcatgaactcccaatgcccgcaccatcctaactccaaccacgtggccaaagattgtttcgtctacaagcagtttgcggagcaatacaccaagactacaaggaagaattctgacgaagaacaaagcacgtcgaggaagaaggacgacggtgacaccccggcaggatttcaagaccaccgcaaggagctcaaccatatcttcggcggccccctggcttatgagtccaaacggaagcagaagttgactgaacgggagatcaatactgttcagcccgacacgccccagtatcttcgatggtcagagattgcaatcaagtttgaccgctcggatcaccctgaccgagtggtccacccggggcggtaccccctggtactagacccagtggtccgtaatgtcaagcttcgcagaaccctcattgacggtggcagtgcgctcaatatcctcttcgccaagaccttggatgatatgcagattcctcgctttgagctaaaaccaagcaatgcgccttttcacggagtaattccaggattatccgcaactccactcggccagatcaccctcccggtcacctttggcactcgggaaaacttccgcacagagaatatcagctttgaagtcgccgatttcgagacagcataccatgccatactcggacgcccggcgttagccaagttcatggccgtcccgcactacacttacatgatgatgaagatgcctggtccccgaggagtcctagccctacgaagcgacatcaagcaagccgtcacatgcgacaaggagagttgcgacatggcccaaacccgcgagatggcgtctgcccgagaggatatccgactggctgcagccacggcgagcgaaggagaagtgcccgctaccaagatttcaaagagtggagaaagcgaagccaagactaaaaagattcccctagatccttctgattctactaaaactgttgtaataggcgccgagttagattgtaaataggaaagcgcgctcatcacctttcttcagaacaataaagatatctttgcatgtaaaccatctgatatgcccggtattcctagagaggtgattgagcactccttacatgtcaaagaagatgccaagcctatcaaacaacgactccgccgattcgcacaagacaggaaggacgcgatcaaggaggaattaaccaagctgttagcagcatgcttcattaaagaagtccttcatcccgactggctggcaaacccggttctagttcggaagaaaacagggcaatggcgcatgtgtgctgattatactgacctcaacaaatcttgccctaaggatccttttgggttgcctcgcattgaccaggtagtcgactcgaccgccggctgtgagcttctcagttttttggactgctactcggggtatcatcagatccgactaaaggaatccgactgcttgaagacttcattcatcacgccctttggggcatactgctacgtcaccatgccgttcggactgaaaaacgcaggagcaacttatcaacgtatgatccagagatgcttctcaacgcagatcggtcgcaacgttgaagcctatgtggatgatgtagtcgtcaagaccaagcaaaaggatgatttgatcttggatctagaagaaaccttcgcgagcatccgcgctttcaggatgaaattaaaccctgaaaagtgcaccttcggagtaccgtcagggaagctgcttggttttatggtgtctcataggggcatccaagccaacccggagaaagttaccgctatcctcaacatgaaaccgccaagtacccagaaagatgttcagaagctgactggatgcatggcggcgctcagccgatttgtttcaagacttggcgagcgggggatgcccttctttaagctactaaagaaaacagacaacttccagtggggacccgaagcacagaaggccttcgaagatttcaagaaactcctcaccgagccaccggtcttagcctcaccacacccgcaggagccgttgttgctgtatgtagcagccacctcccaggttgtgagcacagtcttggtcgttgagcgcgaggaagaaggccatgtccagaaagtccagcgaccgatttactttgtcagcgaggtcctatccgactccaaaacgaggtaccctcaggttcagaagctgttatatggtattctaattactaccaggaagctatctcactactttcaaggtcactcggtaacggtggtcacatcattcccactcggtgatatactgcacaaccgcgaagcaaacggacggattgctaagtgggctttggagttgatgtctttggacatatcattcaagccccgaatttcaatcaagtcccaagcgttagctgattttgtcgccgagtggaccgagtgccaggaggatacccccgcggagaagatggagcactggaccatgcattttgacggatcaaaacgactttcaggcactggagcaggactttccttgacagccgatgatttccttgacagggagaacgccgtgcgccaccatctccttcaggttctcctccgtcacgtcggacggcgcccattggccttcaaagctttcgcccattggccttcaaagctttctttttcttctgccatcgattttacccgaatgcgctgatttgattcgagggatggctggggagaggtgagggattgaggcggtggatcacgggaaggattttgatgaactttttgaaggtggattcgagtggaatggtgaaccctagtttgccggcgcagctctgtactgtagcagggattggggaaaatggcgagagttccggcggggaagacgaagcgtcgcttcaatctcgggatttcttgttaagggtatcggaggtgcgaatgggcttaggcctgaacagtacctcagcccaatacttttgacagcgtggcccattgtgttccttagagacttaggcattttttgctttggcaatttatgcgcacaatagtgttgcccaatgctgataaaatccttttttatgcggtcatataattctttggaattattgcaatgcaaattaaaaggtgcccgacagaaaggcgttatgctgtttttgtaagcttttttaggctacaaaagctgtctgggttaacttggaatggcttgtttttaccatagtcatttccttggtatgttatatgcctgttttcattatggtaaatagtcatagcctaggctattagacttgttcattaccataatttttataatacttggtgggtaatctttagagttttttattcggatgcctgtcaagtatgttcattcgtggaccttttagagtgttaaccactcggattccttttattatgaccaaaaagcagtcggcaagaatgcctctttaggcgccgcgtctgcttttgtcatatgatgcacgattgtgctattattttgttctcaactatatgtttagtttgttaactaatcacatagttgggggctacacctaattaggtgcatctattcgatgcaccatattctttattttttcgccctttacagtcttcgtcttcgctactcggcaggccttagcatgaaaaatttgaagcactcggattattatctttgagaaggctatgatggttgactgcaaaggtctcgggggctactgtggagattatggatatcccatatctacacggcgatggtatttggactgaatataggataccgaatataggtagaatatcttatttgtatctcgggtttgtttcttaacttgtacatcaaggaaacaccttgagacttagtcggttacgactgtattttatctgtatctgtatattccgttagggatatagattatcttttgtaacacggactccttcccatatataaggggggtccgggtgcctctaggggcagaggttgattttctccaaatcatacaatcaataatacactcggcggattcatccccggacaggagtagggtattacttcttgaataagaaggcctgaacctgtataaatcctttgtctccaaactcatacacttttccagcttgatagccacccccttttattattgccgaaatctagtttcgacataaacacaccctttaactactccgtacactactacacacgccagcagtgatgtgaagcacagcaggtgatcggagagaccatctctaatactaggcctctacactcttacttggccacggcgagttctcgccatggacgacgcatcgattagtactgtaaagcctacgcgccggcgccgaggcgctgggtggcaaggtcgcagcgcgctggcgcgaagccgacgcggccgttctggaggtcgtactccacccacacgttctgctggtggtggtgcccgatcacgtacgccgacatgccggccatgtccgagttgccgaacgtcaggcaccacaccgcctccgcgcccccctcgccgcgccgctcgcctggcaccatgtacaggagcttctccccggacacggccacctccgcgccgcggagtacgaggcccacctccgggaggaggccgctcgccgccgccacccgggcctccggcccgcggaagcacgcgtcgaacgcgccctggaacacgaaccctggctctcccagcggggccaggagcaggcgcgcctggctcgtgaactcggccttgagcgccgcgtaggcgtcggcgaggaggaaggtgaactgcgtgccggagtccaccattgtctgcccggcgccggtgtggtccggcgtgagcacggactttgggatggggagcagcgcgcagccgacgcggatgccctccagctgcacggagtatgccacccggtcgaagtacggcagcggctgggagatctcgatcagcggcgtgtagttgagcggcggagccacgccgccgtcgtcgccgaggaggaggacgccggggccctcgcctggggcgatgcagtaggcgaagcgacgggtgcccgtctgcgtcacgaaggagagggtgccccggttcatgccgaggaggccggtcgccgcctccgagacgtccgtgccggtgccgttgctgttggtggcggtggtcgacgagtaggaagtgatgcaaccgaagtaggcgcccacggccacgggcggggcgccgccagtgaggaggaaggtgtcggtggcgaggaccccgtcggccgaggaggcgtcggcgtaggagagggagacgcggcaggcgttcgacggcggcgtgtcacagaacggcgggacggggaggtcgcggccgcgccactcgcacgccgtcgacgggcaggggaccgcgccgtacgaggaagaacccgacgcgttgaacgccggggtcagcggcggcgcgtagctcccgttgcagagcagccacgagagctcgctgccggtgtcgagcaccatcgtcacgttctgcggtggcgtgccgacggccaccggcaccgtcaggctcacattgtgccggaaccggagcctgttcgccgccggcgcctccaactccacctcctgcacccgcacctgcagcgggaggaccgtgcccgccggcgacctcccttctccgccgctcgcaagaaagacgcagaggcagagcagaacaagagacgcctccatgacgcgcgcgcgcggccggccaacgcagccacccttacgttttacctctcaaaagcgcgcgttaagcgagaccaaactctgcaagaatgcaaacggcaacgcactctggttaattcatcggatgcaccagcatccggcaattacaccatcactacaccttctcctcctcctcctcctcctcgtggcatcgacatctccatcattagcgtcaccttcgcgagcgttttgatctttgcagatgtgtgtgtttggtgtagcagagcagtagagcagcacagtacactacgcctactcgccatgttgcatggtcctttccttcaccctggggcgggctggtcccgtgcgtgcgtgtggggggctctgcagctgcaaacatgtacaggaggtgaagtactacgtacttctacgtggagggatcacggatctcatctcataaatacgctagtccggccggggcagcgaggactttcagcacagatgctcgttgtcgatggcaccatccgttgttaagtttgtcaaaggagatctttctgtgttactattggctccagttcatcctgtctgcggttgagaactcccaggtcgatagctggattctatgccatggaacaccgaaagaccgaacgcactggccagcttgcgcagatgtttcagtgccttgagttcaaaaccgaactagagcgaaacgctactagctgaatcctcggtcctccgtaggggtgagacggtcatgaaaattcccaagcgaatgcccgcttatttctgatttttatcagtcaagcaatgtgaaaatagttacttacagaacaaaaataaaaatgaaaatagtaaattatatgaataaagaaatgaaaatgatttctctgtttaccgacgtttccaaattttaccataattataaatttttatattatagtaattaccgttaatatttatggtccgtatttgacccataatttagaggcatgttaacttctcaaccaaatccctaacttaaatactccctccatttcataatgtaagagtttctagcattgtccacattcatacattcatatggatgttaatgaatctagacatgtatatgtgattggattcattaacatccatatgaatgtgaacaatgctaaaaagtcttacattgtgaaacggaggaagtacatgattaaaaggaagtcaatttataatttatatagtgcaaccttgaatttattttggttggaaaattttgctacataacacctaaaacttgtctaacttgctgatagacatcgaaaaaacgtgtcatgactaaaagacatccaaaaaactggtggtttgccagagaacaatttcgaatcaattgaagagataattttttaagaaagacgagaatgtatttagtaccacatacttcaaacaaggcgttaaaataaaagtttagaaattacgcaactctaaatttgccatcacttcaagtacatcactagcatatatcgtattccttattcactccatcctcagatcaaaagctttcgatcttaggggttttctcgtccttttgaagaattcatttctccaattgagccaaaagtatcttctaacaaattaccatttttttagagtgtcttttagccgtaacacgtttgtacgatgtttcccagca

SEQ ID NO: 20241 - DNA, 1914 bp, Oryza sativa
tttcatgcctactcctgagtcatgaccagcttcgctacgcgcctacgccgaatccagagcccagcatgatacttgttccatgggggccatactgatcatgagatgccgacgggcgccttatgatttttgcgtcgcatgtggcgtgctccgcgacatggaccggatcactgcactggacgggatcgatcacactgggctctttgattattggctttgccaactctagctgccgagatgggagattgggagcacgtttcccttacgtgaaagtaaagtgaactcctcgttgttgtacgaagcattcgcggatctggccttctccggtctcccggtctcgtcccttcggcgtactcctctctcgatgccgtcacgcttgacgacaccaagagaggaggacagaacaccgtgcagggagaaaacggcctgtgccttcacgtacgcacagtacgccgctaattttgattcttcgagattaaaatggaaatccttgtgtagacttggggtattccacgaaaatcaaatctatcatctcctatgataaatggatctaatacgagatacaatacatcttagtattatcaatgtgttgactcatgatattgcacataaatcaaatgtattcctcccgtcctataataaacaataggatatgatatactccctacatcccataaaataccaacctaatactgatatgacatatcctagtttgtttagattcgtagtattagtgtgcatcatatttgataatatgttggttttctattaaacggaggaagtatcttctaaaataaacttaacaacataatataacataatatgagatgtgacacataatgtgttgaacttatttttatcttaaaataaacaacgagatatgatacattttagcacaatcaatcgatcatataccgtatgttgggcgtatgtagggacgaaggtagtaagagataatgtcaaattcaaagctggaaagtcgccgtggttcggttcggctccacgaatgattagagccgtactacgttggcccctcccagaccaacagacgaccactatcctgcttcatttagcccaaaacagtagccacgtacacggcaatcatgcacagtttttaaagccccggtgcaagccagtctggcacgagggaggacaagaggatgtcacaaagcaagcagaatcatccaatctctccccctgcttgacatagattttgagccgtacttgcaccaattatatgccgcctaatttctgcaatccatcgctggtgattggaggcaagggtacacaatggagggtaattcaatacttggacgctgcaaaatgatgtcggcacgttggggagagaggggccaaaccagcaagcaaagtggagctaactttcagaaaacatggagcctcaccaaagcatttgcaaggacacacgcagggtgtagtagtaggactattggttctgaaatctggagcaaaccatttagaataaccaaaaggctcgcgctgtatttgcacattagcacccgtcgagtccactccgacagtgttgtgttcacagcagagcacctagcccagccatgctggcatgctgccaaaacaatcacagctgcattgtgagtttgatttagattattggacggattattatcactgattatctacttactataggagtaaattattttttaaaaaaattaataaattatcaggattatggataccacatacctaatagtagtagactaaatctcggcaggacccacaacataccatgtcctatacggaaataacatgcggatataggagtagttccggataaggaaagacaaccagagttctacatggaaacgacaaggactactcggattgtatccatattggtttccctagttctacttggacaaggagacacctatgggtata

SEQ ID NO: 20242 - DNA, 2923 bp, Oryza sativa
ctactcactggttctcaactagtcaatcgtagcgatctctcgtacatttccacttctagtggtcgagtttagactacacctggtcctcgaccagcggtgtagcgattctcccactatttctacttctaatggtcgagtttagactacacctggttctcgaccagcagtgtagcgattctcccactatttccacttctagtggtcgagcttagactactacctggtcctcgaccagtggtgtagcgattctcccactatttctacttctagtggtcgagcttagactactacctggtcctcgaccagtggtgtagcgattctcccactatttccacttctagtggtcgagttacgactactacctggtcctcgaccagcggtgtagcgattctcccactatttccacttctagtggtcgagttacgactactacctggtcctcgaccagcggtgcagcgattctcccactatttccacttctagtggtcgagttacgactactacttggtcctcgaccagcggtgcagcgattctcccactacctctacctcaacaagttgatatcaggtacacaatgtcgccaagcattttacccagagatcccttaccacaaagacacctagcgttgaaacctatcctcatgtccctttacgccgtcttgacaaggactccgaggaacctaaggaaacttcggctggggatgcccagagccgataaggccttgtcggatcctgtagagacaaaagtccatgtaagatctggtcgtgtaagagttctcgccgtgcgtattaaccaagccgtataatcagaaattgggttttccaacttcacggctgggggctaggatcagtgcttgttcaaccgaggcaggtcaaaggtccaagagccttatctcccgagaacgattctccgatgacaaggctgggggcggagagtgtataactcaacaaactgactgatcgaagtcggtaaaagagtagacgctcatgtgcaaaacattggtctgtaaattcaattcatttttagtttttcatatatattataacatgtcaccctttaagcgttcgctcgggggctatttctatctaatactcttttctgagtattgatttcaggaaaattctattcgacattatcgaaagctccatgtctctatggttctacaccaagatcgactaaggcgagtacgacaaatattgacaaggctccgtcgcagactctacgcctactcgattactcgagaacggttggtggatctcgacaaggaatacggaatgaagagatggtgtacccgccgagataaacttcttgacttcaatccaaattctcgattacagcaagacgggagacttagtcgtatgctctgtactttcttggttcacatcggagatggactcagacaaaccctttaggtgcctgcacgaggctgataaaggaagtctaacgttatctctgaactcaccgataacggtcacaagagctcgataacagttcctccaaggtctgcagttgagaatatgaactcgctcatttgcattgaagtcgggggctactatcagggttatggataccacataccaaatagtagtcgactaaatctcggcaggacccaccacataccatgtcctatacggaaacaacctgcggatataggaggagttccggataaggaaagacaacaagagttctacatggaaacgacaaggactactcggattgtatccatattggtttccctagttctacttggacaagaagacacccataggtataaataaaaggccccctaggaagagaggagacacgagacaatcaacacctaccacagtcaacatacagggaacaacagaagccacaacatacaagccaacatacgccaagacaagacgccggatattgacttcggagataggtacggctagtcccctgcggtgtctccagatactgtcagtagagacgaaagcgttatctttgatcttgccggacacgaactcgaggaggaaaactaccctgttctcgactatgagtcagaccttcagaccgctatgtcgataacagttagataggcaaccccaaatattgtactggtgcgattatggtgaataagagtaataccggcttcggccaacaggatgtagggttattacctgacaattcaggggcccgaacctgtataaaaatccctgtctccgtctcttttacctcagtctcgtgtatatcctagtaccaacgatccccataccatgcaaataccggaatcgcgacatcaaacgtcgacagtggcgcgccaggtaggggactttggtgcttcaggatttcgacgagatgggtttaagagatggattctccgacaacaagctactcgacgacttcggctgtggggaggtctaacccgaccggagtttgccttccgacgagatcggaaccatcgtcatcaactattcgatccgacgagatcgatcaagcttcaagacgtcaccgccgcggagaacaacagttcaatgttgtcgatcgtgaggccttggcccgattgattactttgaaaccacgtcgccgccaaaaatctaatcagattatccatctacatcatcagaggtaattagtaagattgattattaaattgatctactaattttgtagatacatccggcatgtatctacaaaggtatgcaatattttatatgcaatttaccgtacctatattcagatcatacagcattgtcagatccatgttatgtttacctagagcatgttttttatacaatatctattatacgagtgttttcggtgttaggccgagaacagtttaacgctgggggctcgctctattttcttccgtataaatcatgcttgtttacggtttacataatgcctgatatttacatctgctcgttatatcctgataatgctagaagatccatac

SEQ ID NO: 20243 - DNA, 15739 bp, Oryza sativa
  unsure (1)..(15739): unsure at all n locations
ttgtctgtggctcattcagcagcagtcgttctcgcggcgcacgcgctcgcagtgacggccaggacgaacgctgaaagttgtccaggtccaccgatacaattccaaaaccattgagccatcctgccaagcattttccctgatgagtacttagtaccaaagccagcctcaacctctggtacctaacaggaaagcttacctcaaaagaagatgagcgtccataatggcagggaaagcgaagggcgttctactgctcatcatacatggcctcctggaaagaatgggtccagtcccgattgacctgacaactgcctttcaatcttggtcagaagctcttaggctgagatacttctaaaaatggacccccaaagcttcgaccattacctagaccagtagcagtacagaatacctccatggatgctccagcaggatgtttaatcaaccgacattagatgatgtagaatgctcaacgaacaagagaacagcatttcatctaatgtaggtaacaggcttgtgggaaattcatgtagccctgcaactcagaatttgacaatggcaagatgttaacagatgaacacaattagcaggtgatacttcagaagattctatgaggtttcaactttcataggatatatctcccctgccgacaaaatgcccccacaatgccatcaagtaactgatattaaattactgttaactatagaacattggaaacaaacaggcatcatcctgaacatgtttgccattcaactagagaaccttgtcaaagctacacatgggtccactgaatgtcaacctacagttcagggaaggagtgacgacatggacgttttcatggaaattgtatcacagtttttctatcctggggctaaagaaaggccttctgataactagcaacagaaaattaaccacgtatgctgaaatagcttatctactccagagtaaaccattgagtccgttaacaaagaagaaaccaaacaggtcgcttgataactattcacagccagcagttgatgcaagaaaagtaatgcaactcgttagtattccttagtcactagccaatagataggaatctccaggtgcagaaaacaaccaaacaatcggttccatgagcaaccatgaagtacagttgcactccaggaatgacaaggtgaagaccaagtaacacacgataacactgttaactcagaaaagtatgttctactaactgcacagtttgtgcttaaaagtagtagacacggactatgagccaaagtttttaagaaatgaaaaccatttctatcctcaagtgtgaagagtgaaagataattggcatttcatttctgctgcaggcaataaagattggtattagatgtttcaatattcaccatggtaaaagagatgtagaaacaagcagacaactaaggcatggaactgcacgataagttggtaggaggatgggcaggcaagaaaaaagctagcaggatatgaatattgaacttgagttctgtttgaaatccttctgctctaagtaactttgaagttacttctctgtccaaaaaataatcacagtagagtatgatcaggtatagaagtaacaaaagagaacacaaatataaattggtaagaaaaataagtatgctattgcatgaaaccgagccttacggaaaaaacaaaagcattccatggtaactacatccacataaagcaggataatcaatatgtttcttcttccataacactaagccattaacaaaaggttgctagagaatgttttttgggttgcatcaatccatgttgctactgcagccacataaaccatgcatgattgcaaaatccaaatagacaacatgataaattgctacggcataaccatagaaatacaataaaatgtcattatgttgctatatatcataaaagaacacaagggaaaggaaagcaagcacataagaaacaaaaaggaaatttcacagttaggccaaccactatgcattaacatttacattaagagaaagaaaccacaggaatgaacatagacaaagaatcaccatgcattttgcatgatactgtaatattattgttcaacaaccctgccgcagagggaaatgggaacaatacaacaatactaccagcaactctagaaaagcaccgagtgatgaagaaatagaatagctagacctgctatgatgaagttacacataaaccatgcctgcatttaagcatccatttatgggcacagagcaatctgttaattgttcagagatataggaaaagccaaataatttgttagctgagtgatgctgtaaatgtattatctaaccatattacaagtgtaaagcaccatacaccccagatcccaaataaacccccacgatagtttaactcattgaagaaacaaacctactatcttggtatttcaacattacaaagtacaagcataccacagtcagactcaattatgtattattagtttcactctttatcagaataatgaaaacatgacagggcagcatgtgagacaggacacaaaagaaacaacaggcctgacataatgaggttggcatccctattcagcaaccgtactagctcaagatatgatcaagacattatagtgtcttatgtctagatattgtagcaaaatactatgcgaaacgtattatcaatattaaacaggacacacaaaagcttatattcaatttcaccaggagaatacgaacaataacaaataaaaaaggctgaaattttattagaacaagatattgcaaatcagaaatcttcttggcccaatccagtatatacacaaacagtacagaggtaagaacaacactttgttctctctgactacaacattgcaacaattgatttacccaataaattcactgtcattcctttcatgaagtcctgtgcttcttcctcctaatttgctttccaaactaatttccagttgtttgctattttgctcgtggccatctctaaataaactcttaaaacgggacaaagtggaaaaaaatcgcaaggttttcatttacatcaaaagtcccaagaacttataatctgggttcccttcttatactaaatcctacttattcaccactatcaataggagatcgagttaccgagaaaactgcgttcagccactacgggactgcgatgatgaactctccggccgactgctccgaccaaaacaaccaaacagattcctaaatacacggcgaatccgaccttcgccgccatcgacatggccgtcgccctccggccacgttacccgcctcggcccgacgccgttactgaagcccccatccagttcagtgtagacaaccggaagctgctcccttggcccaccggcgaacctcccgacggcgaatccaccgcgtgggagtcgccagatggttagtcccgcatctgcctccgactcgggggccgcggccgccggtagctcgcggcggcagacggggcatgagttgcggagggagagccagggcaggatgcagtcctggtggtagacgtgcttgcacggcatctcccgcgcggaggcgcccggctcgaacgcctcctggcacaccgcgcagtgcgccccgctcccggcaaccgtcaccgacggcatcgactccaccgccgccttcgacgccggcggccgcggcgccgccgcctcgagccgggagaactggtcgagcaggcggtggaagcccgaccccatgaggaggtgcgacacgtcgccgggcagcggccgcagcccgtcgccggagccgtcgtcgtagtagagctcgaacccggacagggaccctccccggagcacgatcaccgggttcatcgccccgcgccggccgctcccgccgccgccgcgcggcggcggctgcgggaactgctccaggaagccgccgtcgcactccgggcagacgaccgtggacggcgacaccctcacgaagcggctgcagtggtagcaccagtacgacaccggagaagacgccatccgcgccttgaaccaaatcgcccccaaaccaaaccaaaccaaatcgaaccagaaactcaaatcgtctgctccaaaactccagacgcagatcgagacgggaagccgaggcgggatccgaggaatcccacggaggcgaggacgccgaaatccccaatcgaattcgccgccggattcgaattgggggtttcggggaggagaggaaactaggggaggcggaggaggggaattgcggggtgggtgagtgggtgcgccgcttttatttgggacggcgcgtcgtcgcgggggggcggcgccgtcgaggtctgacggcggccgcacgtggagcgccgcgattgggtgggatgtgctgacggcgttagctctgtagagtgacgttgactggtcagacgggccgggagtcaaaggggaggcagggatggatggatgggagcgccggcgagccgacgggttaaacagccgccgcgtggatggaagaaaggaggcggttttgacttggcggtaaaacaagttgagtacttcaacatttttttttgagaaacagtacttcaacaattgtattagtttttatttggattccaacttttttcttcgaacgtccaacttttccgtcacaccaaatgtttaaacacatgcattgagcattaaacgcagacgaaaaaaactaattgcacagtttgcatgtaaatcgcgagacgaatcttttgagtctaattacgccatgatttgataatatggtgctatagcaaacatttgctaatgacggattaattaggcttaatagatttgtttcacaatttacaggcgaaatatgtaatttgttttgttattggtctacgtttaatacttcaaatatatgcccgtatacttaaaataaatttggcacgtgaactaaacacggcctaggtggtactactcaggttcaaaacaaaaagcttttcgtgctaacgatacaaggtgcctttatttttcataattgctacgaaactttcgtaagttttttcctccaaaacttttagatttgtgaaatcagatcactttataatttgtgtataaaggaaaaggaattgctaaaaagaaattttcacacatatcaagcgtaagatctcgatgctaaccaatcaaattatagttgaacacaagtttataagtttatataaattatatcgtagatacaatataattataatgcagttatataattacactttaattatgttatagatgtaactggaagtttttaataattcaaaaaattgataaattttagatactcccttattttttttggcaaatcgatatttataacttttaaagtatttatatggtaaggacatgtgatattatattatatttatattgaaagtacttttatatatgttactaatagcacatacatatatagtccataaaattagtgatcaaaccgtaatattgtaaaatgtgtaaaaatttaatacgtcttatattttaatttaatacgtcttatatttcggtatgaatgggatacacggtaatatagtgttggctgatgaccacttgtggcacgatgttggtcttcttttttccgaaacattggtgtaaacacacacttgttatatgtgtacgcacacttagcctacaagagctatatataacacttcgacagattgaagcaacatactccattttagattgacaaaatcactataaatatctcaacatcaacaaatgtatcaactatcactaaaaatataatcagttatattaagaatttaaacttggatgaacaagtttaaaaagcttaactggttgagctatgcttgatacaatctacaatggtctcttcgatcccttacagattatataaaaaagcatgaaacttaaggatggttgtgcaaaataattactatactgctctaggttcgatggattttctgtttctgcccctgtgatggtaattggagcttaatcaccgtgaaggcatgttctatcatatgctcattattttgcagaggctcatgcgtcccaaaaaataaggggacatgtcggccatagttgacagtgtaacatgggagaagttatgctttcctacgcgttttggcataaaagaagtttattcacatgtagtactagcaacacacagctgtaaaacctaatgcctcctggtgaaaatattattaacagctccagatgtctacgtgaatggccactgttgctgtaacatccctttcgttcactcgctttcataacgagtcagcggtacatgctccctgctcgggtcaaatcctggctcatgatgtatccttccgagtctcttaatcataattaactccctgtgataaacaaatgaaagctaaaggcagctgtggggaaagacacccatcccgcttcgtatggatcaagcagcacaattgacaccgcccatcacacatgccctgcacatagttgcatgccacaaattggccagagtacacagatgccaaaaatcagggaggtttgacatgtgcttcaagtccatgtcaggaatgagatcaaatcgttagaaccgaccaagaaatttcgggggtgtttagatggggctaaaactttttagcccatgtcatatcggatgtttggacgctaatttagaatattaaacataaactaataaaaaaactaatttcataaatgagagctaatccgcgagacgatttttttaagcctaattaatccataattatcaaaagtttactgtagcatcacattgtcaaaatcatggcgtaattagactcaaaagatccgtctcgcgaattagtccaagcttatggaatgggttttataattagtgtatgtttaatactccaaattagtatccaaacatccgatgtgacaggaacttggaataagtcctgaaaaccaaacagccccagattgctgtcatcttcaacaagacatgctacacaacaccatgtcttgtgaacagggcctgttaagaagcttcctctccatcccttgaagtcttttatagtcgctgttattcaacagggtctattaaaaagaacacttcttttcaacacctacagattgaatttcgtgcggccactaggtggaattcaggtactacttatttatgtgttagaaatgcagtcacacgttacacaaaattatttgacaagatgctttgtctagaaaagaaaaatatcacttcaatccaccaccaaacttaagacctgtgatgctccatactgtatcaatcatttatacttcatacaaacatttttaacactactcccttcgtcccaaaataatttaacttaagatgggatatgaccaatcctagtataatgagggagtacgctacatatgtaacaggtattcatactccagcatacagaagtgggtttattcctagggtcttagcttatggaacatagacgtcaataacgtatggcacatttcacaaaagaaagaacacctttttttcatccttccagaaggatagcaatcaaagaataaaacatagatctagctgtggctttcaaggctcactacaaaagtcaatgcctaaccagtccaaatccaacctaaacacaggagcaataatatataacaaccatccagcttcaaaagcaacatgcataattcaacaatttcaagctgatctgatgcatagcttcagttttaacagtatccagattgatacagctcgttgaaccttttagcaagaaagtcgatagctgtgtattagcctcaataatagaacggtgctatttttcagaacagaagatgccccaacaaaagtaaaaacaaatgaccaagaacatgctattgttttatttgcattgaaatgcaccatgttgaccattgaaatgcaccatgttgacaagacaattcaatcgtgaattcatgatacagaatttacgaggcacttctagtacagcttctcacaattcataataagaaaaattgataagaaatgatattaattcgaacaacttatggagaaaaggactatcactctttataatggcatcaagccaatgcaaagtcacatgtcgaatatcgatctgcagtaacagaggaaccctgtgagtgcacaaataacctaatgaaactaattacaatggattcatttatgcacgtgccctcattcatctaaagaacatccaacgaagatgtattccccacacttgttaaagaaaagagaggtttagtatcttatgcaactaattgctatatttacttaatcaattcctattctagcattccctaatgtagaatgtcacaaggttgaatactccaaggtccaagcaaccacatattcagtagtaatggaaacaaaatggtagagtgttctgaagttagacccaatttgacatttttactgctatcaaacttggtttccaaaaaaaaaaaagtacgagtactggtaaatcaaacaagccctaagttagacagtggaagatgtgctcacactggaaaaggaagacgaagtgctgtaccagcaatcagaagttcagaactttcttttccttcccctcgccttggccctcttcttcctcgcttcctctttctgcctctcggcctcctccctctcaaacttctccctctccctcttctgcaggaagtcggtaaccgacaggtagatcacctgcattgccaaaacaaacaaagcaagagcgaagatgaacacaatatccagcaacgctatgcgccaattcatggacaaatgctttaaccgcaagcacacatcacgcaccccgatggtgaggatggagagcccgacgaacgcgacggtcaggagcacggacaccacggtggcggtgacgctgtcgtcatccgccgccaccctcatcatggcctcggtctgctccatgggcgcgtcaacttcccccgccgccgccaccgccgctcggccgcggcgcagcctcgtgagccgcagcggcctcgtcgctccgccgcatctcccaccgcgacggagagcagcgtacctcaggaagagcggcagcggcgtcgcctgagccggggacgacgggaggacggcgagggagagcgggtgcgcgtgcgctgccgccattatcctcgcctcgcgccgcccgaagcggaacgaatggtcggaaaccgagcggacaaaacagctgggccaatccgatcctaaatgggcccgcgtgggccggcccatagggttcgcgtgcggtgggtgggcccgcccgcccgcccggccggccgagtaaattccagagggatccatccctatccccaaccttcttctcccccacgccgcgacgtgacgtgacgtcacgcatttgtcactttctcgtagcactctacccctatctaatccggtgcagcacgagaagaagaaggggagagaaaaatatctcgcgcttcacacgcaacgcaagaactcgacgaggcgagcgagcgatcgagcggacaccggcggcataataggcacgggaaggcgtgggggagggaggagggcgacggtaggggatggccggagatcggctgagctggtcggggctgctgaaatggagcctctcctacgccgacgggacgcggccgtctcgcgccatcaggtgaggaggatttggcttgcggagggttgattgctgttggggaaattggaatgtggcgggttctttttttccgtttcttttcttttctttcttcttgtttgcttgagttgtgtggctgatggtggagagttggttgggggtgtgtgggtggtggtgcgcggcagcgaggaggagcggaggtggttggcggaggcggtggagcgtcacatgatggtggacgtggtgagccgcatgagggagatcgcgctgctcatgagcaccccgctctccgtcctggaggcgcacggcatcacccccgacgacatcgaaggtatgtttcggttgggttgtcagtacagaccagcggttgtggttgatttgaaggattaagcatgaatttgagcgatcaatttgcgattcggatgatgaactaggaatgatggatattcgggaactaggaatatggattcttgactctcttttcttttcggttggcgatttggatgatgaactagggatgatggattttcgggaactaggaatatggattcttgactctctttttttaggtcggccgcggagaagggttcttgtctactgaattctttgtaaaattcgtgctatggtgttaccaacttggaagtgccgggcgtaacatatggtactcgggaaatgttctcagcaaattgaaaattttatatcatctaaaagttacttacggttttcgcaatccgtgcctacttttgagattggcaaggattcgtttttccgttgttctgaaatttcccgggaaggcgttattagagtgcgtctgcatgattgcatctctttgcaagttcatgatattccctctgttcttctgctgaaactgactggagtggatttgaatattgcaggtttactggctgagttgcaggtacatgtcgagtctattgacatggcaaacggtacgtctagccgtggtcctctagactctagagcatcaccattttgttccatgctttactactgttgttcatcatgcttcatctgtgttgtatgttcatcattcgaaagctatgatgcataatcacatatctaccattctatattagcataaccacaaaagaactgaggagccttcacattcacacaattcaagctagggtctggtccttgaacaccattttacaaaatgtacatcccaaacagcactagccgtccaatatatgtgcgcctttgttagaactctccaccaccatgagtttgtactctttgcataatctatgtttcttactattgtattgctgagttgctatatatgtgatctcaaatccattccttaagttaaatctacaattccatctgtaggaaacaaatgtagcacttggaggcatacattactggtgtcaaaatgagtactttcataacattggatgattcaaaggcatttgtagttactgttgaggtggctaaacaaatgggcggaggcaaccatagtgttttttgcaataaaacattgtttttcaggtgaattctcagcttccccttccaatacagcactaatacaacttccaaggggagctgacagatagttgtcggattcctagactcacttcacaaaccaattcaataagacaaaaaaaaagtttgaaatctggaaacaaggagcatgtgacagttaacaaccaaatgttaacatattgtcggtgtgaattgtttcatatgtttgtaactttgtatgcatcatctgttgacctattttgtttttctttagatcttcattctgttggtggcttggttccggttatcaagtacctcagaaattctaatgctcgtatccgagccagagcagctgatgtggtaactacagttgttcaaaacaatccaactagtcagcagctggtcatggaagccagtggctttgatccccttttatctaattttacgtcagatcctgatctcactgcccgcataaaagctcttggtgcactatcctgtaagtatgttgtctatctttttcagatggtgacaataataataataccttgatgttcccctcattgacattgttcccatttcatgttcagccttgattcggaacaacaaaccaggtgtttctgcttttcgtctagccaatggatatgcaggactaagagatgcattgacttcagaaagtgcaaggtttcagaggtactttagtatagttgatctgacctgagccatcttatttagtatttggcaacattgacttcagataagtgaggagtatttggcaatgcttatgtgcttttgactgacacgcatgctgtctcttccaggaaagcactgaacctcacgaattatctgcttagtgaaagccattccggttgctcggtgtttgcacagctaggtttcccgcggcttatgatgcatttggtgtccagtgatgacttgggtgttcgagaagctgcattaggaggactgcttgagcttgcaagggacacgacactgggaagtaggagtctactagcagatcatgacaggcttcgacggcttctccaggcacgtatagagagaataaggatgatggctccagaagaccttgatgctgcacgcgaggagaggcaactcgtagattcactgtggattacgtgctaccatgaaccgtccacacttcatgtggaaggtcttcttgttttgcctggggaggaatgtttcgaacaacctcctgacgtggctggtagattcttcgagcctctgcggcgaagttcggcaaggagagcaccttctaatgagagatcagatccaggagatggaactgggggaggaatgatgctgcttttaggtccatccccaggcagtagatcaaactcggggagtaattgatcactctgggatgtgaattacatggaaaaggagactgggagtctgctgtcctcttatgtacattgtgcagggctagtgctatagagtgttgctgttaaggggctagtaaaaagtaaataaataatttcccagtttcgaagaaatgtaagtggaaaatatgtgtgatgttcagcagtgtataatatgtctgatgtttagcagtgtgtagtctcatttatanncaatagaananntgcgaanactacttgnttgtggntacacgcaagcaacncntnacananctgcantggngntgcgcgngcctgtattacgttatgcacaattgtcaaactgtagcgggccctaaaatagntatagtcacccttgtacatngtttatgttgtcatgtnnggaaggagtaatnnacaggctgnacaattnnatctctttgcatctactatgttcactaganagctatgctgctgcatattcacatttcaacctctgcggggtgtaatagnatctattgtccttccggactatttctgcgattttctgcgttacccccaacctacaaaccttcttgtttctgctcgtctctggctgatcatccccattacaaagaagtctccacccaactatagctatcaagcttcttcagacgccgtctcttcaccaacctcttgatcttgaagacatcatcctgcttgccagcgttcgccagcgcactcgagagcaggaggcagctcgccgcattgtctggctcgactgcaagcaggcgcgacgccgcaagctccgcgagctcgatgtttccatggcttcggcacgctcccagcagcgcgccccagacgaagcggtcgggctccaggggcatcgccctgatgaaaccgtacgcctcgtcgagcctcccggcgcggccaagcaagtggaccatgcaggcgtagtgctccagcctcggctcgacgccgtactccacctgcatggctcggtacaggatcttcccgacctcgaccatgccgccgtagctgcaagctgtcaggacggcggtgaacgtcaggtggtcgggctttgcgccgtcgcgcagcatccggtcgaagaggccgacggcttcttggcagtggccggagttcgccagcccgaagatcatggagttccatgtcaccgtgctcctctgtggcatcttgtcgaatagccggcgcgcttcgagcacgagaccgcacttggcgtacatgtcgacgagggcgctgctgacggtgagctcttgctcgacgccggccacgacagagtagccgtggacttccttgccatgcttcacgtcagcgacattggcgaacgcgggcaggatggtactgatcgttgccgagcttggcaggacacggccgccggcaaccatcattgctcggaacagtgcgcgtgctctgccgtactgaaagttcagtacagagccggagacgcgcgatgtccatgtgaccacgtccggctggaacccgtcgtctttcatggcgccgactaaatcgccggccatcaggtcatcgcccgccagcgcgaagcctgagacgacgatgttccaggtgaccaggtcgggacacaggccgatgccccgcatcttgacggccagcgccagcgcgtgctccgggaggccgtggcgcgcgtagcacgcgagcagcgcgttccagacgaccgggtccccgcgcgacgccatttcgtcgaacaccttgcgggcgctggcgacgaggccgcacttggagtacatgtcaaggagcgcggtggcggcgacggcgtccgaggcgagggcggggcgggtgagcacgagcgcgtggatgaggcggccggaggcgacgtcggcgaggtgcgcgcaggcgcggagggccgtgggcacggcccccggccaggggtccaccgtgccacggctgccagcttggagtctgaccccggtgaagaagaggcggaggacgtcgccgtggtggccttgccgtgaagagcttgtgagctgcctcatccatgagctggttttcgccgggcacatttgccgctgatccgaaccggtgtaacgctgtggctgtgttgcatttcacttcaaatgaaggaaaacgcttcagtctgagctagaaccggacgggatgggagagtagaaccacaggggaatatctttccaaatttcagctaatcaatcaaaaatatacatgaactttgaaatctaaatttcactatagtagctggtcccgttcatttctacaacaagatttggatgaagatcaagatttttgtggcacgtttttttcaaactgctaaacagtgtgttttgtacgaaaactttctatacgaaagttactctaaaatatcatattaatctatttttcaagttcgtaataattaaaacttaatcaaccatatattaataccacatcgttttgcgtaaaacacttcatcttcatctacaggaaaaaagaacaccaagctgatgaggctttagcagctcgggaagggactgaaaacttggaacgacaagaagaaacgcttgacaccagtatgataggtccaaggtttgaattcagcggtgccaaaagattcagataaacaggtgaagctctgagccgacaaaatgcagcaacagataggagtagttaccaacttaccatagttcaactaaaatttatagcccgaatatgggacaaaactgctagaacactttatctaaccaaagcaaaagaacaaaacaaaaaaactctagcactgaaaatgacaggagcaagtacttctgtcaaagaagcaccagactgcgatcaaatcttgcttcctacacaatactaatcctgaaagctaacttctcactttggatggaagcaacattgcttcattatttcagcgggaacagaagttcctattcaagttgaatccagaaacatcaacggttcacacaacatgcantaggtgcttcaggattctatgcctgcaaatgagctaaacagccccctcaatgatctattatccactggtggttgactgaactgttttcaaaatctctcgccaaatctgaagaaaactgttccagtaccagcattgtgatctacgatgtactctccccttaccaagccaagcttgacgccaagaccatatgatgacccatgaccaacccgtcggaagaactctgtggggttccctttcacatccttggaactgccaaggtcagtgccatgttcaacaaatccatacacatatgtgttcctcacaggaatacgcaactcactcgcaacctgcaggattaaaagatacataagtcaccaacaaagcaaggatcactatatgttgcaagtagccatggtactggcatcaattatatctagtagttctttgttttataattctaaaatagagtaaatttaagacattgtatcacaaaactacaaatttagcaacaaatttatcacaaaactacagatttaatatt

SEQ ID NO: 20244 - DNA, 9688 bp, Oryza sativa
tgaaacaagtcaatgtttcaaaatgatgctcacaaacatacagtactccctctgttccatactataagacgtttcgggtttgtcctaaatttgatcgagtttgtaaagaagtgtagcaagattttcaacacaagtcaaatatactatgcaaatatattgaatggtggatttaatgaaactataatttggtgttgtagatgttgctatgttttttttttctatacacttggtcaaacttgaaaaagtttgacttaagcaaaccgaaaatgtcttataatgtggaaggggttgtagtaaggtactcccaccatcccaaaatatagccttcagcacgggtatgaaggagaggggtaaaaagacttggttgccttcttgggatgggtcagctataggttaggttgaggctataataaagcaaaggggtagaatgggtagaaggggtattttagtggaaaaactcaccctttacaagtactaggtagcatctatatttgggacaaaattaactctaggaagttatattttggaacggagaagtagcaattaatgaccacagttacatgaaggttgattagaacagaaaatttccaagttcaacatttgatgcaagacatggttgtcaattaaaaacagttatttgaggaggttatgtagacggtttcaaaagtagacattcaagttttcatatgaagtaatcaaaccagcacgaaccaatattgtccctcttacaactgataacaccataacacttgtctaaacctacaaaaattatgtttatctaacagtaacaaaaagaaaaaaaaagataaccaagtgaagagaacattaatcacgaactgacctgagggttgagcaggttgctggatgtaacagaaccaacaatggatctgtttagaccatagatgttccggtgctcaaatgacacagttcctccaggttgaatggatgcctaaaataattgccatcagatacgtcatacgtgttggtagggatggattggaacggtgttgttaaaataaagattagagaagaataaaatgttggctccacagtaggtaaattaccagagttggtcggccttcacgtccaggtacgatgctccactctgtacttacttcagctgacttcggttctaattctttaagcttgatttcaaccacaatgcccccttcttttgtttcatcagggcgtggattcacctctatattggagaataaagcaagtgaatttatattcttcagagcttgcttccctgctccaatgttaaagatatggccaggtcgaagctgcaggatacagaggtacaagttactgaaaacactaatatatcacattcagaataagaaatatacttttttcttcaagacccacatatctgcaactaatcactaacagtggcaagaagtatgtagtaaacgtttaacttcaggctttttcatggcacaaaatcatcccacatgtcatgaaaggggtacatgctactgcttttctagaatcaacatggcgataaaattgtatagtggcactaaaagaattccgtgctacaaccagaatccaaagtaatcactatgtggcagggtattcaaattatcgcttataccttcctaaacacatgatctagttatatgaatcactaagaaaattcaaagatgggaacaaaattatattctcgtattaactatagcagctagcggtatttggtatacctgctgtgggagctccctgtctatgataggaatttgggtattcccctcaacaaaatttccaagcttatcctggaactggtactccactttggttatatccccctcgaccacctcgcaaacaacctcactggtgtttaggtttccaaagttcaccacctgggcgcagacgaacccctcattgtggtaccatttctggacatggtccctgatcctctgcaggagcctagcgctcaccttctcctgcttcttcatcattcctagcacctccccacgcacgttatctggcaatatgcacggcttggcaccacgaacacgctgctggtaatcacgctcctgcttccggaggtaatccatcttctccctctctgtcatgtcctggtcgaagtcaacctggcccgactgcgacattagccccacattgatgcacttgaactgcttagcagcgctccacacgctctcgacaaaagacacggtgaggccaagggtgccatcgggcttggccttcccctcgaggtcgaccctctcgaacatgccacaggacacgagcgtctcgagctccttcagaagctgcgacttggtgtacacgccgccgggctgcagcgtcaccatctcgaagaaggaatcctcgggccccgtgaacgcgcctccccctcccgcggcgcggtcgaagaacttgagctcggagatcttgtacctcttcagcccgctcagcttcgtcatcggcacgttgatgtttgccgggagcccgtgcgggtcccaatcccccgacgacttctcatccgcgtgcgccgcgccgccggagaagatccgcgaccagaacccgccgccgccgccaccaccaccaccacctcctcctcctccggcgccccatccaccgcctccaccgccgagaggacccccggcgccgcccccgaacccgccaccagatgacgcgagaaggaatgcaccagaggcggcggcagtgatggcggaggcgagggcgaaggttttcgagcccttagattcggatttggagctggacgacgcgacggcgaggggttgttgggggtggccgtggggctgcgagttgtgcgacgaggcggaggcggcggctgacacggaggtggagcggccccgcccccggactctccgggatgggccggcggccagcggggagaagaagaggctctgggaggtgagcgccattgcggccgccgcggatggtggcgaggcttcggtcttgccgccgggggaagcagaggaatttgggggaggaggaggaggcggatgggggggcttttctcgtctagccctgggtaagggttttcctcccaccccctatcttttccacgttccaccggcttcgcgtgttccggttcgagggtttagccgagtctttgcgtggcggctgaacgccttttttttctctttttttcacaacattttctgctttatattgccggacacaatctccaaatcaaacgtattttgtaagtttgtatggtcgccattacttgcaagaaatatatgcacgtctgtacgtgacaaaaagggagaactgcaactacatatcggtgggcgtttcagatgtgtatcctgccgccatcagaacatcagattcagatgtgagttaaatctgctggcttgatggccctctttctcttgaagcaactatgttgcgttctttgcttccggcaatagctataccagtatgttgttacaaaacaaatgtttggatctcctttctttacacgtgtgttacatactcatacgtaaggattaacagttactcgtacaggttaataacccttccaaaaagaagatggcaatgtggtggtaagtggtaactaggcagcacacgcatgcatggctagctaccagctctccacaggctgcagataatgctgcagcgactgaaccttcttcctgcccctgagcttccggaacgcgaccagctcgatctgccggatcctctccctgctcacccccatcagccgaccgatgtcgtgcagcgtccgcagccggccgtcgtccatcccgaacctgtacctgatcacctgcctctcccgcgggctcagcccgtccagcgccctgtccacgtcttccttcatcagccaccggtgcagcatctcctccgccgtctccgtgctcgtgtccggcgtgatctcctgcgatgtatgcggtgatcacttggattcagtaattggccatggatgaggtcgaggttttgtgatgtgttcatgttgctcgggcgaagggagcagactcacctggtatgtcatgtcagtgcacccgaccttgctggtgagggaaacggtgtattttgggaggctcatcgccgcctcgacgcgcctgagcggcatgccggtgtcggatgcgatctcttcgttggtgggtagcctcttcagctgccggcggagccgccgtcggcattccttcacccgggaacttgcttcggccatgtgtgcctacaagcagagcatcataattcataagaagcctttctggtgtaagatagcaacgcagcaaccgtcaaaaacagcggtagatggttcatgaggaaagacgcacgagtgaaaaatcattatgttataatcgttgcttggtttgtgttgttcggttgagcacttgttccatgatgcaaatgaaaatcaatgtgttaaatgaaatataacagtatcaactatccacttaactattgcatgtcagtgattgtagccattcccatcaatcaccgttcaccaatgtgcagacatcaaaaccaactacttgatctagtaatgatggatgaaaaagatggcactatgaaatgaccaaaagtacaatgcggaagtgaacataccggcaagcgaataatctgggtttgttctaaaacggatttgcgtattgcttgtttgatccaccagtgagagtatgtagagaatcgaaaaccctttgaagcatcaaacttttcagcgcctcgtacaaggccctgtattccttcctacaaaagttacagaaagaaatgtgagtcataagcataatcatagaagggctatacttaaccgtagaaaagggcaagcaaaatacctgaataagatcagaaaattccattccaggaccttcaaactctctagcaattgagattacaagtctcacgttagactttaccatcgtgttcttgcaggaaattccatagttcagacgttttcgcaaagtgttctcgtcagttccagctgcttctgcccactgtgagaaggttggttcaccgccgttgtagtgagcaagctccttttggatagcttccaacttcaggagatcctgtgtcaattcatggcaaccatccatagtaagcttaagttggtgaaaatggtgctaaacactaacactgtgtagtctgtactgacgatgatgccaagaacaacaagaataatattgggactagaaaaccagtgttcaagagatgatattggaacagaaaagcaacaattctctaaatttttcaccttaactgttaatagtctgttactgagccatattcagcttcttgttagcgagcaatattcaccttactgctagtgagcaatctaggatgggattttagatgctgtggaatttgctgcaataaacatatgctgctgcaacatttgtaccaaaacatgcatcctaaattttgcaagcataacaccacaaaaccaaaaaatgcaatctcacaaaatgcattcaatttgttagcctcacctgaatgccttgtgagaactcaacttcttgttttgctgtcagaagcctccggccggtcatcttgtagaagcagccgagaggactccggcaacccttcaacctcttcttcctcgccgacgacgacgccgcgacgggattccggccgctgaacgatttggccgccttcatcgccgccctcaccctccgagctctcctctcggactggcgcaccgatttcacagccacgccctggacgcactgctcatcgtcatctacctcggattcatcgctgaagatactggagaaccccgcatcctccgacagacaggcatcggcgtacctcgcccccaatcccgcctcggcgcggaggatctctctggccaagtagttgtcctccgtgtcgtgcgtcgtgacgaagtcaggccggtgccgttgctcggtttgcgacatccggacgacctctccggcgacctccgccgctgcccttgctagagcgacggcctccgccgctgcggccgccaccacggcttcttggttgagaatcgcctcaccgaaacctccctggtaattacgcagtccaaagtaagattgagggccatgaatcccagtgagccgcccgcaggattcgtttgaggaaacagggcatggtcgtggccagcattagcccggaacacagcgaaaggacgttaccggaagaggcggcggcgcgacggctccgtcgtagacgacgagacgcctcgccccgggggccaaggaatccgagctctcggcctctaccagcgcggtggtggacaccgcgcagtggagcctaacggtacggaacccgccgattccggcgccgccgtgctcccggaacgccgccgcgcgggtggaaaggggccacttgagctgcggcgcgaggcacgccatcggtggcgcgcgcgagagagcaggtaccttaggctcgaacgcgcgacgtgtatctacctagctgttgttgccgcgggcggtaacggtagaagtagaacgcgcggcggagccggagaaggggggcgcggtgaggcgtgcgtggctacgcgcggggaagaagcgggagagggcacggggagagaagcggataagagcggtggggacgggagcgtgcggaaagagaggtggctacctccgcacctgcgtcgtgggccggaccggtaattttggatttttatcgtgtcaaagaacgcggataggaaaaagtacacccaaggtccctcaacttgtcatcgagttacaaaattgtcccccaaccgtaaaaccatataccggacgtccctcaactaacaaaaccatttactttagatcctttgtcccccaaccgtaaaaccatataccggacgtccctcaactaacaaaaccatttactttagatcctttgttagttttgaccccggttttattcgacgtggcggctgagtcagcgtgggacccacgtgggccccacatgtcagcatggccacgtcaactcctctctctcccctcttctctcccttcctcatctctatcactcttcttctcctctacgacttgggcaggccgaccgacgggtcacggcgtcacgccacgcacgacggcgacgctggcgtcgcgcgagacgggcgggtgcgctacaaggagggaggggacgaggcgccaacgggggaggcgaagagcgcgggtggcggggggaggggcagtgcgcgggcggcggggggaggagcgactgccaacggcggaggagcggcaagccgggcggcggcagacgatgttggctaagcccaggaatactctcacactcacgaacacaaacgccggtgaggcagacgatgaacaatggattttacagcgacgaatgccgcggagccgatcgctcctgtatcttggctttattactcactgaaccttgcaaagaaacaacgaaggagtacaagggcctcttatagaccggggacacaccgggagctagcctccatgccggccattgcaccacgttccgcagaacccgctcaatgtcgccgtgagccgcacgctcgcccggacgacgcggcttcctccgcaagaaccgacgccacgcacaccacgcactcccacgactcgatcaacactgcaacggccatgcaaacaaccatgcagcagccatgcactcgcgatcacgactcaatcaaactaacagaacgcacacgacgcacacatgcagcagcacgacacacacacacactgactcaaccacgccaggaatacaccatgacgtgtttatttccaacaatctccccctaaacacgacatggcacacttcgttatcacagcagcgtcggctcctcatcgacgttacaaagcaacgcctgttccttcttcttccgcggacagttcctcgccatgtgaccgcgttctccgcagtcgaagcactttcctcggtagcggctcctaccgtgtcccgagcttgtgctgctgccatcgtcgtcgtcgtcgtggctgccgcccttctcaccaatgccgccgtgcacatgctccttgccacggcgttgacgccgcctcgcctcccattgctcctccgtgagcaggagttgcccagcatgctccgcgctagacgccgcttgatcctcagcgtccgcgtcctccgccacctgcaaccggccgacgagctcctcgatcttcatggtgtcgatatcggcgagcatctcaatcgccaccgcgacttgcttcagtctcttggggaccacgcgcagaactttcttcacgacgcggctgtcctccatctcctcaccaagctcgcgcaggctggcgacgagaccgttgatgcgcatcgcgaagtcgccgacgttctctccgtcacggaacgtcatgttctcaacctgcttcatgagacgttggacactcgcagccttcatgcggtcgtcgccggcgtgcatcttcttcaccgcatcccacgcctccttcgccgacttcttcacggcgagcccggccttcatctcccttggaacggcacagatgatcatggccagcgcgcgccgatccttgccccggtccttgctcactgcctccactgcgtcccactgctccaacgcctccatgctcacttgcatcaccaaagaccattcgtggtagttggtccttgtcaacagcgggagctccacggcgctggagttggccatgacgcgctcggcggcacccgagctcgatccttctccgatcttcagtgacgagctatctccgatcttcgtcatccggctctgataccaattgttggctcagcccaggaacactctcacactcacgaacacaaacgccggtgagggagacgatgaacaatggattttacagcgacgaacgccgcggagccgatcgctcctgtatcttggctttattactcactgaaccttgcaaagaaacaacgaaggagtacgggggcctcttatagaccggggacacaccgggagctagcctccatgccggccattgtaccacattccgcagaacccgctcaatgtcgccgtgagccgcacgctcgcccggacgacgcggcttcctccgcaagaaccgacgccacgcacaccacgcactcccgcgactcgatcaacactgcaacagccatgcaaacaaccatgcagcagccctgcactcgcgatcacgactcaatcaaactaacagaacgcacacgacgcacacatgcagcaacgcgacacacacacactgactcaaccacgccagaaacacaccatgacgtgtttatttccaacagacgacgccgagtcagggttcgtcgactcgcgcctccgccgccgtggccgtggacgacgtcgatgtcgacctcggcatcctcggcggtggaatgaactacatcagctagctcaccagctggcgtccggcatccacggccgcgacggcacagccgcccacacgtgccgagggcgacgtcgtccgcagccacggcgacggcagcccgggtcgatgaaccccgactcgtcgtcgtccgcgttgttgtaccgacgctggactacgagcagagaaccgcgctgcggtggagtagcctgtaccggcgcatcgtggtggggcacggtggccggccagtgaggcgcacactgaggacctgggatgaggacgagcgttgcctcggcaagtaggagctcgcccgccgccgctcaatctgacaatggataatcagagaaacaatcaacaattaggactgatatgtagacatgaattgaaattgccaacttgtagtgattcctggtacgttacaagcaaagcatgtgcaggatggccggagtggcaggagacgctgcagctggcgccggggatgccatcgctgc

SEQ ID NO: 20245 - DNA, 1234 bp, Oryza sativa
tgggccggctctgctcccacgtcgtcgcgcgcagagtggagctcgacggcgcgggtgatgccgtgctggtccttcctggccgttgtcgaccgcgtggccgtcgccgaggtcgagcttgtcgcctcgccacggtctgctcccgggctcgacgcttcgcctcccccgtcgcccgcagctcctccccccgccggcacctcgtgggcctcgtcccctccctcctcgtcgcgcacccgcctatctcgcgcgacgctagcgtcgccgtcgtgcatggcgtgacccatcggctggtctgcccaagtcacagagcgaagaagaagagtgatagagatgaggaaggagagaatgtcacgaccagaaattcacgaaccagaatttctaagctgaatgtgtattacacccctgtccaggactagccagggtacacaaacgacaattgttgacatacagatccacgtcttacaaaaatataaaagattacaaatgcagcggaaaagataaaagcgagctaaaccgggaagcttgacttcagcagcggggcgactccattccacaagcaatccttgacggcaacgacggaaccaacctctctgagacggctccaactgagaagaacttcaactctagtgtgggggaaaagagagcaagactgagtactacccactgtactcagcaagtcataccggaggaggtatgatgcagaacataaccaaaggaggctacggggttcatttgcataaagcaggcatttaaaaccagtagttgaaaacagtaaaaacagttgtagtaattaagcaatattaaccagtcactgtccaacgctacaccacgttgcaacaggcccaaccaaccacctgaactacaccagttcattaagctaaactaggggtgagactaatcacggtgaatctggtcgaccgcccataaccgcgggcacggctattcgaatagttttactctgatcagaggtgtacaactgtacccacaaaacacagccccacgacacgtttctgtgtgccgacatgccaccacgacataccggaaagaggccgtgacaggacccttcgcataactccctctaaccgatcgcaccacaccttagggttcgcccccgtccccagcaggcaacaggcaacccccctttagtgccgcagtgaatccggaagccgatcaaccggacaccctggccgacccaactccatcacgcccaccctcgcctgggtacgtcggctagaga

SEQ ID NO: 20246 - DNA, 4336 bp, Oryza sativa
aattcaacactgctataccgatttggatccaaaatccactcgatatatccaaagaaagctgagctgtaacctgcaagtcaaggtcgagacgttacgtcgagggacgccgatttctgcagcgagaattgagcatatatcaaatgggatgacgggatcggggtggaggatgtaggttgcatgcaatgcactcaggcccgagagggacccatccccgattgcggccacccgggcgttccacggccgttgctttcgccgatcgcaacgctccaactatcaagtttggacatgtgtgtgactgacaccaacacgaaagctatagcatctgcccattatcacaccaaccctagacagtgtagcccacaccgatgatcgatcgaccgatcgattgggtagccgcagccgcagctggctgctgggaaaatgaccgcacaaacagaactcgatttgtatggttcgttttaatcggtgtgcatttgtttactaacaaaagctccaagtttttaatagaaaaagaccaaaacttctcgttcgtgggagtgaaatttcagttgaaaacggaagggtgaagggggagagtagaatgatcgatcggtacgtgccggagtgtccaatcgatcaattataactttcgtgactggtcttttttaaaaacctgtaacgacaagaacatgtggctggcaaaacctagctattatagcacggaggcaaacatatgcatcggtatggcagcgcctctgtgccgctgtgtgtgaccccagcatcgatcagcaggcaggcagcagtctctatctcgctcattatctttggccttatcctccctatcggaaaaaagagctctgttcgaactgttcgttatttaatatagcatggaaaataaaggaaaaaagatagtgaacgaacgtttgaaccagggtacagctacgtacgcacgtataatctacttgactttggacaaaggaaaagaaagaaaaaggcttgacagatctcttccccgtgtgtacgtttatacgcgtgactaactccagcatccggaccggatgatcgatgcatgcattgatgagaagattagagcagcagccccaccctaccgtggtctgtggatacacagcgctgacgacgagggagaggagacgacgaacagtccaaaggcgcacgtgttccagcagcgccgtgaaaatggtgcaatgcatgcgcgaacggtctcatatgcagtctcgaccgatcgatctcatctcactactcggcatcgacggcatgcatgcgtgctagctactccctccgtcccacggtacaaggaattttgagtttttttttaactttggaccactcgtcttatttaatttttttaaatataaaaaacgaaaggttatacttaaaatactgtagataataaagtaagtcacaaataaaataaataataattttaaaaaaatttgaataagacgagtggtcaaacgttacaagcaaaaattcaaaatccacggaggagtagctagctaccagctgccctcgtctagcacctgtttgcacgacattttttcaaagcccacctgaccccgatcagagaggccacgccccgcgcgcgcccaccttccgcgcaccttcaccctcgcctctctctcaagtctcaacgtaggcagctacacgtggatcgcttggccactgatcagtgcaacgacggcgtacgtgtaacgtactaacgtgtacccgcgcgatggcgaggaggacgtttgcctcgcgattgggattgggccgattgggaacaagacgaacgcgcggtgtgtgcgtgcgactgcgactggttcgcggcttcgcgcggtgagtggatctgtggaaggggaagtctagagggaagctaagcataaatagccgcgaatagcaacgcccatcggtccgttctctaccataccagtagcagctaattaagtgggtgggttcgcttgcttgctttgcttttgcttggagacgggagcgacgctggcttcagcgattggcgtggagaagctagattgttggtgcgactttccgaccgcgaaaatagtagggctggcaaaccggtggccggccggcgatccggccgaggggatggggagcatcgacggccactcgctgcagcagcatcaggggtactcccacggcggcggcgcgggagggagcaacgaggaggaggaggcgtcgccgccgcccggcggtggctcggctacggggtcggcgggccgccggccgagggggaggccgccgggctccaagaacaagccgaagccgcccgtcgtggtgacgcgggagagccccaacgcgatgcgttcccacgtgctggagatcgccagcggcgccgacatcgtcgaggccatcgcgggcttctcccgccgcaggcagcgcggcgtctccgtgctcagcgggagcggcgccgtcaccaacgtcacgctccggcagcccgcggggactggggccgccgccgtcgcgctgcgggggaggttcgagatattgtccatgtctggcgccttcctcccggcgccggcgccgccaggggccacggggctcgccgtgtacctcgccggcgggcaggggcaggtggtgggtgggagcgtcatgggggagctgatcgcgtcgggccccgtcatggtgatcgcggccacgttcggcaacgccacgtacgagaggctgccgctggaccaggaaggcgaggagggcgccgtgctgtccgggtcggagggcgccgccgcgcagatggagcagcagagcagcggaggcgccgtcgtgcccccgccgatgtacgccgccgtccagcagacgccgccgcacgacatgttcgggcagtgggggcatgcagcggtggctcggccgccgccgacatcgttctagcactggcaccggttaatcaatgtctctctacctagctagttagccttccacttctttccctagttgtttgagtaggttaattaatcatttaccatgttaattaatgtgctatgtaatgcataagtactcgtgtgatcttatcgttccattttcttcagagtttgaagaatgtaaaattactgtgcgtatcaagatcggcagtggttgctcacttgctccttcactagctatctgctcgatcataagctcttgcatcttgttcttcgcaagcaccaattcacgcttgtgtcaattgcttggtcattttgcatactttggactactcgatcactacaaaatatttcttgagttttactccctgcatgcactgctcaatgcgtgattatgcctgaatacactaattgttttgttagaattgtgcatacatagctatgcttaattggatgtgttctttgtacatgcatgcatggttttgcttaaactttcctaattatacctcaattcaaatcctagctaggttcacccagagtctaattgtatatttcagcatattctaatgttttgttcttttaaaattctagcttgctcggtatgtttatttatgtttcggtttggtagaaaaagttcagttgattttggcaaatcaattattccctccgttgctatattttgggatggatggagtaatttaatttctagtttagtaagcttcgtcttgattattctctctctctcttgtcgcacaaacactcgcacatacagatgaattctttggttttgacttcttaatgccgcactacaacgaaactcatgcatgattgtctaatccgggcatgcgaatggctatcgattgcactacggtagagagtaacaacctgacagattttcatgttaagtgcgttacgttgtccagattcaattcatgcgtcacacacctaaatgcaaacccaagcatgctaaccttactatggaatttatgagtagacaagtgcagtacaactcaatttgccatttgtgatagtagtgtgtgtatatttggtagtgcatgcatgtcttagcatgacactaaaaagggagtgacaattccatggtcagcaatattccggctgctgggaatcaaagttaatttgcattcctgtctgccctccaaattaaaacactttcatgcataattccattctatcaagaataacccacactaacacagactaatgctcacccatcttttcattgtcttcttttgtcccaaattagttcggttgggcaggaaaaaaaatgctctcgtcacagaacaaacactgcaaagttagctgtgacttgtcagtgccgatttgaagaagcatggagccatggcgagacggcgacacggtgacactgtgcctgggccctacgggacactgccgggtgagatgatactccctccgtttcaaaatgtttgacaccgttgactttttagcatatgttgaccattcgt

SEQ ID NO: 20247 - DNA, 31941 bp, Oryza sativa
acatatgctaaaaagtcaacggcgtcaaacatttcgaaacggagggagtatatacgaagagacgaggtgaggtgaggtgaaacgaaatgatgatggaggtggtgtctaggtagtgtttgtgcgtgtatctacacgctccgacccccacgaaacgaaagggatcttctttgctcattacccatctttggatgcccagagtacataccatatgtgtcatctctgtcacgccagaacgctgtggagacgaaccttcatgtacaaaacaaacttattcgctctgaattgccgccctactttcttcttgctagggacacgagagtgggcgcgactgtggtagtatgcgtggatgggcgaatggcaaaaacgttgggttttgatttcaagtgtgccggtggtgggggtgagtctccgggaaggaattgggatgcgatggtgtattgtgctatacaaagttggcgatcgatgccgccctgtcgtgttgacaagccccttggtcgttgagagagctagctatcctctggagtgcaagcatgcgttcacatccgacttgacgtcgtgccggccgggccctcctccccgccacggcaaagccagggattgaggtagcgagcgccgcgcggtgatatcggtgtgtggtaggtgcaacgcgcgcgaggccgtttccgccgttgtttttttttttcccaccggagcgcagtgtacgtacgcgcgcgggcgcctagctcccacgcgtcgggacgcggaggcgagcgaggcgcgggggcggggggacggtgggtggagcggtggaccgcgcgcggacgcggacgcgcgggcgggcggggcgggcccgtacgagcgattgccccgcgtgcgtatggccacgcacaggcccgacctccccacgtggaggcagtcgcgtcatttaagccacgggactatttgccgtcgcccagcgcagcgtgcgtgcacgcgccgtgcatgcatagtagggtaagcgagtgcatgggggcagctggtgaaccatctgtgtgccgtttcctttcggctttcggccggcgatccggtcgcactttgcgggcaccgattcgtcctacgttgggcagaagaaaggttcagatttcagccactacagctacaagtggtaaacttgcactactgtccgctgagaagcagggactgtagtggcgagaggagtggtggtagagtacaagctggtcagggagacttcatctccgtatggcgaaatttcatatcgcataagtctaacctgctccccgcctctcccatccgtaacaacgaggaggaatagagaaagccatcaccggtagccaataagtctaaccaacttgcgctgctaaaaggaagacggcgacaacgacggccggcgcgtagggcagtggcacatactcgcccagaggccacggcacgtgtgtcgccggcgcgacgcggccatgcaagtggcgcgacttatagggcgcgccacagtggccgcgtgaccgcggcgatcggctataacagtgagccggattaattgagatcgactatatatctatctctttctctctctcgatcagggtctctccggacaaccaaatcccggagacgttttgacggcgacgtcgctgccgtccgacgagccgggcggcgccggtgtgcgcggtatgatgccctattgccctgcatgaccgcatgcggcatgcttgtccagatctgagtggcggcaatcataacagtttcgcaacgccgcggccaaaaataggaccgggattgcaagatgcggagcaatcacggggacgtgcaatcattcggcgctcggcgacgcagtcacctgactgattgcgtgtaggaagcaatcacgagaaaccactataggccggcgcgggaaacgggagtgcaaattggtaagaggcctagaaggctaacaactaaaacaacggatcgagtaaaggaggctccactaatcctttccaacctgaaagtgttaagctgattctcccggggagaaaaaagtagtagttgaaacttgaaagcgttgcaagaaaaatccgggcgcataagacagaaaaaatgcaggtagggtgaattaaggtcttggatgaggacgactaaacgaaccatgagtgatgacagtaatttaattcaagcgataggactgtaaaatcagtaaatgacaaaccaggccataaatacatggaaaggataaggatggaccaatgaagcattaagaggggagcaaatgactttgtggacatcaaaatttggggggaatgttttgttccttcacatattattgtgcacttgaccatcggttttcgaacgtaaaatattatcggctttacctcgccaaaagaattttatttacgctgtggtaaaatttcgctagttgtcagtcatattcctatatgccagttcttccctccgtgccttatttctgacgatatcagtgaatctgtgattgatcttgaagggattatcctcctcgcaaagatttctcggaagccactatcatggcgcctctagagtggtgatatacttgctgtacacagagggcgagctagacgcctagaccgtgcgtcaaactcagcttttaaacggttaagcggagcgttttgcacaaaagtactttttatataaaagcttctttaaaaatcaaataaatatattttaaaatttataataattgatattttaaactccctgccgacgaatgattcgagtaaatttataataattaatattttaaactccctgccggcgaatgatttgagttgtttcgcatggcgctaaaactcccagctgaaacttagccgacgtacgaacatgttggggaatatataacacaaaataaacccaaataagccaatggggaatacgacttgttcggttattctcaactctgaagaaagacaaaccaaaaacacattgctcaaatatgttgggttatttaatagccacaaagttgctcgagtttatttcacttaacgaaattgttacaggcagtatattagtgcgtaatgatccgacaaggtcctaaaataggcaaataatcgaataagctaagtggtaatactgctactattgtgcagtacaacaaatgcaaccgatggaaaattcacctaccaacgaaaagccaaatgcacgggaaaacaatactggatctatccatatgactatgacagtaagttacgaccataagcaacaaaagactgcaagcagaaaaacaaacgagaacaatcttataaaagaaaatgaaagaacaccggtgctaaaaataaaagtaaaagttttgcagataaataacattgcataaaatccataaaaaaaatattcatgaaataataacagcaactcttcaaaaacgacgtgactggttgacaaagaaattggattaaataaagtaacaaaacctacaccaaaatcagaatataagatcaaattcgtcaggtgaattcggaaaagcggcatgctgtatccaaccgatgagcaataaatatctgcccgtatgccatcttatgacattgcatactgcaagcaaaaattgtgctcagattactcctggacacttatcaaatttgctttgtgcaaacaatggagcattatctaaaacatgaaatgtgagtaaattcgcaactcaaatataacgatttgctccatgctggaaccgcaaaataagagggcaagatgaagtgttctctcaacagtacaaaacatttgcttatgggcgttccgtctggtctcaacaacagtgcaccctaagcaagcatcagagaaatacatacatattttcattacttgatcagaaccaagtcatgaagggagtaacacaaacctcaagccaagaatcagtaactttaaacaggtactctgatactattcacaacatcaaagaggttaccaacttggttgttgttgaggtgtggattaaatcaccctgaggaacataaaaagcttgtgcacatggtgctaatctgccaataatccagatttaaattaacaaagcggttcattttaaattaaggtgcacactgaaaacaaaatgaacatgttaccattctaaaagcaaacctcatagcaccagtaacacttcctcaatcgtcattgcaagacatgattactaattcaccttatctaaagcttttccataatcttcagtacacatccaataccaggtttcaatacaataatcatctacggagtactaactagcccaatttgcacaattaattcatgtagtatataaatacaataaataatttaactatgtatttttcggttatattttttaaaaacaaattgctcctagtaaattcatctgacagatactacaacagcagattatgagaaatatattgtcactaattgagattaatgttaataacaactgggagcacaagataacataaatatttccttctcagtattatggttgtacagacttataaaagcaaacattaccagataactagcagctaagcctgaatacagctgcatcaagcaaacagctcaggaatcctcaattactcaggtcaactgccacgtaaacatacagaacattaaataggagtcatataagcacacttccagaacatgatataagcaaaagaaaagtttttaaaagatgtaaatgcatagcaagagattcctcagcctagtggttgatggctttctttgctctaagagattccagagccttctcgcgaagctcaatttcaagtttctgctgatccgattcgtctcttccattatatgaacctttcttcctagcatcagcatctgagtcagattcacgatccttctcaagatctgaagccatatcaacagtttcagcatgcttcagttttagtttgctggcctgacggtctgcctttctacggtgccgctcttcacgtctgcgccgtctttcctcttttcgcaacctcttctcttcctttctcctcctcttggactctttgtcatctgactccgaattagattcatcagaactgtcatcataacgtctcttatgcttacggctctttttatgctttcgcttctcagaatgggatctatgtttccctgattcttctgaacctgaactgccagaatcaatgttgttattaccgtgtgcttttctcttatcttttcgaaaaggacttccatcttctgactcagaatcatcatcgattttagcaggatacttcttagaagccataccgtcacgtaaaccctttattgcatcctcactgttcatgccatcctttgaataagagttgtgcattccaactctactaggagtgtgctgtttctgttgggaatcatcaggagaatcaaccgtgtgtttcgttcttctaccatcacgctcatcttctgatgactctgacagttgattgttctgtttcctccttgtctccttgccactagaacagaaaacagtgtcatgctagctgaggaaaaagaaatggtgcttctgacagttatagctagatgatacaaaatgaacagagtaggtattggtaattggtctattagttgacattacagtcattaggttctcaatctgtccgtaacaattgacaccactaccattatagtgtgtactttggtaagtaaaaacaatcagctaaatgctttcctaccaagatttaaaatggcaattccagtatgcatccatggactttgtctagaaataaccagtacatgaataagaaaagagaaacacactgaagtgctccaggcaaataggaaaagtgctacctcatgaacagtgctaagaaaaaatgctcataccaagaaaaaaaaatgaaagggggtaaaattaaagaaaactaagaagcaatttcatttgacaaccaaaatgcagcaaagaagcttacctatgttgtgatggagatttttctccagggctcaaatcatcatgtgctttctttagttccagatctgctgagaaatccttaatttttctgcgtgatgaatttgcttttcgtgcattctctctgaacataaacaaaagaaccgtttatatcaacaataagaaactcaaacaacccttttgaaagaagggataggtagaatggagactaccttgcacgactgccctcctcttctccactgctatctgttctgacctgactgggcaagtgcttatcagtgcccttcaaagaactgccaaaaaagatggccaagccttcagtatgcacatttgatcacaaatatgtggagaagaaatgaaagaaataaataaatcgatacggacgagtagatacctatcgcgtgtcgagttcctttctggcttgtttggagaattcaaggattttgtcagcttacgatgctcagaatccgatgaaagatggccactcacttctgtatcattcctattgtcatcgtgtgatctttctttgttcctgatgtaacagaagtaagagaacagcttttctgaataattgtactgaaagacaaacaaaatatgccatgcacattacctttgaagcacatctacatcgttactggagggaatgccgtttgttcctttttcaatgtctctactcaagctcctgcgagaatggattgggctcctatcgtgtggactggtactccttttaaacatcagcataaataatcgaatcagaaaataattacatgcaggaagactacaataggtgcacagcaaattcaattgctcggtacctccttcgttgtggagagggccgacggtttgcagaacgacttctgggtgaaattggcgatctcctagggcgttttggtgacctcaaccgcggagagcctcgaggagagggggatcttcgtcttcctggagatcgtgaccttggcctgcgtctacccggagatggagaccgtggcctacgtcttcctggtgaaggggaccgtggcctacgtcttcctggtgaaggggaccgtggcctacgtcgtccgggtgaaggggaccgtggcctacgtcgtccgggtgaaggggaccgaggcctacgtcttcctggagatggagaccaatgcctgtctagagatgacctgcgccgaggagatctatgacgtgcaggagatggtgatcttggtgcacgacctggagaccggcgatggtgtggagatggtgatctctgacgcacaaaaggtggagatttcctgcgaatatgagatctacgatgaggtgacggagatcgatgtcttggtactgaaggtgatcttctggaatacggtgatctccgcctcgacatcgaaggggtacttcttggagaacgctttcgtggagaaaaagaacgcctaggtgaaactgagcgccttgaagatcgttgctgtctcccaaaagaaatggaatttctggaaggagatggagaacgcctcctaggagaaacagatcgccgcctaccgcgaggcgacaaggagatgctcctggacctaaggctttccctgaaatgagaagtccaataacattgccatcacaaatttgttttggtggaatcagcttcttgccatgtacatgtgtaactagaacaacagtcaagtgaggtcatggatgaattacaggctcttaatccagtgttcagggtccaaaaagtttagtcctactaatttgctgcttaaaaaaagtgagtgcaagaaagagtgttgattctttttctatcaagggtttgtcagccttagaatttcaattttgatttttcataaaaagattcaacaaaaagaaatgctaaaaaaaaacagctggtcgtttagggtcaaaaacaaaatcaccaaatgatttgtgatcagggaaccttaaaaaaggcagaccaaaatgaaagaattgtgcacaaaaagtttcaaattattgtaacttcaagtgttccataaacaagaaaatactaactttagaatcatgttgaatccagaaaatctttatgagcatattctaaaattcaaatacaacgaagaacaaacaacggatcaaacttaatgcagaaaataatgacaagctaaacatatgtatgactggtaaatctttaagatggaaaataaaggcactccgtaacagaaaaagtggaatccaagatgtggttgttctctgagaatttgatctgatgtcacggatttaaaggtagttccagtttaagaaggtagaactaaccggctctttgttcttgagctatgcttagaatccagttctttttcctcctcagcatcagcacgatcaggacctaatctagaattaccggcatccccgtcctacagcagttttgaggtaaagaacgatatgaacccaaataatcggagaagctatctgaatgtcatcagaaacacaagaggttacaagacaacccgaaaattaacagcataacaaaattggtcagaatgaattagctcaccatcaatttttgtttctctagttcttgctcccttccatctttctcccgtttcttctggatctcctgagcaattctactttcctctgcctgcgcataagcccaaggaagttaatgggtaagcatcccctttaatgaaattaagccgcaataaagcacaaagatagtaacaacaccatgaggtataaagtgtattccagtttcacaggataaacggataaatcctaaaggctacaagaaattttgccgtttccataaatcacatataaaaagttatcaaaaacaaataggacctgtaagaacaaaaataataataatatgccacaaataggatcaattattattccatattccgtgacaaagaaaaacagaaagggtaatttaaaacttctagcttgcattctctccctcgagttcttaccaaaaaaaactttcattgtttttggtaagtcatatggattcatcaaaaacagatgatctaaaacatgcacccaaatatagcgataatgcagtatatacttatgttaacctttttctgctgaatctcagcttcctttgcatctaaaaactgttggggcaccccactagcattctgttgtgcactgagtaggaggctccacagctccttcatgaacttcactgtgttcttctccatgaatcctgtcagctgtatctgtatcttctttccatccgcctcctgccaaacaaacagaaattgaaaccaaaaccgtattagccccaccttctaatatcttgtacagaaacccacaaacgttaagcactaaacaaacacaaaacataattactggtttcttgagttttggttttgaccaaaaactagcctagagcagacaaaaaaaaattcaacaacatgcaaaaatgactgccgaaagaatatgctatctaaccataattaacggtacacacgacgctggtattgttttacaaatttgggaaaagtatccaataataatcgaaattcccaacattttacccaaaaagaccgttgtaggttttcaatttagttcctgaactccatgtataatttcagtataaatactgaactacaccatgtatttggttttctgtcatgttcagacataccctcatgtatgaggtttagcaattcaacgagcctatcttcgtcaaattcaaaagcagcctacgtaccacgcgcatagttcaacgagggcgtaacaaaccaacctccattgctcaagtcaaataaacaatatgtttaaaagcctcaccttctcttcgaggaggccgtagatgaagttgatgagcacttcgtcctcgaaccctaggagctcggtgacacgggtcgcgatccatggtttcatcacatccatcttcaccttagtcatgtccacctgtaaccaacccaacagagagaaaaaaaacaaacctaaatcagagtttgcgtcgaaacaaacagctggtagcacaaacgacacggcaaccagcaggtgcgtgagcagatgaagcacactgaccaggtgttcaagctcgggcgcgaacttctgcgtcttgagcagcttcgcctgcttgttggagaaacgggtgtcctgatcggccgacgtcccctgcgaaaaccccacggcgaatcagcgccgcctctcacagatccagcgagcgaggggctacacggcgaggtgctagatcggtacggaggatcggagctacttacccggaagaagccgcccgacatcttagcaggcgatgcagcggcctccgccgccgccgccgctttgagggggaagaggggtggctagggtttcggcaattcggcgtggtgtgggaagagttgaagacgacaagttgggggggtgtcgcaattgggaagaagggcgcaccggccacgggacgaagtgatgtagccgcctttagcccgatccagaacggtcactttttgacgtgggccgatgcctccggacaatgggcttctttcacaagcgacaccgccagcgggtagaattatacaaccagggcctagttttagttccaaactttttcttcaaacttccaatttttccatcatattaaattttttctacacacataaacttctaacttttccatcacattgttccaatttcaaccaaacttctaattttggcgtgaactaaacacaccgcaggtgaaacgccggacgttaccatgggagttcactacgagaacaataactaaaaataatactctctccgtttcaggttgtaagactttctagcattatccacattcatatactcccttcgtttcacaatgtaagtcattccagcatctctcatattcatattgctgtaatgacttatattgtgaaacggaggaagtagatgttaatgaatctagacacatgttataagactttctagcattgtccacactgctagaaagccttataacctgaaatagagggaatatgtaagatagtttaaacaacataagtttatataagttgatatgatttaaatttaaatagtcataagttttcgagccaactttcattatccatcttatttgaaataattttaaaaacaatatttttgttgttattaggcgataaaacatgaatatcattttatatgtgatttgtgtttttattgttttcaaaaaaaataaataagacaaacggttaaagttgaacttggaaactcataactacgaagagagtactcgaaaattcatgttgattggcgtgccatatattttatagtccgcatgtagcgtttttggcttatttgaaacttggttagtttccatgattttatttgacatttaagatttctatcatagacatagtgtacaaatattttcgtaagtattgaccatctgagtgagatttgggtgatggtcatacattcgtacgacatcacaaacaaggtactccctctgtttcaggttacaaagacgttttgactttggtcaaacttaaactatttcaagtttaactaaatttatagataaatatagaaatatttataatactaaattagtttcatcaaatcaatatatgaatatattttcataataaatttatctcgagttgaaaatgttactacttttttctacaaacttggtcaaacttaaatcagtttgactttgactaaagtcaaaacgtcttataacctgaaacggagagagtagtattttattgagtaaatttcacagaactataggtgctctgatcaaattattagaaaactacaaatttaacatgatgcatcacaaaactacagatttaacactaaattcatcacaaaactacagatttaaggtgaaatgttacaaaactacatatttagtaacaaagttatcacaaaactacatgtttaatgataatttaatcacaaaacttgaaaaattataagtccaacataacattagtgctcaaaatttaaaccctaaaatatgtagttttgtgataattttattattgaatttgtagttttgcgatacttagctttaaacttgtagttttgtgataaatttattattaaatctgtagttctatgctacatcatttaaaatctgtagtttttttgataatttgatcaaattatctgtaagttttatgaaatttactctattttatttttcaatttatcagtttttagaacacatgaaaaaatgattgtgttatactttctatgtttttttacgtgaaactttatttaggagatttcccatattctaatagaaatatgttctataaatcatcatatagaaatttaatatttgtctaaacaaaaaaaaaatctgaatattttgtcttgtctcttcacaatgttttacagcttcttcttttgaaaatgggtatgtcgttgaaccgcttgctagttaagccacatatgtgatgtaaaattcatacatttagtacttcaaacaatatattttatagcctcttaacaatattttaattttcggtgtggcatgtataatacattaaagtgagatttgttttaacataaacactcagaaaccctagtgtttctttttttcttctatccatattatttagtgtgtcttttgttgtaataccataattgaacaaaaacggttctatcgcttaacaaacccgcgataaaatatgtggcaatgtttgtttatatattgtcaaatatcattatttttcaattgttcattatctttttactcctagtgttctttatttttcatatattcacttgtttctcccataatggtagtattttttttacaaaaaataatttgttgcctttttttttctagcgacacaaaatgtgcaaatccccgcgtgcagaacgcgaagggtgagaatggcaccggcggccagggctatcgccaagtggactgtgcatgctttggcttaatttatttttgtttttttagataatggattttcattaatccggcctctatattcacgagggatatacataaccagaatgatacaagagcgcttagactcatgcctcattaaagaggagaacacacacaaaaaaaaagacgatcttgacacatccctatttcttgacatcctcaattgaaacgattatattcgatgagtggaggtcatgtagcttgtgcgttgtcgctacaaaactccgctggtgtcatcttcatccgcttcaagtgagttgatgccacgttccgctagtaagcccacctcatctgtcatcatccaatcagaactagccaaccagacgcgagctaaaggatccgcttccacttcactggattcctatgcctccgccacctacagggctgccaccgatgtcgaaatccacctctgcctctcaaacacccaggcctccgccgccgacgggatctgccttcgtctgatccgcctcctcctcaccgagatccttgcaccgacacttaggctgttgctgcctctagggcaacctccgccacagccgaggaggcgcttctgcctacgaaccacctccgtcggatccgccttctccatgcagagggctggttgtcgatgtcctccgctgccgcagttctctgtcgcacccaccgtcggcgtcctccgcagcgcccaccacctcccgaagaaacgccgccgccgacggctcaccgctacctgctacggcaccaatctcccgaccacctccgctaccgcccgcgccaggcgctagcccactaccgctgcccacagcccctactttctccggcgttagtgccgctagatctgggggcaaaccacatacctgactcgcccgtccatcgcaagtcccgtcggagtcctgccgtcgccttcctcgcagtcgcacgtcacactggcggcctgcttgggcggcagcaaggcaacaacgaggagatgataagtcgaggagatgaagagtcgggggagacgaggagatgatatgatctggtacatcggcttaatttaattttgtgatgtacggtgagctgttttgtttcctcaaatgaataatctagatttatctaccaatagagaactgacacgtggaccaatcattgccaacaaacacagcaagcatcagaatgataggtatgtacattacccaagttagcacatattttacagtgatgcctaattacatgaaacatgtgaatgtctcggacaaaatgtgtaacatgtgaaatactactatgataatttaatgtgcaagtttcctaaccacacacaaatgggattcaaaaacaaaatatttgcgatattttgacttatcaatccgctccatgttttctacccgatcaaccttctcattcatcattgatgagcttggtgaagtccgaattaaaattcaaggataggtgagggagtggagagaggagtatgcgggaagcatagtaagaacataccggtagagaaggtagttagcaagggcggagctgatagcaggggcaagttaccaaagacggaattgatacagcggatgggacaatgtagaggatcggtaaagatcacaggagaatgaaaagggaagtaacatgatccaacaagccttgtcggtttggggccgatgccacggatgatgctaggtggagaggcgtggcggagattggattgggtggagagaggaggtgatgatggtgaggggagggattgagaagaagaggagacacaatatatggtaaaaatatagagtaatctagacaattccatgaatccaatggtcacaaattcatacttacatgattttcaatagacatgtcctacccttgaataaacatatgtacattaccacgtatttacagtggtatcatattgttttttctcgctgggatgcaagaacatttagctagctagcacacagtgtcactcttcaaatcataacaaaaaaaattgtcctgcggtgtatccataatggtggatacaaatgctttatgcttatataccatgccaatataccgggcagtagagcgccagacccaacagtctagtcgtcgtcgtcccaatcggccggacggcgtcgctcatcgtcgtaccagcaaacgcagctgagcccgatgagcacctcgacgatgacattctctgccttgtgccggtcggcgaagtgcagcgtctgcaccatcagcacgcgcggccgcatgctgaaccgctgcgcccgctccatgctatgctcgtcgtgccaccgcaccgtgtcgtgcgccataggccccaaccaccgcagcatcctgtccaccgcgtccatcgacgccgccgccgcagcctcgtccactggctgccctctccagctctctctcagcttcgccttcacggccgtgcggatggtcacaggcagcatcttgtacagctcgtctctcttcgagagatccatcccggcgtccacctcgttgctgtggatcgttggccaaagttgcctgagcagcatctcggcgcacacgatcatgttcgcgtatcgcagctccatccccgagccgccaaccgtgctcgccgggggcttgatggactccgacgctgaaaaggcggtgtctttctgccgaaagatgggagccgagtgccggatcgccgcggccggtgacgccgcctgctgtaaggggccagacgtgcggcggagcgcccacgcgcgacctactgtcaaaagcggcaagcccggcacgtacgcaccgaatgttattgagatgcgcgcgagcacggcgagcaccgacttggccatgagcttggataccttgtgcgcggcgacactccagagcgagctctccatgagtcggcgcaccttctgccgctgcgagttgagctcgcgtatcagcttctcgccaggttcggggacctgcctcttggccgatggccccggctgcgccgggatcggcccgctatgcctcatccactgctccatccgccgctccgacgcctccagctcgctgagcgcgtccatctccgcgtacagcttcgccgtcgcagccacgtgccgctccatcttcctgaaccgcttcgccgcgcccctgtagaacccaaccgtcgcgtccagccgcgcgaggccgttcccgcgcttcgcctcggcgtagacgcggtcgaaatcgtgcaggaacggcgcgcccgcgcagcaccgcgccccgaggcgcgcggcagtgccggcggcatggtcgaggtccgccacgaactcgccgcacgcgagccggagcaggagcgactggtccgtggacgtgacgcgcgcgacgccctcggcgcgcagcgcgtccgcgcggagcctcctgacctccacgtcagacagcgagcggtggagcgacacgagccgcgacatggccgccgccgcctcgaacgccaggatcccgagacccgcctcctccctggcgccgccaccgaaccgcgcgcgcaggtcggcgagccatgacctcgcccccgcgggcatgccaaaacctcacacccgacacggcaccactttacttaccaagctcaagaacacaaggaaatactatcaaataacacccaacgtaacgagcagccgcgcagcagatcaaatatcatcagtatgaaatcgagacaggattgttcatgcggattacgcgtctaaacagcgaaggagcagaaccagcacgcgaccggacggtatccaagcaggattagccattaggagaagaaatacgtgtgctcggcagcgcgacccggagcgggtcaagagaggcgaagtcgtccacgcagccggcaaatcacgagaggccatgtgcacggtctacccgtccaccgagccagccgtccacttcgatctcccactggccaccaccaccactagctagacatgtcaacgtgccatggaattcctcccatcctctcgacccaaccgggcgggcgctgcacggccggagacttgcctcggggaagtcttgcatcgacggcgacgcctgtcgactgtcgtctcttcccgctgggacacgaccgatctacgtaggatcgcgagatgagaacgcgcgagcgtaaggcgccgctgctgcaacgccgctcgcttagtttccacatgtgtcgacatgtcgatcacctgtcgtgggtaattgcacgagagagatactggacgtccttctcattctcaatttctcactcgattaatacgtgtgttttgaacaggtagcaagacctccaataccatccttgttcccatctgaaacagtaattacataaaacggtacggtgcattaacgcgtgataaattaagtattagccatttttaaaaaaaatggattaatttaatttttttaaacaactttcgtatagaaacttttttaaaaaaatgtaccatttagcggtttgaaaaaaagcgtgcgcacggaaaataaataagaggggttgggaacgcacccgagtgcctgatctccacggatgtaatctatggctcattcattgctcaattacgatccgtttgctgcaaatgcacaccgcctgattctgctcagctatatcgtatacacgtatcccaaacaaggttacaccgtatacgtatgattagaaggtacgtatatacgtaaggctgtgtgcctgtgtccatcgatcgcctctacattgcgatcagatgccactactctgtagtattattgccacgtacatataggtacgcgtcgtgttgtcatcgatggcgcaatgcacgccaatgcgactagctaggaatatataagacggtgtactaaccaaccaatgctgctgccgtgctgcgtcattgcgaatgggtggaggagaccaaaggagactccgcgatcgagcaaattaaagctgcgtcacgtggaaaccacccgggcatacgcatgcaatgattatacaccatcgatcgatcgatcgatcactcgcacaaaaagaagttaaaagtgccgcccacttttgaccgcaccactgtccaatgcacgtaccgcgcgcggcgcgacgctagggcatgtaccatatctaaacacgactccctaaatctataactaatataaatatttaaattttttctatcgtcacaagtcggacgaagggtgccttcgtccctcgcggtgcgccttcgtccgcagcccctgaatcccaatccctctcagaattggatacaagagaaacaatttccaaaatcggcacaaccaaatcactcagctacaataatcacaaaatcacaaaataaacatccaagaagaactacaatatacatcacaatcacaaaactacatcacaaaatttcactcgcctgccgccggatccaaccttgaccgtcgccactgccgccctcagccgtcgccacgatatccatccatggccgtcgccaccgccaccggagggagaagagaggcggcggaggagggagcctccgccgctggatccgcccgctgccgccggatccgctcgcggctgccgccgccgccgccaccgccgccggaggaaggcgagagggggcggagggagccgccgccgctggatcgaccggcgcattaggtggcggcggggaggatggcgaggcggcgcagctccggagcctttcctcccgctggatctggtggtgggagggcacctctgggcggccgccgctcttcccactactgccgcggaggggagggcgcagccatcgctgccgatgctgcctcctgccgccgctgggccgcaccgtctccacctgccgccgccacccctcttgcgccgccgcctgccgcctcggctacgagagagaggagagcgagagagaagaccgagaggaggagggcgccgtgcgagggggaggggaagcggcgcactggtgaggggagaggggagggcgtcgctggctgcgacggcagtggagaaaacaccgagaaagaggaaaatgaagggaggagagagagaggataagggaagtcgggaaaaacgagaagatgaggagatggaaggatcgaggcgccgcttgctccgcttgctcgctcggggataaggattaggtctggcgggccttatatcttttttttaaaaaaaatgagcactctgtatttgagaaaaaaacagcacaagtatgccatataaccggcacatatagagatttatagagttggtttttaatttttgttcggttttaagtctaatgggcctttcttttataacttttttatttctataagaaatatattttttaaagggctcatatcataaaaactaaatcctaacgatctaatattttttatatttttgataattttagtttacccgttgcaacacacaagcatctatttattaaaaaattttaaataataaaattttcttgacctgttcttgtccgctctttttttattatgttttttttttattttttcccctcaccatctaatcttctttcatttctttttaatgtctacttattaatatttgacctcaaatacaatttgtaaataaaaaacaatactcactctcacaaaattaataagactgttttttacgatttgttgaactccacacataggtaacaatacacaagtatattcccactattgcaaagtgggtatagtttaactggataggtttcttgtggtggaaccagtcaatctggattcaaatctttgatttgacacgggtgctcgaggcgttcatggttacttcgtcaatctcaatactcgtgttgtgagcgcgtttgcactttgtgtttctaaatatatatatatatatatatatatatatatatatatatatatatatatatatatatatattctcgcaattcaaagtacattgagtacaaaaattccactcatgttctacataaaaaataaatatttttgttcatgataccaattttcatctgtcgccttttcggcaaagacaatcatattattcgtccatccattttctcccgtgctacaaatcatccaaactaaacatcatttctacaaatatagagcagattatttatctaaaagcaaacaatttttttgagtagattagttgtctaaaccaaacaacactattttcactatacacactacgtaatcacccagtgcaacgcacgagtatttttgctagtatcatctataaattatgagatgaggcgagaagagaaaagagagaataagtcacctctcatacaagcatcaatctctttacaaacttaaggaaatagaaaaaaaaaggttgattggatgagagtggataaaataaaataattatgttacattagggctagtgtattaaatgcgatgtggtgtatgagatggccgctaataaattaggtggtgtttggatccagagactaaactttagtccttgtcacatcggatgtttggacactaatttggagtattaaacatatactaataataaaaataattgcataaatgagagctaattcgcgagacgaattttttaagcctaagtaatccataattagcaaatgtttactgtagcatcacataggctaattatgaattaattaggctcaatagattcgtctcgtgaattagtccaagattatagaatgggtttttgtaattagtctatgtttaatactccaaattaacgtccctacatccgatgtgacagggtctaaaaattttagccccatccaaatagggtcttagttgatgatgtggataatattttaaagaggaacttgtaaaccatcgccgggaagacgccatcgacgacatggatgacagatggggagggagccacctagattcgcgccgatgcagctaaggatgctcattgacggtcgaagaagaagagcaggcgatgacggctagggaggaagccgccttgatccacattggcgttaacggctagagacgagcgctgacggccgaagaaggagaggatgcggcggctggggagggacccacagatctgtgccgacaacgacagttagagagggagctgtctcaattcgtgctaacgatggtgccggggacgcgcaccggctgctgaagtaaaggatgtggcaaagaggacaaagccgctcagatccgcactgacgacgacggctaagagcaaggctaataatacagccagctgctgacggtatagatctttatagcctatctctcagctcactcatatagtgattaactcttcctataaatatatggttcacctgtctgtctcacatatttttattttggttcttgtgtctaaggcggctgtaagtttacaacccatttcttatctctctcctctcctcttttatctacatcagcatttagccttcttgcagccctctattattcttgctctaaggcggaagccgcctcgattcgtgcggacgatgacggccggggggaagcctcaatccacgccgattacgttgatcgtgcctggtttggagtctttcgtctgtcgtgctagttttaggtcaaggtcaattgcccgtttgtattgccagagtggagcgcttggagacgagcacactgcgagaccgttgcaactcgccaaggagttttggtcgcaacgtcgtgtacaaaaagagagtcaatatagtaagacaagattagtttcttgatcatgattagggcatggggcccaaaccattggaggagaaaagaagataaatgggagctatgtgggtttttctttccctttactttttcatgaggaaagcccttcgtacaaaacaaaagcttgacaagggtccttcatagggtgtattcaattcacaccaaaattagaagtttagttaaaattgaaacgatgtgacggaaaagttggaagtctgtgtgtgtagaaaaattttgatgtgatggaaaaattgaaagtttgaagaaaaattttgcaactaaacacggcctggtatattgtacgcgcctactgaacctgtgggccaaaaggactgcttcattgcatgggcctttatggccagattgaccacggcgtaatgaaattgggcaaagcagagcatatacaactgcacgaccaccgtaacgtggatgatgatagccatcatgatgcgacgataatagttgtgaggaccatattagacgataatgtactcttgctgtgcatgattatacgcttgggttcaataacgaatgttggtgttatctgtatttggctgtagccctacttcatttgataatctgtccgttcggcaccattattatcgtttgataaggcgtgagcggaggaccattaagctcgctcctgtatcatcatgtgatgatgtccctaatactcgacgaaagcgctgcaaaaagaaaaatccgatgaaaaattaggctgcttttgagagttgaacaaagaaaaaaaacatcatgtttttacgcgcacacttacctaactactaaaatatgtattttttaaagtgaagttgtggattagcctaaaaccagctctacttttattttagttgaaggtgaaacggtttggttggactacaagagtgatacagctagagctagagttgtgctagataaaccattggtaattttcaccgactcaaccaataaaagttacagcaccgtgattctgtgaaggagcagtaacctgcagtcgtgaccggagcagcaagatcgcagccgccgaccgcgagtgacggcgagggctttttccccgtgacctcacctgatgagcgtgcggagcagaggcagcacagcagagacgacgagtcggacatgacacgttcaggctcatttccacccgtcacgggcaaatcgtggcgcccacggaaggaaaagggaaaaaaaagaaaagaaaagagaaaggaaacgaggaaaaagaaaaaggcgaaaggggagaaggcccccgtacatctcacgctcagtcgctcacttgcttacatatctctcgctcacttgcttgcttgcttacgtctctctcgcacactcccactattctcctgctcctcctccctgatcttccctctctcgctgccgctcctcttctcgccggccgcctcagcctgcggcgagctcttcgtccagccagtgcacccgaggtacgcgccgtgctgcacgcgtcgccccccgcggggtttcgttcgccgtcgctcgattttggttctcgcgtacgatttccatccctttttcgagctgccgggctgatgaagggatctgggggtggtggtggctcctcgctgctcttgggtttatcttgtggtttccggcattactcgtgcttgatctgcgtggctggagctggattcggggagtgggaaggggatcttggggtggatggcgtttgagcttaggcatttcttcccctggccgaatcgttgcggtttttggagtcaccatgggaaattggggcgtaattaagcaaggcttttgtggataaatgattttaatctagtaattttgagctatattcctctgcaagttttggagctcactcctatgtttttttaaaaaaagaaaaattaccctgtatttttcctggtgatctcctcctccgtcccgtactgcaattaactatgcttggatgattagatccttactgcgtgtaatttctcgtccaggagcttaggccggatcctgggatccgtaggagaaaccttgctcgggttccggagaatgtgaccggagcaaccgcggcttcaaatcagaaaaggctacagcaggggagcaacaggggcggtggtggcgcgcggcagcagcagcaccaggccggccaatggcgcagttgccatcaatgctgccgcgccggcggttggctcggcgccggcggaggtggccagattccactcccaaccaccacaacaggatagggtatatggctctatatgctctgtgttctttctcatggaataacttattatgctttaacttcaatcttttgtgttgcttttttggtacgtggattagtacgtgcaattgctaggccttggcgaccttagatgggcacagacctttttcgtagtactgagtacgaactgtactggcctggtggtggttgcaactttgcaattggggcatctgtaccccccaaataatttttctacccccaaataattagggtttagtatgcattaactacttgctttattatgtgaacaatttgtttaattagcctttactttatgttagttggtgttgaattgcatgcactttgcaagtttccttcgctctgtaatctttgcctagaccccacaacattttctctgaatagcatcgtatggaccgttttgtcaacctcttttttcacatatactatagacatagctcatggatcttgccttagatatgcatagagttgaaattgggagttgggagcaaaatatcttttctctttggctgtattggatgatacaagtataaactcactgtagcattctatgttatttggtcgtttgaggacaaattgaggttcctgccaattacatggtatgatgaaaacattgtctaacttttgttaaccacacacttttatgcttatttgttgttacatcaagttcactgtaagtgttgtttccatggttaagaattagctagtaatattctttgtctatacagatcataaaaagtggagaaaagttaaattgcttttgaaattatagccttcacacagattagcacgctatttcttaactcttattcattactgaagttgactttagtatcttcataaaaatcaaactggatgacttttatttctgtttcttgcaacaactaataattttagatgttctaatacatgtctctctacatttaacagcagagtagatgggctggctgtttttctgccttgtcatgttttggatcacagaagggtggaaaacgaatagttcctgcagcacgtatacctgatggcaatgcgtcaactagtcgtggaaatgcacaccaatctggtagcaattccaaccaaaatgtggctctgaatttatctcttcttgctccaccatcttctccggcgtccttctcaaattctgcaattccttcaactgcccagtcacctaatcgcttcttgtcaatatctgcaaactctcctggtgggccaacatctaatatgttcgctgttgggccgtatgctaacgagcctcagcttgtctcacctccagtcttctcaacttacacaactgagccttccacagcaccactgacccctccacctgaactaactcatgcaactactccctcctctccagatgttccatatgctcggtttcttttttcagctatggatcttaaaactgctggcaaggatcacaacatgccgtacttatctacagcatattccggaggttcaggactccaggcatcttatccgctttacccagaaagcccttctagcagcctcatatcgcctgcttcagcaactccaaggactggtctttcatcacctatccctgagcaagaggtgcctactgcacattggaagacatctaggtccgcctgtgacacaccatattccagggcttcaccaatacctgagcaagaggtccctacggcacagtggaagacgtctaggtctgcctgtgacacaccatattccaggaattcaccgtccaatatttttgggcttgattcagctgcttctagaaactacatgttagataataacttctttcggccagctgcatctgcccagttctacctggatcaggctcagcagtcatttccatataataatggaggaaggattagcgtctcaagggacaaacaagacgctgaggaggttgaagcatacagagcatcttttggatttagcgcagatgaaatcgttacaactcaagcttatgtggagataccagatgcgcttgatgagggattcagtatatctccatttggaaacaatgctcctgctaccgaggtagataaaccactcttcaatgtaaaagtgaccacaagcccaaagaaatctgcagaccagctttccaacgactctccacataatgtggtgcacttggacatattcaaaggtaattaccctgagctttgcttcaaccattcatttgtattttggcataatagaatcaagtgtttggtttatcttgtgaattgctggaataaacagttgtttcaacgcaacttgtaagcctgaagtctactgttttttatcttatcaccctgtgcccagattttgatgccacattcttcaatgctcctttgatgcaattttctgtttctacgcttttattgcaggaacaaaaggaggggatctatctgaggatgaaggggtcgtgaaagattgtcatcctttcagaaaggcgatggatgaaatatctctaaaacccatagaagtcaggaagaaagttcagcctggacagtcatcttcctcagatgcagaaatcgagtacagaagggctaggagtttaagagaagccaatggagttttgtcatggcgcagcaccctggcaaggcaactacagtaacgatgtggtaatacgcaggataagatagaatgcagagttcccttggcctagcgttcatcaatttgagctgttgttagaagtaaaatctttaggcgaagagtagcccgtactgtatttctggggatttctactgccagatcatgctctggatatgtgactatcagcctgtattctatttaaattccaagttcgtcttttgtagacactctgttcgttagctgaatcacagaatcagtgaaatggaagtgcattttgaggagagatggagaggttgctcggctcccaatccatttcctcctgtactgctgatcaattggataacttgatagctcagggcttctgcgtgatgggctgttctatgaattgtgacgggtccttggacagcatgtcgccgtggatcttacgactttgcagccttgcaggcttgcagcattgatgatgatggcaacggtgaactctgcaatagatcgtgaaagtgttattagcaagtcgggtaacgactaattagtcaagtgacaagccctttcagaagaccgcccccaaaaaaatccaaccaggccgtcgatcaaactgatcaaaagggccgccaagtcgccatatacacaaggaatccgattcatacaggccaaagctaaaacggacaaggaagagtcgcgcgacacggcgcggcgagaccgcgagacggctcacggcgagcgctcttcgatcctcattgcggcgcgttgtgcacctcgagcgcgcagtgcgactggaagaacgacaccagggaggccggctccgccaccggcgtcgacagcgccgggtgcagccacccaccaccgcagggcgcgggcgcgggcgacttcgcggcgtcatccgccgcctggcggtcaccgccgcacacgggcgaacgtgcggcggcgccgctactaccttctcgccaagctcctccctgcacgccgccctccctccttggcgcccctgccgccgccgccgcctggtcgtccggctcccacgccgccgacggcgacacgacgagcggggacagcagcggtatcggcatcctcccgtcgccccacgcgccggtgggcgacggcgtggacggcggctccagccgcagcgtcgcgggggcgtgcttctggagccggctcggcgggcgcttgaccttcttgtcggaggcggacggcttcatctccatcggccggcgcgcgcgcgcgtggactcgtgccccctccctccctctctctcctcccaaccgtggcgacgcctgctcgttctcggtggacttgtgcgggaaacatgcgtgcatgggggctggggggaggcgcgcgcgtggagcttataaacgagcggcgcgtggggagagggcggccgcgtttggcggacgagaggtggcgcgaggcgtggacggtcgtgagggattcgtgcgcggttcgttccggttttggcttttacacttcgctctcctcccttcacgcaacgcaagcgtagccgcttcccatcggagcaaagatgtgcgctgcaacgtgcgggggacggttgcaatatcaagtgcatttatttattatagagtttgcgtgacgtgtctgcgtggagagattgttgccagagcgtgttcatttttggcggcgccctatcgatgtttgaggttttttttccctttttttataggcatcgatgtttgagttgtttaagaatttaacagcaatttaacaatacttaatgagccgaattctttgtttgctgtcatgttgatgacaaacaagaaaattaaattggacagttatcttccatctcgttacccgctgcccttccattcgttacgtaacagagtgtacagtagcacaagcagagatccagagaggatggcttcctatcctaaagatcatggtgacgaggtgcgctgaggccgaggtgcgcaggtgggtcgcggagatcgggccatcggggtggagaacgtcgggaggaagctggtgaactcggccgagccgccgaaggtgacgctgagtaggctgatggagtaccgagtacggcgtaacgctggtggagcagcaggagaacgtgatactcgtaggtacgtactttcgctgagcagcccagaccttggtgttgccaacgaggaacgatgaagacaaattttcttttccaaaactgaaactaagaaaggagcaaaaatttggaacttcggcaaatctgacaggcgtttgtgaaagaaataagttcattataagtctctcttttttatgttgagtttgaatacatctttatctctttgaaccgtagtattagatataacacgtccctcaactttcaatgcaggatcacccaagatctttaagtagtatttgtacccagttttagctaacataacgagttgacaatgatcaaccaagccaagtcaacatggggcctacgtgagcctgacatgtcaatagcatagatgcctaatcttcttcatctctgcccatcttccctctcttccccatctctctctacatggcctccaggacgcgcggcgggtgggtgggcgtcgttctcgcaatgcacggaaatgtcgtcgatatccgctttcttcggcaagtgaacgaccacggtgaaagaccccagccccctttggagacctcgccttccacctccccatgcataaattcctcattcttgtagtacaacagaagcctgcatcggaaccgtagccaaaatcgaagcaaacaatggctggcaggatttactggcgacatgggaagggagaggagagaaggagaatgtcacagagctcggcgtcttcctcggcccgctagccccaccgcctagtgcccgtctccgccgctgtgggcacgttgcaatggccggtagaggaggggatgcggcagcggcgatcttgtctcctttcaagcggcgacgcccttgacacagagcttgagtagccgcatcgtctcctccatcctctctcttgagcggcatgagctcgacggcactgcctggtctccttttctcctccactgctgcgacgtctgtgtacctagcaggaccggctcttgccttcgtgaccgctaggggaggacaccgtcaccgtgttttgtctcccgttcacaccgttgacgcatctgacctcggctacctcccctacctcgatcgacagcggagacgcgaggccgtagctgtggcttggaacggataaggggaaaacggacgccacgagggggttggacgcgcgcacccagtggtggtgtctccgccgccaacgctgatgccctcatccacgttgcgcgttggtcaccactacccgcgcctgccgatgccctcctttcgcactgatgctgccgagagagagagaggaggaggggaaggagatgatgtgtcattgacatgtagagccatcattttttattttttatttaaagtgaaatgctgactcaaccgtcacgtcagccgaaacgggacattttgctgccctgggatattaagtacaccgtttttgcaaattgagagacacgttatatctggtattgcggttagggtcgaattttaaactcagcgacgaattggagggaccataagtgaacttattcatttgtgaaacaagtcgagaaatttaaatggctgcgaaggtccctcaacttatcatcgagttacaaaatcctcccccaaccgcaaaaccagatatcgggcgtccctcaactaacaaaaccattcactttaggtcgttcggtggttttgacctcggttttgtccgacgtggcggctgagtcagcatgggacccacgtgggccccacatgtcagcttggccacgtcagctcttctctctctctaacctcttctctgtcacgccctgaagttcctctttccagctttaaaatttgtaaaataaatcgtccgaagaaattgttctttttaacctagagctaattcctcaaattaataaatgcaaataataatcggaatcggcatgtggaatttttcttggattctacatgtcaaaatatgctaacaggatttttagtggaattttcagagccttggaaataattttaaccaattaaaatgagcaaagggcaatattaaatccctgggaaaatcctttttcctttttatcttttcttttccctcctttttccttttcttgggccgccggcccatttcttcccgcgccaacccgctcctccctcccactcccaaagttcacccggcctccctctccctctcgggcgctgacaggtggggcccacctgtcagtcctttccccttcctccagccgcccacgccggcaaccgccgaaaccgcgcacgccgccgccgtttcccgcccttcccgcgcccactcctccccactccgtgccgcgcccacgttgtcgccccctctccgctcctcccgctctcgcgcgcgccccgcaagggcggggttcggtttgaatcccccctccctctctctctctccacctcccacgtcgccggcgaaatcgggagcaccccggccacgtccgccactcccgagccccaataaagcttccccgcactcccctccacctttttcctctttccgccgctctctcccgtgccctccatcactccagcgccgctacacccatcgccgccgccctcctgccacgctccggccaccgctagccgtcgctagccaccgcgccgagcctcactgtcgacgccgccgcgttcaccatcccgtgagccggcgcgtccgccatccgcccggccaaatccaccgtcggggcccgcttctccccgcgcgccggtgagtaccaccattgccgccgccttcggccatggtttccgcccgccgtagaccacccctctccctctaatccttcccattttgttccctaggatgtcccggagatcgtccgcccgtcgccgtcgtcctcccgtcgctcgtcgtcgtcgttcgccgtcgtctccactcgcgctggccaacctcggtgagaaactccctctcctccctctttccctctctctcgtgtgcgccgctgttgtcacgcccagaaattcccgaatagaattccaagcagaatgtgcattaaaatccccgtccaggaccggccggggtacacaaacgacaatgttgacattcagatccacgtcttacaaacatcataaaagtcttacataaatgcagcggaagaaaagaaagacaacaggggctaagccttgactagaactgcagcgggaacaccactccacaggcatcctcgacggcacggacgaagcctactcctcagagacacctccatctgacacatactcgtactctggggttgggaaaaatagagcaagactgagtactacccactgtactcagcaagtcataccggaataggggtatgatgcagggaattatcacagaagagctagagtggttcatttgcataaagcgagcatttataaacagaagttgaaagatttaaacagttgtaataattaattaatattaactatccactgtccaacgctatcccacgttgcaacaggcccaaccatccacttaaactatccaaattcaaaagattacactagggtgaaactaatcacggtgaatctggttgaccgcccataaccgcgggcatggctattcgaatagttttactctgatcagaggtgtacaactgtacccacaagacacagccccacgacacgtttccgtgcgccgacatgccaccacgacataccggaaagaggccgtgacaggacccttcgcataaccccctctaaccaagcacaccacacctcaggtttcacccccactcctcgcaaggcagcgggcagtcccctctcgtgcctaggtgaatccggaagccgcataggccgtcgcagggcccatccaaactccatcacgcccacccttgcctggatgcgtcggctagaggaaagctacgctacaagctccagctgttgcccacgctggctagtggtaagtactataagtttcttccaggggcattccgcgaaccggttccttaactaccatgggt

SEQ ID NO: 20248 - DNA, 1483 bp, Oryza sativa
cattcataccaagctctaggggcttgtttgagcccgtagagcgccttgtggagcttgtacacatggtttggcaactttggatcctcgaaccccggtggttgctccacatagactaactccgagataggtccattgagaaaggcactcttgacatccatttggaataacctgaaatcatggtgagcggcataggctaaaagaattctaattgactcaaggcgagcgacaggtgcgaaggttcaccaaaattgagaccctcgacttgggtgaacccttgcgcaactaaccgggctttgttccttacaaccaccccatgttcatcttgcttgttgcgaaagatccacttggtgccgatgacattttgcttgggtctctccaccaaagtccatacttgattgcgagtgaagttattcaactcctcttgcatagccatcacccaatccggatcaccaagcgcatcttccaccctggttggttccaaagaagagacaaacgagaagtgttgacaaaaacttgcgatacgagagcgagtagttaccccttttcttatgtcaccaagtatgttgtcaacgggatgatctctttggacaatgtgatgtatccttggatggtgcactggggggacctaagcctgatcagaatgctctaaagtgccctcagcatcgatcccatccacttgtgccattggcacgtcttcactgccactgatccggaggttccggactgtagaacccggaacttccgggcctggagatgtccggaggttccagtcaataggacccggaacttccggctcagcagacacagcacttgtagggctattggatgtcgatgacgcggaggttgatccctatcttcttggtcatcctgcgtctcgactggtcgtatgtctccaatagccttagtacctatagcttgatttggatccacatctcctacaatatgtacaacaacttgctctccttgggagccattagattcatcaaatgtcacatccctagtgacttcaacaataccggaggttttgttgaagacacgataggcatatgcatttgattcatagccaagtaagaatccctcatccaccttaggtgagaacttagatgagcgaggcctcttacttaaaataaaacatttgctcccaaagacatgaaaatatgaaacattaggcttcttaccactcaagagctcatatgaggtgttctttaggatcttgtggaggtacaagcggttgatggcatgacatgcagtagtcatggcttccgcccaaaagacatccgaagtcttgtactcatcaagcattgcccttgcggcttcaatgagggttcggttcttcctctcaacaatgccgttttggggaggattatagggggcggagaactcgtgcttaattccttcttcatcaagaaatttctccacttgagtgttccttgaattctcctccattgtcgcttcgcaccctcttgatagtgagatcatagag

SEQ ID NO: 20249 - DNA, 1892 bp, Oryza sativa
atccatatgaagaagctcgagtggtcttgttgtagtcatgatgttttttataggatgtggactcccaacttgcttcccggcttggcagcactacacacacgatctttctcaaaagaaacattagatagaccaagaatgtgttccccttttagaagagatgccaaattcctcattacaacatgggctagcctacggtgccatagccaacccatagaggatttagcaatcaagcatgcctccggattcactctatctacgtcgaaatcaacgagatagagatcaccctttaacacacccttaaattctatggaagagtcatctcgcctaaaaaacggtcacatccacatcggtaaacaagcaattaaatcctaacttacacaattgagacacggataataaattgtagcttaatgaattgacaaggaggacattagatagagattgattctttgaaatgacaatcttaccgagacccattacctttcctttaccatcatctccaaagacaatattttcacgacttccaccctcctcctcaagacttgtaaacatactcctctctcccgtcatatgattggtgcacccattgtccacaacccaacttgagccaccggagaagtatgcctacaaaagagatcaagcttgggatttaggaacccaaacttgtctaagtttgggtcccttgatgttagtcaccaaagcctttggcacccacacacaagtgcggtacttatcattgtaattcccattaaaataagcaaccactttgccctctgaatttttggaaattacatatgaatcatagtaaagaccctctggccggaacttcctggcattatacccggaacttccggtcagccccttcggcctatcagaagcccgaaacttcctgacaaaatgtccggaacttcctgtcttacagggcatgaacttccggtcattttgcctagaacttccgggtgtctgaccagtgaggggacaagtcacctcacttgcttatggagcttttccttctcttacaaacatcaagcattctttcccatttaccatcacacgcttagacacaggacttccaccagaaaacccgagcccgtgtccatccttgttaggatgagcggtgatggtcttgtaaagggcatcttttgaatggtatgttttcatgcatccatatttcaccaatgtgcccaacctttcattctctttcttaagagcttgcatagcatcaacattagtagcatgagagttcaaatcaatattgtaacacctagcacaaccattgctagtagatgggttggaagaattagaaaccacatttggttgagaagtgctattccaaagagtgtcaaattgaacttcaagatctttatgacttttgtctaaactagcaaacttctcttgaagagtttcattgacattcctaaggctagctagagaaccattagtaaaaattaagctcattagctagttgttcatttttagcacattctttagctaggatctcctctaaggcaaggtttcttttcttctcaagaataagtaattcttcttgcctttcgagagattgttctttactatccaaagctctcattaacttagccaaatgttgcatagcgggtttgctaaagctcttaagcacatcatctaattcattatcactttcctcatcactagaatcaatatcaagagaggtgtgagagggcttttgagtcatcaccttgcggccttgggccatgaaacaagagtagtggtagaagtcatcgtcgtcatcactcaagttgttgaagagacgcttattgcttgaagaagatgacttgaaggcgacggtagcaacaccaccttctccttcaaccttgtctttcggcttgggcttgggcttgacctctggatcttct

SEQ ID NO: 20250 - DNA, 3977 bp, Oryza sativa
ctcttgacaatagaaagccatctcttcatgcttcactttcttcacaacttgactcttgcttcttgttttgccttcaaagcaacttcttgattttagatcatggcggcattcttcaccatttgcctcacttcacgagcttcctcttcttgcatctcatgagacacaattcttccaagaatgtcacttggggtgagtctcttgaagtctttcctttcccgtatcattgatacaagagtgggatatcttggaccaaatgcacggagaagtctcttgaccacaaaatgatttgtcatgtcctcactcccaagtcctttaatcttgttgacaaggatcatcatcctatcatacatctcttgtggtgtctccttgtcatccatcataaatcttccaagccttccttccaataattcaatcttggcctcacgaacggcgggtgatccctcatgagccaattgcaaagtatcccatatctccttggcctcctcaagcccatcaaccttgttgaactcctccggactcaaggcggagagaattgcattggaagcttgagcattgcggtggatgagttgctcttgctccgaagtgagctccatgtcatcatggggtacatcaacacctgtacaaacaactttccaaatacttggatgcaaagatattagatgcaacttcatcttgtgcttccaagcggcgtaatgtgtcccatcaaattgaggagcacgcccggaaggtacggagacaaagttgtgagggggaatggtaagtttgctgtaatcaaaatgtatagtaactcccttgggtgatggagttcccttgcttcttgctccatcttcatttctattttccccgttctttccccctaagtccgacatcgtggatcactcaaagcggttgtcacgcccagaaattctcgaaccagaatttctaagctgaatgtgcattaaatccctgtccaggaccagccagggtacacaaacgacaattgttgacatacagatccacgtcttacaaaaatagaaaagattacaaatgcagcggaaaagataaaagcgagctaaaccggggagcttgacttcagcagcgggcgactccactccacaggcaatccttgacggcagcgacgaaaccaactttgacaaaacagctccaactaggaagatcttcagctctggtgtgggggaaaagagagcaagactgagtactacccactgtactcagcaagtcataccggaagaggaggtatgatgcaggatataaccaaaggaggctagaggttcttttgcataaagctagcatttaaaagcagtagttgaaagcagtaaaacagttgtagtaattaatcaatattaaccaaacactgtccaacgctacaccacgttgcaacaggcccaaccaaccacctgaactacaccagttcattaagctaaactaggggtgagactaatcacggtgaatctggttgatcgcccataaccgcgggcacggctattcgaatagttttactctggccagaggtgtacaactgtacccacaagacacgattccacacatgtcgccatgccccgaagtatcaccatgatactgcaaagggggaaatcgtgacaagaccctccacataaccctcccctaaccatccacaccacgctaaggtttcacccccacccctcaaaaggcagtgggcggtcccctcttgcgccgcggtgaatccggcagctggacaaccggacaccccggccgacccaactccatcacgcccaccctcgccaccggtgcctaggaaagggtcgagctatacttcagatcaagcagttacccactcccgcttgtggtaagcacggtaagtctcccagggtttcccgtgaaccggtccttaattgccatgggtgcgaccagcaaaaccatgcacccacaacccaccactcagtgtattttaattaactaacaccattgcggtggcacaaatctaaagctatgccaatagtcagagtctatgtaataaggtgatcccttttgtgtactagttgaactaagcatggctaagcatttcctaaaccaacatctaatcattttgatacccaggttatcaatggcatatggtaaacaataaatggctgagtaaaaggacccatccctcattacattgtaaaagaatgcaacatttaatagaaatgcgggatatttgtaaattgggtacaatatgatcaaacgtattgcatgacttgccttgctctcgaactgatgagacctcagcaacgtcttcgagaaactgcggatcgacgaaacggccgaaacctacgcgacaaacaaagcacacaagcaaaacatgctataagactacagaaaaaggaaacaaaaccatttttaatggattctttgcatttttcttgatttactgagacttgaatggacttaaacggagctcggatgaattacttatgaattttagaagataaactgtgtttttactaataaagaaaagtccttaatcaatttattgcgcaataagtcccagggctgacgtcagcggaaggggggcggctgcgccgacatgcgggccccactggtcagcggctccaaagggagggaggtggcgactggcaggtgggccccaccaggcggtggctcaagggggaggcgagggaggcgccggcatgtgggccccacgggcagcggctcaagggggagggagtgggcggcggcatgctcggcacggctcaagccggccggccatggcgaggcgacgacggcgcacgaccgccggcggtgcggggagacggcggcggacgacgcgaaaggcggcggcggacggccggagcggcggcacggccaaaagcggcggcgcacgcgtgaaggggagaaaagggagggggagggaggcatcggccgggctcagctcggcctcaagaccgagcggggcgaggcggcggcgaggcacgaccaccgacggcggggaccggcggcgcgggaagcggcggcggcggccgaaaggtggcggcgcatggccgaagcgcggcgatgcacgtgcggagggcggcggcatgcacgggagagagattaaagaaagaaggagagagaggtagtcctcaccggcgatgtgggggaatcggggtccggcggcggcggacggaaaacgagcggcggccgaggtgcgggcgggctcggtgagcgcgacggcggcgatggtgcggcgcggcggcggctctagcggcggcggctcgcggccgaaggcggcggcaagcggcggagctcgggtgtgacggcgcgggcgcggtagggggcacgggaggagacggcaaatgggggaaacgagagagggagctcgggagagcgatgtataggtgcgggagggggcggacgtggccggggaggtggccgatttggccggcgacgtggggaggagagagagaaagtgggggattcaaatcccccaccacttgcgggcgcgcgcgcgcgggagatgtgggggggggaagagcggcgacgtgggcgcgaggtgcgggcgcggagagggacggagaaggcgggcggcgtggggaggtggggcgccggcggttggggctcggctccaaccggctagaggaggaagacgaccgacaggtgggccccacctgtcggcgcccgaaggagagagggagggagggaggacttcggggaggggagaaggaacgggccggccccaggaaagggcgccgagcgcggggagagagatgggccgacggcccatctagagaaaaaggaaggaaaagaaaagaaaaaggaggaaaaggattttcctgggattaaaattgcactttggtgatttttaattggttaaaattatttccaaggctctgaaaattccactaaaaatcctgttaatatattgtgacatgtggaacccaagaaaaatcccacaatgccaattccaattattaattgcatttattaattaaggaattagctctaggttaattaagataatttcttcggccaatttattt

SEQ ID NO: 20251 - DNA, 614 bp, Oryza sativa
ttgtgattccaggaatacatactaaaccttcagttattggcaagtagttaggaataatattcagtcatacacttagttgtgtggaattttggaaaagatcaactaccgaggcagacctttggtactattgatatgtcagtttgatactttcatacattgcataaaatgagggttcaatgttcggaaaatattcagacacagtttagtgacaacttgtgatattaacccttttggtcatagaattcaactatttctgccaatatttcaattgctttgtaaatcgtttctgtatgtttgtgcaaattagtgtttaatgtaaatcctttgatatgttttttttttttggctggctgcagttggatcaaggtcttggcattggaagcaaaaacccattcttcaaccgtcaccaacttactttgacaaagtttgttaatttaaacaagcaggagaaaggtgctggcaagccacttccagctgttttggttcttcatggtcattatgcaggttgtgtaggagatctgccaagctatgatgcatttacacttggaggaccttactcagttaggggctatggtatgggtgaactgggtgcttccaggaatgttcttgaggtg

SEQ ID NO: 20252 - DNA, 642 bp, Oryza sativa
ataaatctagggctggcgtcatccaagaggggcggcggcgccgcaggtgggccccgcttgtcaccggctcaagagagagagggaggggcgccggcacgtgggccccactggcagtggcacaaggcgggaggggcgcggctggtggctcggcttggcttcaaagccggcaggcccagcatggcgagcgacggcggcacgcgcggtcgccggcgacggcaaccggcggcgcggacagcgacggcagacggcgcgaaaagcggcggcggcggccgaagacgacggtgcgcgcgcggaggacagctgtcacaccccgaagttctcctcccaagcctaaaatttaatttataagagaccctaagaaaataccggtgcaaagcaagagtaaacccttttaaatcaatgcaaataataatcgagtgggcatgtggaatttttcttgagttctacatgtcgaaattcactaacaggatttttagtggaattttcagagcgctcgaaataattttaaccaattaaaattgagcaagcaatattttaattctagggaaaattcttttctcctttttctttttctttttcccctccttttccgaatgggccgctggcccattctctcctttcctccccctcctccctgctggg

SEQ ID NO: 20253 - DNA, 2846 bp, Oryza sativa
tcccatgagcgccgacactccacgttgccttgacgtcaacccggacgcgccctttacctgcggtaactaccaccgcagcagcggctgcccccacgcgccagccatccgcaccgcacaccaaccaatctctctcattggcaactgcttctgcttcctcttccatggccaccgccacattcccacctcacctcacctcatcattgattactgcgtcaaggtagtagtatcagcagcagcagcagcaggcttgcagtgtcatcacaagtgaaagtgactggcttccggtgtgtagatatagtggtctgcagtaactttatcacataccagcatttctcaattctcaggccacgaaagcaactgccatgccatacacactgtgcactactaatctcccttcgcgcactcattggctcatctctcatataattttccattcccatttacacagccacagaaaactaatcactgacaggtggcccgtgaacagtgggcccatggggagtcatctgttgacaatataatgggggtagctacctaggtagcgtgtagatgtaatcgcgtttcgcatggaaaaaagtcattcatagaaagggtgccgggtatatataggatcctagctatagatagctggctagcgcccttttggagttttgaccagacccgtttagagtgtcaattgagcaagctgtggtcaagctgagacagctcacttcaagctcgctagctgtatataatgtatacatcaaacacagaatcgtaatgtgcccgagcgctttaagcatgtgattacggtgtgatcgctcgtagtggcacaccatttcttttttctctttagcgaatatatatgtagcccacgcacgcactcgtgatcacctctaagattttgactcccggccacaaatatcccaaaattttatatttaaccgggtctacgagtataactgttatttttatattccattcttaacattatctctcaaaacacaattgcattgcccatacagttaattttttttggccattttctcgttctctgatcgattaacacggtataattttagaattcaggagcaaaccccggtggttactactcgccaaacgatagtgcacacacacatgcatgtacagcagtctgacatgtttgttaggggatgcaaagtgtgatcgtcatcatccatgaaatgaaggacacaccatataggagcagccaaatggttggcaggcagagaccaaaatggagctatccaatagagtggaagcacaactggttttttgtacgttgaaactttaaacaagtgtctaaagttaataattactagtactactgttaggttataaaaaaagctgactagttactggtgtcacctaaaggttactactcctccactagaggggccagcgcgttaaacgacagcttcgcatcattagctcacgtatcaatattccgtgtgtcaggcgcaccatgtgtcaacatgtccaatgtcgggtggtcatttcaattcatcttgcacctgctgctgctgcttgtgtacacctagtactcctatctcggttacttagcttttccacctcccatgcgttaatttactgcgtgcaccacgtgccagtaggcttttttaccgtacgtgcgtggtatatacgtacgtacacctactcatacggtctgtatatatgcatgcatatatatgggctcaattgctgccatccgtgtagtcgaaagcgagctataccactcagctcgaacaattcagatattttcttaaaattgttgtgaaacttgtatgaactacaactagatatgaacggggatatgttaattgaaaaacctcggctctcaagcacaaatggtgaaggccaacgtctccttttatagaggccagggatggcgtcgcctatgcctcctgcttatctcttcgctactgtatcttcacgggagctggctaaagtcgaggcctttccaccgaaagttttactcttcacagtgatatgtcattcaccgcaccctatattgtccccttatcctttatagggtgtccttctggattctttcttgggtaatcttctgaatttcttttattcttttattcttcttccacgcccaaattgttgatattctattatcaatatatattgaaaaacatatttagcttatattaatttattcatctggttgcccatggccaccaagatccattgtgtccaaatcagaaaaagaaacttctaatttctcatctactgccttttttatttgctcaaatttctgatccatttcttgttttaattctttaagtatttcttccttcaattccttctttaactgtggggaggcttcttcaaatttttctattatcttccaatcaatatattccccatctaatggatccactccttttgttaagcattccttgtatgtgggttttttaaaaaacccttcttcttttatagtcatcttaataggtatttctgaagtcttctttcctttagcttttttgcatttttgaatatattcttttgcagcaggctctagataataatttattcctaatatttttctagcttggcttaatgcttcatcaatatccttatatttcttccaagatattcctcccattaatttagcatctattttttgagccacaatttcttcaaaagaaatgtagaccccagggagctttccatcaaatactacatatataggcttttgttggattacttcatgatcttcattggcaggcattaatgacccatttattaggtgaaaatattcagagaggctattcaatattgataacaaataccctttttcttcccttttattattgtattggtaccagaaattatccaag

SEQ ID NO: 20254 - DNA, 1557 bp, Oryza sativa
cagacattgattacccaagaatctattagcatcgcagaggtttataatgttgttgatgccttatcaaaagtaagacattttttttgcagatgttttattctagtgtcttatgaccttttatttggcttacacatatgctattttgcagcttgcaatcaggcccagttctcctgaatcgctgcagcagttgattgaaatcgctagaagttttgcttccgtgaaggatgaaaatattagacagtcaagggataaaaaggtcaggagaccgataattggtcataccttccattgttccaatagtaaatgttatgctgactccacaaattacacctaactggtttcaggttttatccggtcgtcctttggtgaataaagaggaaaataatgctaatgatgttgcgttcactgatgctgttggttttcaggagaaggttagttgtacacactatatcagttttcgttgtggagacatcacacaggattttatctcctgaaactattagagatagaacaataaatttattttctttatcgatttaactttggttcctgttcggttacatcttttcttcatcatgaacagcaaccaaggtatgacatatgtggtgtatgctctagctgcttcagtgtcatgcaacatgtatcttaatgcagtttactccaaacagctcctccattctcaaaatagatgtcatcgtcaaatcttcaaatgttaactccctaacatatgccaaaaaaaaagagatagaacgaacgctttgatgcgaaaaactgaaaatgatatactagttttcatgagaaagaacgctttcatgtagttatgaatttgtggttagaaaaggcagtgaataaatatttgatttggagactctgtcaatgtccttcaaaaagacttgggagcattcattagtcatttaacagttctacacaggaacattcattttttttttgttcacatggcttaagaaaaggaaacattcctgtgtcaccttctgtacaaaaaaaaactgtgcccccctcaaccagacttggtggtatgaattgtttgttagctggtcattttttttattttgcatacagataatactttgtaacgtgtgcactctgtacatgttctaacaaaagctgacaaactccttgtgcatattatgatggtttcacacaaataactagagatgcctttgttgctaatctcttaataagttgtcactgttcctcagtagattagtttgattagatggatgcatgaaaagggaggaacttgttgaatgctaccaaagctcaagtcctcattgggtgcctatttattcttgattaaaaaagtcacctagatcctcgtaggttttttttttcttcttaaaaaaagatggtctagacattaatattctttgcagactgcagttatgtttattatgtttgatggaatattattttgaatatggttagtaattgattcttaaaagtattgacctctaaatgtgttgatgttacatattattgactttgaaattaacctatattcatggaaagctaatgcattatttggggctgcaggaa

SEQ ID NO: 20255 - DNA, 1608 bp, Oryza sativa
aatgctgcttggtattttcttttccacaatgctcaagtaatttgctttagagtggataatactctagagtagttatgtttgaggaattatgtagctctggaattatatgatcctatttccgaacatgcttaccttcttgtttgatataagttgtgcaataagctggtccacaaaatgtcaataatgataaggaataaggtcaatgcaataaaaattgcagatgacccttgttctaggataattttagaacctaaatcaataaatggcagaatgatcctcctttttccaaatcgtaccttggttggtgctttgtcttaaactaaaatatcccccttgtgtagttttgcttggcttgaattggtaagccacagaagcttcatgccaaagctattgctgtgcaatgcacagaagggctggccattcttccagaggttgcttgtcgatttgttcaaattcatggaaccatatttaagaaatgctgaactgggacaacccgtaagtattattcctgcatattcatttgtggctgtctggtacatggttcactgcattctgattttggtacactattatgttctttttttctattgtagatacacctgttgtacaaaggaactttgagagtgttacttgtgctactgcatgacttccctgagttcctttgcgattaccacttcagtttctgtgatgtcattccccccagctgcattcaaatgcgcaatgttattcttagtgcttttccacgcaatatgagacttccagatccctctactccaaatttaaaggtatttactggttgtgtttatgtaacacttactctaatgcttttccacgctattgtatgtttgatcaacttaaccatttttttgcaacacagattgatcttcttgctgagatttcaattcctccaagaatcatgtctgatgttgatggtgccttaaagtcaaagcaaatgaagacacaggttgatgagtacctcaaggtgaatgacaattgccgccgctgtcatttattttatggacttaccaattctcactcatgtatttctttaatgtaatgatggtttagtgtgtctctattactcactcattcagcaattatattgttgaaaactacttgaccgaaggtggtatatttaatttctcaccttcacttgtatccgcgcagaggccagatggatcctttttaactgatttaaagcagaagttacttctgccgcaaaacgaagcaaatattgctgggactcgttacaatgtacctcttgttaattcacttgtgctctatgtgggcatgcaggtcagtttctaaatctgccatttgcaagttgcaactaaggtgttctgttaatgacatggttattatctaatgcgtctatgtttcatccaactaggcaactagccaagcaatataatatcgtttgttcaaccagcatttatctataattttcatggtcctttttgtgtcctccttttttagtgcaaattcagatttgtgttcgccttctactcatgtaatatgctcatacttggtattctatcgtatggcctgaccatgtttaactggatgcatcatatgatattgattcacaattatagtcgtggcgtggct

SEQ ID NO: 20256 - DNA, 2244 bp, Oryza sativa
ttgatatgtacagatcctaagtaacggaaagttcagaagtgttgagcacagggccgtgataaacccaaataaggagcggatttcagcatcactgttccactatccgtgtgagaatatggtgatcagacctctgacggaatttgtgaaagatggtaaagtgaattacagatcaattagttaccttgatttcatgacacaattcttcacacaacagcttgatggaaagaacagactggagatgttgaagttggaatagcagccatgaccacgatgcctgtagtagtgtagtgaaatactgagatgaagctgcttcaaggctgtgtccttgagatttgctgcttattatatctagaggtgtccaataatcctgtgttatgaggatgatttacctgatattttgagtcttgtcccatatatcaggaactgcccgtactcaggttatgatgcaaacatccaaaaaataaacattgatgcctagaagaattaactgtacgataatagaatttcagttcagactaacaaattaggtacaccatcttccatgctaaattttggcacactttggcattactacatttcggtagcgttggctttgtttagtttgatgtctttaccaaattctagtagagttttaagaaaagaagcttctagagctgccaaaatttaataagatagtaatggttgaagtgtgtttagtttgttgccttaccaaactttggcaatatcaaaatttggtaaggttgaaaacagcaacaactaaatatgcacgtaggatgtcatgttctcttatttagaattaagagagaatgattgttatgtagcatgattcaaccttttcttctttgaagaggaatggtagagctgttcacatcagttgaagcagacagacaaggtgattggaatttgagaacatcaccctgcttttttccatggttagtcatcgctgatggcaggcgagtcacacttgatggagaaaattccaagggctcttttgacgtgaagatggaagatagtgtactacaatgaagagcttgaagccatatcaggataagagactctgccttccccgtctctgatactgtatgtgttgctttcagttggccatctatatccaccagtttttctatccattatctttaaaaaaaatcccttttgacatagatgtgttcctctaatgacatagatgtgttcctctaatgccataaggtagagactctctaccttttacttcaaaaaaaaaaggcatgatttagctagtgtaaacacctggatacctaaacagtaaaccataaaatcaagtgagtgttcttctgaaggtctataaatatggtatattctacacgttatatgcagtatacagcctagaacaactgcttgccaaaaaaggaaaagaaaagaaaacacttagtgcagaaactgggaattgcaatggcgggagcaagatccgttggttctctcccagtgcctaatgtgcaggcgcttgcagaaatttgcaatgatccagatgaacacatacctgaaaggtacatcaaccagaggctagttctgaggaggtcatcaacaactaccaaggtgacatggcgattccgatcatcgatctcaagaaattgctttgtccgcaatcatcagaagaggagtgtgtgaagctgagatctgcctgccagtattgggggttctttctggtatgtaactttaggttcttggcatttcatcttcggaaagcaacagatacctatttgcaaatgcatactgtatatacaaatgtttgaattgattaaagacgctacagataatcaaataaagttgtgggcagaaaatgaataaattcatgtcctgtaaggtagctctagctcagtttgagctgtgcaactagtataatggaaacatttacttttggaataaactacagctcattaaccatggagtgccagatgaagtgattgcaaacctgaagagagacattgttgatttctttagccagccactggacaccaagaaggagtacacacagctaccgaatagcctagaaggctatggacagagctttgttttctctgaggaccagaaacttgactgggcagacatgctgtatcttcatgtccatcctagcgattcaagggacctaaggttctggcccacttctccagcatctttcaggtgatctaccaaaaaaaaaaaaaaactgtgcaatttagcttttgataggcatctgtctcttcttaactggagatgtctggaaatagg

SEQ ID NO: 20257 - DNA, 1322 bp, Oryza sativa
acccaggattgggttttttttgggacggagggagtatgacataaatggattagaaggattttagccattgaaagtggaaaccaataggaacaacatgaacagcatgttacacatcctaattcacgtatttgatggcaaatagaagccattgtgtttcaggcagctcatgattctggggaagcaaacatactgaatcaaacacacctgtagttcaaattctgccttcctctttccccatcattgagcaaacccctataaagcaatctctgtgttcaatatcactgagattggcatgcaaagaacataacacaacctgagatagcaatagagaggggaaaaatcatggagcagaatgtacgggcagctggggaaaggataatatgatcaaggcaacaccttgaattttagactaacatgaaacctcatagtcctgccagatactgtggttaatgatgcatcatgcatgtcagtatgatattactaagctatgtgaatcttttatgtggatccttattacccgctgctcatctaatcattagatttcgaaagaatttagatttcttttccaaaaaagaaaaaatgttttaagcaaaacatttttctttaatgagattgaatatttctatgcaaacagcaaaatcaaagctggaaagagacaaattacaaattgcagccataagttgaagagcaaaggggcggaatggtggcagaatacagaagaaaactacacaacgtaaaacactgcatcaattttcaccctcagataaataatcctcaccggtatcagcaatgacaatgtcataagcagtccatttttttgtaccatggtttggcatgacttactaaattaatgtccgaacgactgcgttgctcgggaaaataaaatctaagcggttcttggaagggaaatgtcaatgcctcatatttctgctgcaacctgtattttgtaacaataccacttcattttgtctatcaataattgcaatcattttgtggaatacaaatgtaggcaaagacatgtagccaaggagtgtgcatgatctgaataaaattatgcctctcttggtcacatgtagccaaggaccttgcatcttttctggacaacagttgaaccgaacttctcatcctgttctcaaagtttctcataaaatatcaggttcacaagtatataatcttcagattctgttgtacacacaaaatcagcgagctcattattggaatcattttttccttctgtgtgcatgttgtttggggatggtctgtattactttttgtgtccctgttctgaggaaagggcgtgcaccgcacgtacacttattctt

SEQ ID NO: 20258 - DNA, 1377 bp, Oryza sativa
gtgcatgatcggtaaggcctcatccatctccactagacgttgggagcttcaagtgcgagcagacttgccactttcctgtattagatcagcagtcgatgaatatgataatttcaactaagaaagttcgattaccggtgtttatttatgtctttggcacaatgggggacctctgatctatcatcataaatgccaactcactgaaattttcgcacggctacttagtgacagtcaatttgatcctaatgcaatatgtcgcccaaataatcttctaaagtttattttgatcactaattggcagatgatttactgtatctttttaatggaatagatgatttactgtatcataataacatctaatggttatttccactctctcagggcttaaaggtcactgcatacgtgaggtgcttgagcagtaggaatctgcatctaccatggatgttgttgctacacaaacaaaacaatataattgctggtattattttcaaattttggtccttttgactctatattaaattctttatccattactgtttctcgatagtttgctgtgaatgattgcctgcacattcaaatgatatgtgggattagtttccagtcagaagtgcaaaacttagctagatctctcctgatgcacaaatctcactttttgtccggatgaattctacacatttcagaccagaaaaatcttggtacaagtcttaatacaagccatttagttatcagcatattcactgcgtggtagctatactctaaaaaatattccaagaaaatatggttatgctactgtttaataatttgctgaaggaaatagcaacattgcaaagagatgcaaatggtgctacttgatgctgaaacctgagtaccagtcattttaattgtagctgtttggagcaaagttttggctagatgtagtgcataaattaaatttatttttgccgcttgaaacttttatatacacaggcaactattttttttcttttcatttccaaaggcttccttccgtattaaccttgttttttttatcaaactactaggtaagttgaacgagtgtaaggattttctttaccctttgtatagttttatctatgttctagacacctacttgaagccgctctaacagcatggtcttgaactttttttaaacctctcatttagttttcatttttggctataaaattgcacatttccttttgttgtatagattgccattcttgacagtgtgaacatgggtggtggcagaggtgtttccatgcatacaacattttctattgccactgtcaaaaaaattcgcatttcacaggactgctattgcatgatttatcttggattagaaaatactttctgggttatctctcgtgtgttttgtaataattg

SEQ ID NO: 20259 - DNA, 14770 bp, Oryza sativa
tgggactccaatattctaggcatttttatgttgatgtaatggcgtggaatttgtcggtgttccatgtatatttaatttagttgcttaaaagtcggtggtttcgatccgtccacatcaagcctccacacatgttcattactaattcatctgcctttaaaagcaaattggtaattagggagtaatttctgaatgttctaggctcaaaagtggttctggtaatcttgaatatttgctctggatgacattccctctatttttgcttctgacttgaactgtgaccgtgcatctctgtggtgatcatggattaaattaggaacaatggtttaattgggttattctagggagaagtgatatccattggttgtcatggctgcctgaatgggaattacatcatttgattttaagatttaatagcttaagtagcatttgggctcactaaagtgcttcctttttcttatctttcagacttccactatgaattatttaacacgcataaaagaacttcccttgcatgatttttttattatgaaatcaatatttatattgacaaacctgcttagcttcagttggacaatgataagctgcagtaaggctctttctcattgaaggacattggtggattctgcactgctgttctattacttaacttcagtagataatatatttgcccatttgcttgacatcacattttttattttctctgttccatatggtgttctatttctcattttaggtgaacatttgtctaatttatctgtaccatgatctttttctgaagatattctccgcaaagagagatcatctaaagcatggttaaaaaacagtaagtagcgaaaaaatcatggtacaggagtcaatggtacgcagtagcgaaaacacggttaggagttgcatattatgctgttttgctattccaaaacgtttttgaactgtagcaggatgtttgttcctatttaaacgagagccttttgagcttttgtagcttccctgctggttacattctaataaaacaaaaatagtccttattgaaatatgcactctgtaaacagtaaggggttcttatactgttttctttaattccacactacaataaaaagagtgagatcagatggcaagcattctttgtgaaaacaacacatccatatctggatgtagtggttgccttcatgttaaaagtgggtcacaatttccagtattggaatctaatttagtacatggcaatgaaatttcattgagctgtgaaagtgaggtatcaaaattaaggttggtttctattcgttcagggttgaccttcatccttctcatacaagtattttactaggaaatcatgaaaaagcatggtgtcttaaatagtggactactaccatttttgtttttgaaaccttaattcctctctcaaaatttgctacaggtatacacccatggtacctcagatacatcatgttccagccgttgaaagaaagttgcattcattctggtgattcaaactttctggatcttgaatggctttcaacttgagacaactcaagcgatgaaaggtgtttactttggcattgctattgcatttttttttagcgttttcgactgacataatatcatcttcacagtgacagtcaatttaatttacacattttcttttgccttagtgtaggaaaacattaaggataattattagttgattctcctgtaaatttcttacccttcatgtttaatttcatatcaatctaaattctagagttcttttgctctcactgcatttccatgtaataaatacaaatatgtagtctcgtgttgtatcacttgatataactatctgtattgagaggtaaaatgaaaattatgttgccacacttcctaaatccaattaataagtgtcttctgagcttccagtatgttcactgatactgatttgaagatatcctctgaaacatttttttttaaaaaactcattaatactgatggattgtacttggacaggtccattgcaattaatactccggatgtgaacctttcagcggagaatgttattgccacaatgtcttcttttgactggtagatttgtatgatcaaatatagttgtatcatcaccatggacacattactctgatcattatgtaaaactttgatttttattttttatatgcattggtgcttcatctttagattgtaaagtgtaagagttttgttctcaacagaatctgtaaaacaatgtatggaaattactcatcaacggcattcactgcaaatgtattcataggtttttttttcttacataatcattgattcagcctgaaaacaaatgattagtctacactaatcaagcaatctatatgcaggcggcgcgctattggcgcgccccagcatctagtgcatcattaagagtagctgcctgaagcttaggcgtccaaatttgatggcttggctcaggctaatgaagagtcaggtcaggcaagctcaggatataccagggcacaaaccaaacacatagttgttggagctcagacagcgccctggccaggaatacaagcatcaggacgcgggctggcataagccttgggccaatcttgggtccgtccctaccactagcaagacgccatatgaaactgaggataagcttccgcgcaccttttacgagtgtctaccagaaaactaattttttcaagcgaccaaaactaattttcacaggcgggagggaggtccgcctgcaccacaacgactgtgaaaatcatcgatttttgcagtcggggcaacggcctgcctgcgaaaatgcaaaaaaaggaaaaaaaaattcgccgcatgcggctcgccgccgccgccacgccgtcgcccccctccccggttggatctgagaggggaggggaggggagccgtcgtcgtcgccgccgtcgccggcgccgctgccggcctcccccctccctcctccggccagatctaggagggagggggaggggagacgctgccggccaccccgcgcgcgtcgtcgtcgccgccgctgccgccccacgccgtcgtcgccgccgtcgcccccgttggcctcccccctccctcctccggccagatctgggagggagggggcgaagggagccgccgccgccggccgcgctgccgtccccgccatgccgccgcagtagccgtccccgccgcgccgccgcatgcagtcgccgtccccgccgcgccgccgttcccgccgcactgccggagatgagaggagaggagaggatagtgagggagagggatctgagggagagagagatgagggagaggataagtgagggagagaatgggacttagaaaaaaaatctgctccagcctagtctatttatattgctcctcattttcgcaggcagaccatataaggtgcgcctaaaatgattttcgcaggcggacagcgtacatcaccccaatttatatttttgtaggcggtcatttggctccaaaagtcatgtccgactgtaaaaataagactctaatgttggggaaaatgctttttctagtagaggcctagcgttcgtgaaggatctaaactactatgtgcgtgagcttgacgaccgcagaacagccgacgtcttcatcggccacaaagatgagatgggggtatcgtgtccttcatgcaaggatacagcgtgtacatgcgcatctcgctcgcgatcgatgtcatatttgacgagagccccaggagggactgtggagagaactccttcagcgaggagtttacgtgttaattacttgccacaaaaccgggcttaacagaatacaggtatatatagctcggatagagttgttgtgcatctactaaaacataggaaacttatcttatctatctaaacatcccaacaactcttatccttcgctatttgttacattatcatatgtgagaaatatctaacactccccctcaatctgaacctgtaaggtttagattgtttctaaacatctctaactgtctgactgacagtgtcttggtgaagccatcagcaacttgatctttggtagatatatattccacttgtaaaagttttcttgcaacccgctcacgaacaaagtgataatctacctcgatatgcttggtgcgagcatgaaaaacaggattagctgtcatatactttgcaccaatattatcacaccataccttagcaattttgggtacctgaattcccagttcatgaagtaaggtttgtatccacataatctctgcagtagcattagccaaagccttatattctgcttctgtactagatctggatacagtagcctgcttacgtgcactccatgacacaagattaggccctataaaaacagcaaaacccccagtagaacgccgatcatccaaacatcctgcccaatctgcatcagagaaagcacttacaagaagagaattagacttgctaatttttagcccaagcttaactgtatgtttcaaatatctcaaaatcctcttagccgccacccaatgcttagtggttgctgcatgcaaatactggcacaccttatttactgaaaatgataaatctggtctagtcagagtcaaatactgcaatgctccaaccagacttctgtacctggtactgtcttctggtccaagaggattaccttcatgagcacttaatttttctgaaatagacaaaggagtattgactgctttacagtcactcatattcactctctttaacacatccatagcatatttctcttgtgtcaaaactatgccatcatttacttctttcacttcaatgcctaggaagtaatgcagtcttcctagatccttgagtgcaaattcttgattaagattcttaagcaaagcattagtggcaacaatagatgagctggctactataatgtcatccacatataccaacataaatatagtaacatctcccttactgtaaaagaacaaagatgtatctgacttagatgatttaaaacctaactcatgcagcttagtacttaacctggaataccatgccctgggagcctgctttaaaccatataaggccttatctagtttgcacacatagccatctttctgttcataacctggtggctgcctcataaagacatcttcctctagaaccccatgaagaaaggcattctgtacatctagctgacgaagggtccaacctctagagattgctatggacaaaatagttctgatagtagcagccttaactacaggacggaaggtgtcctcataatctataccatatctctgtttgaacccctttgccacaagtctagccttatatcgatctagactgccatcggcctttcgtttgaccttatagacccacttacaatctattatattctgccctttcttagaaggaactcggtgccaggttttgtttttcataagagcctgatattcactatccattgcttctttccaatttttatcacctaaagcctcatgcaaagtttgtggttctccagaagatgtaaaacaactgtatctaactgtcccatcagtgtatattttctcttttctaataccactttgtaaccttgttttaggtcgcattacctcagatagctgtgcagactcagacggcgcagatgatcctggctgatgtgactgctgcgcaccacctgacgaagacgcgacagcacgggcaggcgatggaggagcagcagtaggcgatgcagcaggcgacgtggcgcgcgctggttggatgcccgagtgctgctgctccgactccccttgcgtcgcagatccggaggcctgccgctgcagctgcgcctagaccgacgctgaatctgaggcggattctcccgccaagtcgccatttgctccatgtacccggccaaatgcccccggtatatctgaattcacatttctgggagattctgcacatgaaatatcagtagcatttggcatagagatattaaacagatgatcatgatgttcctctcccccttgatcagatgttttctcattgattagagtaggaggaagcaaagaaatttcagctcgaagccgggcgccagcatttggatgaagattagcaaagggaaacacttgttcatcaaaggtgacatcacgagatacatataccctgccggtagaaacatctagacatttgaaccctttgtggatattgctaaagccaagaaacacacattgctttgaacgaaattgaagcttatgagtattgtaggggcgcaaatttggccaacatgcacagccaaatgttcttagagatttataatatggtgtttgcttaaacaaccgttcaaggggtgtatcaaattttatgaccttactaggaaggcgattaatgagataagtagcagctaaaaaggcttcatcccagaatttcaaaggcatggaggcatgagctaaaagagatagaccaacttctactatgtggcgatgtttgcgctctacagctccattttgttgatgtgtgtgagggcaagagacatgatgggagatccctatttcattaaagaaagtgtgcagcttaagatattcgcctccccaatcagtttgcatcgaaagaattttgcgatcaaattgcctttcaacaagtttctgaaattcatgaaacttctgaaactaacatagtatttctttgcacctacagactcagaggcaggcccccacacatcggaatgaataagttccaaaggattatttgacacactagttgatctaggaaaaggtaattgatgacactttgcttgttgacaagcatcacacacagactcattgacagaattactaagacaaggcaatttattttgactgagaattctaagaacaattggcttggagggatgaccaagacgcccatgccacctctcaaaagatggcgtcgcaacgaaggcctgtctcaaagacaatctggctggaagtgggtacaggcctcgtcgacagggaccttcaagaattgtcctcctcgtggccttgtccttaatcaaaaaatatttgccatgaatttcaagaaaagcataattatctgcaacaagtttatgaacagatactagatttttcgccgcttcaggaacatgtaaaacatttttaagatgcaaggggcgactaggagtaggaacaatagcatgaccaacatgtttaatactcataccttcgccacttgcagtgtgaatttgatctgttcccttgtatctctccttggttgtcaatttgtctagctgcccggtaatgtgatccgtcgccccagtgtcaacataccagttggtatcaacaccgtaggcgtatgttgcagcaccgccaagcttctcatcaggaacatatgagtcatcataacgatgccagcagtcgcttgcaacatgccctcgcttgtgacacacttggcacacggggcgagtatcattgcctcgcccgcgtccctgacttgcgccgctaggggcgccgcggccgcgaccgccacgaccgaagccgccgcgtctgccacctctgtttccagtgctgctgccgcgtccaccacgaccaccacctcggtttgccgcatttgccgaagtggtgagataagcttgccgaatccgaatcctgttttcataactcaagagctgtgaataaacatgagaaattgaaactggagcaatccttgccgtggccatcagtccttcaaccgcggcgtcgaattctgaatccagcccgttgatgatgtacgccaccagctcctcctcatccagcggcttccctgtagccgccatctcgtcggcgagggacctcatcttcgcaatatattcgctgatagacataggtcccttctgtgtggtggttaaggcgaggagtacattgattgtacccgccttcgacttgcacgagaacatgtcatcaatcatgttccatgcctgggccgccgtcctagcgccggccacttgttgcagcacctcccttgatagagaggagaagatgaatccgagcacttgctggtcctgaacaaaccatgtcttgtactcagggttggggatgacaatcttggtcttcttgtccttgtcgccgtcttctttttcaatttcagccgccggagctgcggtcgtgctgacgatgtgctcctccagctgcgcacctcgcaaggtggtgaggatctgtgcagcccagagaggatgattctgtttggttagcttctccgagatttggaggccaaacagagggttggagattgccgccgccatagaaaagctcgccatgtcactgggagaaagtttgcacgacagaactaatctaatctagcgggaggctctgataccatgtggagagaactccttcgcgaggagtttacgtgttaattacttgccacaaaaccgggcttaacagaatacaggtatatatagctcggatagagttgttgtgcatctactaaaacataggaaacttatcttatctatctaaacatcccaacaactcttatccttcgctattccgtcatctaacagggacttgacggcaacaagcgatgcggatgtgccaccgagcagcaattccgtcatcgagtgtaccatgttgagaaaaccactaggcatatatcctatgttaagcatgcttggatcaccgtaattaaccaaacaggatatagtaaacagcacgattgattactgtagcagattagtacaaacacataccccagaccaattaaccatttctggctaattaaccaacggcgagttgataataacttgatatatatacaaatacctccccacatatttgcatgggaattcacgcagctagctattgaactgacgtagcctgcacttcaaccatatatatctggcctctcctcggtgttgcagcacagggggctatatctatcttttctcgcgtcaacgcctcgcgaccgtgcacagatgatgcaaaaggacggtgcaattctcacaggtaatgaacagcttgcaaccccaagcagagtctctctctctctctctctctctctctctctctctctctctggttagctgtttcttcacccttaatccactgtcataacctttcccttttgctgctactagtacactaccttattgcaattaagctcacctagcttaaccagcttgtgtgtaaacagcaacttttacgttcctttaattattaagcttgctgttagagttgaaattcagcttcagatgtggatgggaggccatgcactggaatcgatcgtccgagcagaatcgacaataagctggcaagcctactcatgtgtatgtacggttgggatgggttggacgtacgatcgagccgtgcaatctatcgatcgcataatacaaccgtgcaggagacatgggcaataaatataaatagagtttggcttgctttccaatcatccctaactgctttaatttcctgtcaacgagacagacggcatgctcggtttggcgtcgacgagcacgcatatgtatcaatgtgttcatgcatccatctatgcattgacgtctcgacatgtagcggcacagtccgcgaaaaatggagcacaggagaaagagtgtgatgggagcatgtaggtcaacctacccaacggtgaccatttccaccaaattagtattagtagtatcatttatatacattttgtatatactgctaattaattaataccaacttgacactgaagacaaatgtgctcatatatatgcagaccatacagcaaataaaattcaccagttcaactagtagaatatgcatatatctctcccccaaccccacccacaccccccacaaagaaaaaaggaattaactttaggagctagtagtaactagcaatgcaattgcgaaaattaattccaaacaataaaaataatgagattttaaaaacagagcaataagagctagcaaatttacttttcaacatatcgccctggctatatatgtacataagtcaataatgcaaacataattgtatggagttgctgctaattagctcgaccttgaagtaggccatagccttatattgtataagcaacaaccaatgtggatgccaaaagagatcataggtttgtagctgggaagacatgcatggaaaagtcacgacgcatgctagaagcaattctgcaagcattgcatgcatgtgctgatgcagtgtttgagggacgccgaggtgatcgatcagacgacgctcagtagtagtacttgcacacatcaattaaatcccttcacctacccgataaaccctcccgtcataaaggttcacccaactgaaagcacattttggcagctttttctagcaaagcaaagttggtacgtgtaccaccggcatggcataatagcatcttattagcacccggttctcggaaagtaagatgtttggatacatgaacttaactttagtctctatatttaaacactaaattagagtattaaatatagactacttacaaaactaattacataaataaaacattggtggataaaccatttatactctcggttggtaaccgcctttagtcccggtttttcaaccggttggtgttaccaaccgagactaaagataccttatcttaggactaaagagagggtagcggcagtcccattaggtctctttcttttcattatttttcattattttttagctagagtttaatcctgtattttctcccaaatcaagtgggatacatatccccaaatcaaacctcaaatcaaaataacatcccaaaacattcacatcataaatcttaagttacttatacacacaaatcaaatacatcacaaatcttaaaaaaattacacacaaaccaaatacatcacagattatacatctcagatcatgcaacaaatcacaaaattatacatcttagtgaatcacaaattataaaaaacaaaaaagatgccgacagcggccgccgcctgccgccgctcgccactgggcccgtgcgcggcccagccggccgcctgctgcgtgggaagggaggagggggaggagagggccggggatgggaggggaaggggagggggaggaggagaggaggagagggagatcgatctgagaggatgagtgcgaggcggttgtggaggagaggacagggaagaaggattatatattaagcgttgaattttagtcccgattggtaataccaattgggactaaaatctttagatctttagtcccggttgataacaccaaccgggagtaaagttaggatctttaaagatcccgggtggcctgacaagacctgacaggtttagaaccgggactaaagatcaaatatgcccattgtagccaccaaccggggctaaccgggactattgtggatttcggccgaccgactaaagatggtttctccaccagtgaaagctaatttgcaagacaaattttttaagcctaattaatccataattagagaatgtgtattgtagcatcgcataggctaatcatggattaattaggctcaatagattcgtctcgtgaattagtccaagattatggataggttttattaatagtctacgtttaatatttataattagtatccaaacatctgatgtgatagggacttaaaagttttagtcccatttaaacagggtctaaggtaactaatcaaggccataacatgtagtgcaccgcttgttaatgaatctaatcatatatatatgtgtgtatagattcattaacatccatataaatatggacaatactagaaaatcttaccatatgaaacggagggagtaattggcatggtgaagttaataagccctaaatatatcctgttttacatgcttgtagttgttagctagatagcacatgtacacaagagttcctcacagtaaaaatgtgatgatataattagcaaaaaaatgctatatatggtgtatctacatgttaattaattagaagggaagaaaagaaacgggagaaaattaattgctccggcctacggcatggatcacctatacttgacgacacaacgcggtgcaatcgcttccggtgtatatatatgcatgcatatatatgtagccgatgggcacacacacaactgatcatcgagccggcctaaaggaaacaatgtaacgattcaatacgcggcaaccaccatgaaagctactgcaaagcattcccgtgtttaaaggcgaactgtttcttgttgtgtatatgagctagcgctatatattgcagcttggagtatcttgagaaggaagaaagcatcatgcagaatttcctctccgtaggcacacgtatctcgtaataatgtcaaaacattttagggggtgtttagattcaagatggtaaagttttggcgtgtcacatcggatattatatagggtgtcgtttgaggtgttcgggcactgataaaaaaactaattacataatccgtaagtaacccgcgagacaaatttatcaagcctaattaatctatcattagcaaatatttattgtatcaccatattgtcaaattatgaagcaattaggcttaaaagatttgtctcgcaaattagtcgtaatctgtataattagttatttttttagcctatatttaatacttcatgcaggtgttcgatgtgacatggtgtaaaattttagggtgagatctaaacaggcccttacactagctagctactccctccgtttcacaatgtatatgtctaaattcattaatatcaatatgaatatgggaaatgatagaatgacttacattgtgaaacggagggactagttattgcacagttgacatgccatattgccttgcgtatgacaaatacaattttaccatcaactcatcaagttactaggtactctctttgtcttaaaaagattcaataaaaaaatattatttctcctaatgcaacgaatctaaacaaaaggttattcaaatttgagtttttttttttaacggagtaagtatatatacacatgcatatattggcactcttaagccttgttcggttaatccctcccacaaagggattgggagggatttggaggggatttattccacacctattgtggtgtggaattattccccctcaatcccctccattccttctctcttggggattaaacgaacaaggccttaagctgtatagctagctgggaaaaaaatacttaccgttctgtgggaagacaagcattaactaggccgtgtttagattccaactttttttcttcaaacttccatcttttccgtcacatcaaatgtttggacacatgtatggagtatcaaatgtggacgaaaaaaaatcagttgcatagtccgactgtcaatcacgagacgaatctttagagcttaattacgccatgatttgacaatgtgatgctacagtaaacatttgctaatgacggattaattaggcttaatagattcgtatcgcggtttacagatagaatctataatttattttgttattagactacgttcaatactttaaatatgtattcatatacttaaaaaaatttgacacgtaaactaaacacagcactagacaaatttatataccagccgccggctagctggtagcttgttctaactgcgagacaaattaattccaacgggtggacctggaccaaagctagctagccgtagcacacacagctgcgtcatgcacatgtaccaccaagtactgtacggttaaattagcatggcaagttagcattggcccgggaaattaactcgtttgttttcttgcatgtgtttataggcatccatgcacacgcaagggacggtaggggtcgggagagagggccaacgcaagcacgtcacagtgtttatagtacagcagaatagcagacactgtcacagtgttcagtggtggcaacaagcaatgcatgcaagcatgcagacttgcagaggcagatagaggggtggccatggcgaaacgaggcaaaaacgaggaccagctaatagctaggactcccttcctattattgtacatattcatatacttctctctctataaaaaaaaagcctagtattagcatgtaacatacaacgaatctaaatataaagtatgttcaaattcgttatactaagatgtgttatgtcatagtacgaggttaaatttttttaggacagagagaatagatgttattgaatctatacatatatatatgtctatatttattatcatttatataaatgtgggcaatattaaaaaatcttataatataaaacggcggaagtagctagctcttctcgctcggctgcacctggttactacgctacgttgctggccatgtgacggcgtgggccggcgagggaagagggaagggaacaagttagctagatagccctactacgctagctgtaatatatattggagtaattgtcatcaggtccacacctttggaaaacaactgctttcccatccatccaaaccccgaaataatcattgaggctgcgtgcaaatgcaacggccagggcaaaaacacaaatatctccggtataaaaacgacgtcgatcgatcgtacatcgcagccatgcatgaattagtgatgcgtggtaatgtaattaaactgcatgtgaaattgttatcgaattgtgctagtggtggctagatatactaattgtccggtcgacaggagacgcccagagatctttcaactagctccaccaaaccgatttactccagttttaaagtctcatctcttatatatatttgatattagattcttttctaatatttgtatcttaattgtctggtcgataggggcggttcgatattaattcactcggtatggacaagggatatgtttgccagaactgcatgcggtacggtaactacgtactcatcaataattccattccgtaccgacgagtatatgcaacaagggcaatgcacaatgcactttatttgatgatcaatcctgtagtagggctgcag

SEQ ID NO: 20260 - DNA, 7699 bp, Oryza sativa
cctagtatatccaccatgcaagcaaagtgctccagctgtggttccaatttgtagtgggtagtcatcaaatgaaagtagcggcagccatcatcgaacagcccaacatggctgcatgccctaagaactgcaacaaaagtggcatggtttggcactacattctctttttgcatcctctcaaacatcctgagtgcttctactcctagcccatggagcgcatatccacatatcatagcgttccatgatacaaaatcccgtttctctaccttctcaaacactagcagtgaatctggcatatccccgcatttggcatacatatctacaagagtgctggatatatattcatcatccagcatttcttgcttgataatctgaccatggatttgtttaccaagctcaatggtggcaaggttcgcacaagtatcaagaacagtggcaaacgtgaaatgatctggctttagacccatatctagcatctcggagaagaacttctgggcttcttcactctctttattgagtgaaaacccagataaaatggcattccatgaaacaacttgttgcccgccaattctatcatgaagtttttgagcctcatcaattatgccacatttgcagtacatgtcaacaacagtgcttgctacaaaagcatctgaaccaagtcctgacttgataactttatcatgcaccatcaatccatactccaaagaccgcaaagctgcacaagctttaagaacactaccataagtgaaatcatctggtttcataccaaagcgcagcatctcattaaaatgaagtatagtatcatcgtaatgcccattttgctcaagagccgcaataattgcattccaagagactgaatctttttgcttcataccttggaagataaggtatgcttccatcaatgctttgcacttcccatacagatccagaactgcattgttgacacagatgtccacatcaaaacctgatttaattgctaaacagtgaacttgctgcccttggaagtaacccttagtctcagcacaagcactgaaaacccctgataagctgactacatcaaaacgaatgctagacctaatcataaactgaaagagtcccatggcctcaattcctagccctgctcgtacaagcccaaccatcatggcattggatgtctccaccgtatggttgggcaacccaaagaatgctcttctagcatcggtcaagctattagccttagcatacacgtccacaatggctgtcccaacaactcggtcagaactaaatttgttctttatggcgtgcgcatgcaactgtctaccagtgttcaggcatgacattgctgcgcatgatctgaaggcactggcataagacggttggctcaccccaagccccaacctctgcatctcaatgaacagttctagtccacgcacatactgctcattttgaacacatcctgcaatagctgcaccccacgaaacccagttcctctcaggcataccatagaagaagcaaagtgcatcatccaaactcctgcatttgccatacatgtccaccaaagcactcccagtccggacatcgatctctaaccctgtctttactgccaatgcatggacttgaacgccaagtgacagctcttccaaagcgctgcacgacttgagcagaacagcaaacgtcgtccggtcaggggaaacacctcggcgagccatctccacgaatagatcaacagactcctgaaacatgccgcgctggcagtaaccggagacgagcgcgttccacgacaccacgtcagggtccggcatcccgtcgaagagcgcgaccgcggtggagatgtcccccgcgtgcgagtacgcggtgagcatggtgttccaggagacggtgtcccggcggggcatcgcgtcgaacaccctccgtgcgcacgcggcgcccgcgcagcgcgcgtacatctggaggaggcagttggagacgaaggcagtggggacgaacccggacacgaccatccgcgcgtgagcggcgcggccggcggcgagcgcctcccgtcctgcctgggcgcagctctggaagacgcgggagaacgtgaccctggcgggagccacaggaggcggctgctgctgctctgctggcatccgggcatgctcggcgagagcgcgacgcggggggtggaggccatgcggtggcggcggcgtagggcgaggcgagcggtggaggagcggccaccttcactgccgctgccgcgctgcgcatttgcccatttgcgcggcggaggcggtggccgccgacgaggcgacgattcgacggggaatttggtggtcaaactacatgggctaattgggctctcatacgcgtgcttaggaataagttcatctcaggtcccttaacttgtcaacgaatccgatttcgtccttcaaccgcaaaacagatacaacgggtccctcaactatcaaaaccggtgcaaattagatccctcgacggtttcgatggtggttttggctgacgtggcgtctacatggctaattttgacttggtcttgatctgacgtggcaatgatgtggcgcttacgtggcaattgaatccagaaaataataaccccgtgggacccatatgtcagtttcacacacaataataataatagtaatggtgggacccatgtgggccccacatgtcagtctaactcaccccctcctcttctgcttcctctctctccttctcccctctcttcatctctctcttgccctgggtcattctgaggtggtgtttggatccatagacttaactttagtccatgtatttagacactaatttagagtattaaatatagactacttacaaaactaatcatataaatgaaagctaattcgcgagataattttttaagcctaattaatccataattagagaatgtttactgtagcatcacataggctaatcatggattaattagactcaatagattcgtctcgcgaattagtccaagattatggatgggttttattaatagtctacgtttaatatttataattagtgtccaaacatccgatgtgatagggacttaaaagttttagtcccatctaaacatggtctgattctcctcttccccatcttctctgtcttcatctctcttccctctcctctctctcttctctccagttgacgggcggcggggagagggcggtggccggcggggagaaggggcgcgacgcggcggctggcgggagggaaactagtggggagaagggaaccagcccggcggcagaggcagcgccgccgtggccgtggctgcggacgacgtcgatgccgacctctgcatcctcgaaggcggccgtccgcgtgggcggatgagggggccacctcgccggcgggagaggggagaggcggctggccgcgaagacgaccccagcgacgattacgaccgtgcagcgcgcggcggaggccgatcccgtgagcaggaagctcttcatccacggcctcggctggggcgccagagccgacgacctccgctccgcattctcccgcttcgacttcttcctcttccgctcctctcttccgtcggctcgcgctcggcaaatcccgcgcgtcgttgtcgtcctcctcctcctcagtccagccctcgtcgtccattctccggctcttctcccaacgacgtcgcagtggaggagggcacggtgctgtgcatgccaccgaggatgctgcacggcgcgtccaaggagtttcttagtttgtgttctgtttggtcttaattttgtttatgtgcctaatcatacaaaggtagaagcaatagcaactagtactagctgactggagtatattttgcttcgtcatcatcatttgcttgtggtacgacgggattgatgaatgaatgaatgatcattgttttgggcaagaaaacaccgttccggccggactgacgaggaacccatcgatccgctcgccgtggcccatggaaacccaacaggagatggcggcgctaccttccgccgacggcggctaacaacggtgggtgatgctcgagcacattgaagaactcgaggtcgacgatgaggactccaactacaacttctgctctgccgctgccgacgacaccgccaataccgtgagtccatgatgaccttgctcacctctgacggccacgtcgtcagcgtatacttccgcctcgaagcgcccccggcgacgtcacgcctatgcccccggcacgctgctccctcctctcccaccggtgggaaggagctaggcgagctccctggcctaccggcgagcgcgcacaagagagagatggccggcgaccactcttctccatttccgccgccgtcgtcgactcgtcgtcgccggccgcaagagagagatgaagagaggggagaaggagaaagaggaagcagaagaggagggggtgagttagactgacatggcgggcccacgttggtcccaccattattgttattttttttgtgaaactgacatgtgggtcccacggggtttattattttcccagatcaaattgctaagtaagcgctacatcaatgccacgtcagatcaagaccaagtcaaaaatagccacgtaggcgccacgtcagccaaaaccaccatcgaaaccgccagggaacctaatctgcatcagttttgatagttgagggacccgttgtatctggttttgcggttaaaggacgaaaattggattcgttgacgagttaagggaccttggatgaacttattccgcgtgcttataccgtttcgtttcttgaggcctcgaatggatgggcctcaatctcggcccacccacatatatggtcctaaagtagtaaagtgaccattcaaaagaaattttctgaaagtgatatgcagatgttttctttggggaaaaatatgttctttgacctccttagttgaatgcagcattttttttaatacttcataagatccatcaccaaatttgtgtcaggtgagacattgttaagtccaattggaatataactaagacttttcactgacagatcatgcatgtgattttctcccatgagcttgagtatctgaccaaacactcctacggcttaattagtctccaacatgctagcatcaccagtactaattaattgctaatgctccatggccggctaagtacaaataccaatcacactttcttccaaaggaaaagtacaagacttgatctgaaaacaatatttgtctgctccaggaagacacctacacggctacacgactacacctactgaagaagaacaggagcgagaaaaatcaccaatggctcatgcaagaagcacaggatctctgccggtggcaaatgttcaggcactcgcagagacctgcaacgatccagatcagcagatacctgagaggtacatcagagcagacgccaacgccgacgagggtcatcagcgggcgacggaatgcacggcccgcaattcctacccgtcgatctcagcaagttgctcgatccattgtcgtcagacgaggagactgaaaagctggggtctgcctgtcagcaatggggattctttcaggtatgcagatttcttggcagacagactgaatttgatcagacaagttttgaaacgtacgtacgtagtgagagatagcaaaagcgttgactcacgatatggatgaacatgaacatgaactggtgaactgcatgcagctgatcaaccatggcgtgtcagaggatgtgatccgcgacgcgaggaaagacatagccgagttcttcaggctgccaatggagaccaagaaggcgtactcgcagctgcccagtggcatcgagggatatggccaggcgttcgtggtgtcgcacgagcagaagctggactgggctgacatgttctacctcgttctccgccccggcgagtccaggaacatggccctctggcctgctcatcctccatccttcaggtgatcgatcgatcaagatcaaagtcaaactgcttatgataatcatcaaattaatcttctgcggttttgattgcgtgttgttgaaaaagagagagtaatcttggttcttggcgatcacttgcctgtgatcaggaattcgatagatcggtactcgtcggagacggcgagggtggcgagatgcctgttggagttcatggcgaaggacatgggcgtgaggccggggtcgctgctggagaggttccaggaccagccgcagggcatcaggatgaacgactacccgccgtgccgggaggccggcaaggtggtcggcctgtcgccgcacaccgacgccgcctgcctgacgctgctcctgcaggtgaacgacgtgccgggcctgcagatcaggagccccggcggcaggtggctcgccgtcggcgcccctccggacgacggcgcgttcatcgtcaacgtcggcgacatactcgaggttaccgactgaccaacaatggcgtcgaggcaaacatagccatcgccgaggatgatttcttggcttcatgtttgctttgctgctacgtgcgtctgcatgcagatcatcttcttagccggggtcatctgcattccttagccggggttgctgtttctggggatttcttaggagtgtagcgtggctctacgccttcccgctattagaagttgtgtttagcctccgtagttcttcctaagatttagtttcttattttatttttctttctttggcataagccggtctagttgattgtttttttaaaaaaaatcaagggcaagggttcctatttccattactagaaatgagcaaagttatatagttcaaatagtctagctgattgtgttatgtaacaaaaatttattttcttttaatatattgacatgcaatttttttacgcgtctcgcaaaaaatgcatgcagatcatgagcaacggcaagtaccggagcgtggagcacagggcggtggtgcggccggacagggagcgcgtgtcggcggcggtgttccaccagccgtgccaggacgcggtggtcgggcctctgccggagctggtcggggaaggcggcggcgataacgcgcggtacacgtcgatgggctacctggatttcatgaagcgttactactcggcaaagctcgacggaaggaatcacctcgacggcttgaggattaaactgtcatcttcgaagggttagaattcattcatgttacaactgttgtaaacttgtaattggaaccggatttgatcaaacaatttgaaatactttcagcactagcaaatgtatccgtgcgttacaataggttgtacgaacataccttgtcttttttagactggtcaccggggggtgagcttaccttagcttgtacatcttcaaagaatcattgtaaacacaaggaataaaaagcctacgctgttcaacatagcataaatagaatataccctaagcaaaaattgcaccaaaaaaaacaatgcacaggctcggtaatttctctacacctcaaattttcttacggtgacctgagtagttacaatgacctagtggttatagtgacctgagtagtactacaaggtcctgagttcaaatctccatacaagtgaattttatattgggttgtttgcggggctaagttccctatttcaatgattatatatatatatatatacatccagttgaatgtaaaggccgggtaaaatatacccttctctaaaaaaaaattcttacggtcatcgagtgtgttccatttcatagacatgtgtattagcaacataatcatgtctcaatccacattgatgcttcctcgcactcttcatttaatccaactattcaccga

SEQ ID NO: 20261 - DNA, 9010 bp, Oryza sativa
  unsure (1)..(9010): unsure at all n locations
attatttctccaacaaaatgtgaaaatacactccgcggtgcattcaagcacctcttgtaagctgaaatccttgtttttcatgagaatcctttgtcctttggctgtctattcgatgattcactcccattggccctgaaaccttttccatttacatccttgctgaattgataacataacaatattgatgtcaatacatctatcagaacacaagacggatatctttgtatgaccacagcaagcaacaaacgtgacaaatcacacgactgtaaagaaagccttacgcaattccaatactataggttgatttatatccttttgaaagtcctaattaatctaatgaaaatttatcataaaaattaaggccttgtttgaattttttttgtctgaattcacaatggacaaaaaatgaaaaaagagaaagatgatattagacaatataacagtgagaaagagcccaccccatccacgaataacaacaatatgattacctgaaggagttaatgtacgtgcatagatgaatgactggaccattccattttcaaatgttccaagtagctgaccccaaaccctggagctgagagatgtggtatagcctaaacatgatggtaatagatgtatgcattagggaacgatttacaccagaaaatagtgtgtatttctttttgacaaaatggatgtttgcgatggtcgcagtatacgataacatttgttgcttttctatatcaaatcactgtagaagacaatgtggaaaatacaaagtttaataatacagtaaaaacccttacaagcccttgaatatttgaaaaaaacaatgaggtgctttgagcttgctgtaaaaaaatgcaccaaataaaataaagcaggattaacagatgaaccaattgcacagcctatgaaggaacattataggacatgatatgcacgcatcatcaataatcacactattcaaatgctcacctgcatttccttcttccgatcaatcaccaaggctgtatttgggccatacaaacgaacagtcacagaagacttgttgcccttgccatcttctacggagacactcagcactgcaagcagtaaattacagttgttgtttccactaagttctcggtaaattggtagtacttcagtgacagaacattatataattttctatagcaaacaacataagataagatgatttaggcattaaaaaagcaagaaagaaatggtaaaagagtccctgatctcacaaaagttcagaaatgcaattaagttcataaatgttcagaattcagaaatgcaatcaggttctggtaatagccataatgttatgtctgccgctatccaaattgctttaaaatgtgcctaaaaccaattttccctttgtttgagcagcagcctgacctctgttttcctctacttacaacgagttgcttaggtgaagcaggaaggaaaaaaatcatgacaacgcgacaagccatgaaactgccaaggagcagggactcacacatattcgtgatgctgccgccagacaccgtctcgatcgagaagcgcgagctgtctagcgatgaccgtcctctcaccaattccttgcagatacctctgcacaatcgcgaacgggagtccttgtgtgagaaccaaaaaccaaattgaagacagataacgacctcccgcaattcccttgatgagccttttctctaaaaaagaaaaaaaaaaagaaaaactcccgtgattcctccaactcagcgcccgcacccacccacgaacgcatcgaaacgaaacgaaaaaaatcccagaagcaaattcgaagagagagagagatggaggggatcaggggtactcgcatgatgcggggcgtcatctccgggagcggcagcgcgatgtcgacggacgcgccctagccatcgcctccccgagctcgccgtctcggccgctagtcgggggcgctcgatgatgccgacggcagtggcggagacggggatggctgcgctcggcggcggcgcgaggcgggaggcggaggcgctcggagacgacaacgcgacgacggcggcggcagcggcgggggaggtggaggcggcagcgcgagccgacggggacgacgatggctacgttgcaaggcggaggcgggggcgcgaggggaaggcggaggcgacgacggcggcgcgagggggaggcagacgcagcgggagagggagagggtgggatgagaggtggcggcggctagggttttttgggggaggtggacgcggccgcggcggtagaggtgggcgcggccggggggcgcgaggggcaggaggcggcggcgcgtggcggcgacggcgggagaggggaagggagaggatgagggtgtgtttagttgaggaaatgaaaatttttgggtgttacatcggacgcttgaccgaatgtcggaaagggttttcggacacgaatgaaaaaactaatttcataactcggctagaaacgcgagacgaatcttttgagcctaattaacccatcattagntaattaggctcaaaagattcgtctcgtaatttcctccctaattgtgtaattagttttttatttatctacatctaatgcttcatgcatgtgtctaaagatttgatgtgatatttttgggaaaaaattttggggaactaaacgggcctgaggagagacgagagagaagagggcggcggcggctagggtttggggcagttagagttagtgcgcgtcgctttgcggaaaagcccctcgtcttttaagttttacatcgctgtccttactcgcgatttttccctcgttttaatgtatatccgacttttataagggtctcgacctaaaataacatctcacaggtactgtttggagggagctatttcgaattacaaacaaattggagggctttttcgaaaaatcaccaccgcgcgcactgttcctatcctacgtggcatagccgagcggacgccccttccgccgctcttaatggtttctaatgtgtcatttattccatactttgcgctggtaaaagttgctttttgatattttattattcttcaggcatatgcgcgaaccaaacgcacaaagcttcagcctgcctgatgaggcaagtgttacatctcccaacgctgcctgtccggcgtgagtttttctcaggcgtggccctcaggacacaaaccaaacaaccccttaggccttgtgtattatttacaagatggaaaaaaaaggaaaaagttcacttgacgtccctcattttgtcgtcgagttttgtaatactggatataatgcatcccgaatatttgcaaaacggtcacattaggtctgaagacagtatagctcccaaatttagttgacgtggcatgtgagtcagtgtgggacccatatgaaccccacatgtcagcaccacaagtccacaataccctcttccattcccatcccctctcttcccatatctctcatcgtgcggcatgggcggagccctagttgacctgatgaagatgctgttgctccttcggtgaggcccgtgagaagctttgctagggtttatccccgcgtcgccgccccaaaagatgagaccaccatggccgcggtccagtggtggtgttgttccagaccaacatcaccaaggctgcgtcgaggctcggcgccacaacctccatcatgtttgccatcgctctacaacattgatggcaaccagcgcgccgtcatcttatatcggttccgcggggtgctgccttggacagtcgagaagaagcaggtggcatagcaggaggccgagagcgctccaattgcctcatcgccaaggctgagcaagaaaggcgcccgtgcatcatgcacactgaaggagactgttaataaccaaatttagtaatctaagtatcggagatgaggatgggattgaagcggaattcgagatggaaatcgtcatgaaaacagagtacggatcggctgaagtccgaatcggctgcggttggggtaggcagagttcgagtcggacgaggttagccgatcgagccgaatccggcaacgtgacgcggtatgcgttgtcgggttgagctaacgaacttcatgaggattgccacccatggatagagttttgagaaggcaattgtatatattaattaggatatttcatgtaatttccttagagatatgtttgggcaaaagtctgccgcaaagacttatggtatcttagagtttgttagaaataagagtcgtgtccgacatggacatattttgtaatctcaggtataaatagatcccgagccctatgtaatcaatctaacacacgttcaatacaatctcggcgcatcgccacccttttactttcgttttgtttcgacgagttcttgcttttgggttgagcccgcatcggtttcgatcttcaactagaggtaaaacttgttatggcggcttgcgttctcggtattagtgcttacatctttatgatactctaatattgcttatgtaaatcgtcgagttatcatatattttatgtaatctccgtcaatatcgctatctaaccttcaatcggctaatgtctgttactagaaggcagtcgattaggttaaataccgacgttgacttagattacataggatatcaaccactctatgaaacatccaacggcttgattgtctagatattgtccttattttcatacttatacctgcattagttgagtttgatcttatgagtcgtgattagaatctcaacctctagcctgtctttggttgccgattagggtagcatcgggtttcagccaatcttacctgatttaactatatttttcttatatgcttgattgacatgttaaatctgccctttatattaagatcttgttgcatttaggtatattaggctttcgtttggtatattctacttgctttaatatcttaatatagagtggtatcggagtattagctgatacatgctagatctatatgatcagctatgctatgaacatatatagtcttgttgctaatatatctttcgatctaagtaatttatactgtctcggcatggcgaccgatctatcccaataacttgatttaagtatatatcgacataaggattatatattgttaatatctacagccaatcgagtaaatttagttctttcttacttattcacgattgccgatcgatctacatatgacatcggctcaaagataaatgatatgtcatcggcaactagccgatcagctatcatttatggatttaaccgcggtttctttgtctttatttcttgttgattgcaggatcaaattaactggcacggtcatacacttaaaggcaagcttttggacctgcactggagttaagcagatctccaaggcctcgtgtttttacatcaacagagacgtagccgatgatccttaatcccggcgtcccagcaaaaaacgctttccgaaccattgaaggagttattttgcactagttttcagagacgggggagatgttataccggttttatggttgagggaggaaattcaatcaggaggaagatgagggatgacttattccaaagggatggggagagcccttcaagggcatggtctgtctgatgggccgcgttagtcaaaaacctgagcagaagtaaatgggccaatcgttctgcatttcacaggttctgggctggaccatagaaattcaccgagaagcgactcgaaagcagtagttcgtgtcctcggaacgaacacgtattttctaatttacgtgtctcccaatcgtagccgacgacggtcggtcgctctctctcgctcctcggctcctctccatttcccatcacccggcgctcgcatcgcgtcgcactcgcccaacatcgcaagcactgaagcacccacacaccctacctccacacgccctagctcgctctcccagcgtcgcgctcgccgccgccgccgccgccgccggcgggatgatccccttcaattccgccgtagccgaggatgtccgctccctggtgcagggcgtggacgactccaccttcgactccacccaccgcgagctctgccaggtaaacgcgagccgccctgccccgccccgcccgggcccgaaatccacggcccgaggtgcttcgtttcggcctggcgttttgcgcggcggcgattggttcgtgccgcggtcgtagatccgccccccccccccgtcgcttggatttcgtctttttgaagcgcctcaatcttgagggctgatctagggttttggcggatttatctgtcttgtgggtattgacgaggagcgatactagggcatcgcctttgatgctcttctccgcgacttaatctagggtttcggtgggattcctcacgattggataacgtgggatgtgttggttggtgttttttttttgttgcatagatccctcaatgtggtgcacgtgttccatggttcaagtttctcagtttgatggtcgtgcaaaatttactcttgggttggaataggacacttaagctttggattgttttgaatttagcctgacttgtggtcagatactcagatgagaattgtgttaagatgcatatgtttgtgaatttgtacaagattttgcattctttgtcattgcagatgtcttgggatgtctgtcttatgtttatacttacacaatcaactccgctagaccaccatcgactttttagtattggcgctcttagaattactcatttttgtcagaatgacgcgctgcattttattgtattattggtgcatggtgtttttagcattatggactctggatcattctaaatgatttataccttgtctcttgttatcagaactgttctaactcatttgcattcataattatctccaccggaatttgctttagttggtggaatcctttctaatattttttacctttcctttgtttcagctagcggactgcagtcctgatggatgcagtttgctgcttcaagtttgtttggatgaagtgctgctgaatgccgacgtggcaaagagctctcgattgaaacctgagctcttatcaactgttttcaagtattgtctggataaaccatacttcagcaccagtttttgtgaagcactgaagacagtacatgtcagtgatatgttccttgtaaaattgtcaaatgaacttaatctatctgctggagagagggttggagttgggcttgccctatcagattctggaaatctaggcttgattacgaaaggtaggtgcttggtagatcaatttccctggcttagtcatgtgtcagttctcattgaaatgcttaattacacctctattctttgctttatagggcaaaagttctcaatcgctgaaatcgaggagatatgtgcaaatccagcccatgttttaacaaatgatcaaattcacgatattgttgtgtttcttcaccagactgatggcctctcaaagcatatggattctttcactaacatcatctccctattaaatgtcaaagagatgccattctatgttcctgccccaattaaggaaggcaacgctcggccaacaatttcttcaaggtttgaagagttccttctatttacattatgcttcattttcaattttgctttactcatgcacatttcattgcctttttggcaccttacaggcacatggaactatacactggtagcttggatgatgattttgattcccttctatctgaaattgggaaagaaataagcatggctgacatcattactgaattaggctacgggtgtacttcagatattgctcattgtaaagaaatactgtcactatttgagcctcttgatgatatgggaatctctaagttgcttggagcagttgtttgcactcatgttggtcttggtgaagctcataatacatattcaacgttcatgtcggccgttggcaacagccaaccaagtgactcatctcaatttactgcatggaatattgatgttctcgtggattcaattaatgaaattgtgagtctttatccttcatcttcttgattatcattgctgtcaacttcttttccttttcatttcttaatacgtcttgtcttgtgagtgcaggccccaagaactaattggattactgtagtggaaaatcttgatcatgagggtttctgtatccctgatgaagcggcattttgtttgctgatgtctatatattctcgggcctgcaaggtatgaagtttttctgttgtactgtactgaaagtcatgaactgttttacggaattattgattgattcatacaggatccatttcctcttcatgctgtctgtgggtcactgtggaagaatacagaaggacaattatcattcttgaaacatgcggtggctgcgccaactgatacatttacattcaaacattgttccaggaagatggtatcactgtcctttcaaaatttctttaatcctaataaacatcttatttcacacttgacacgtctaacctttctgatcttccttaggtattccagaatttgctaaccgcatgcaaggcaatcaggcttggtactgcctggaccttctagaggttttatgccaacttgctgaacttggctatgcaacaatggttcggtcaatgcttgactacccactgattcattgccctgatgttttacttcttggtgttagccacatcaatgtatgctttctgttccaattttgtttaatgcctccccttgtatattatatatctttttaactttaggaacaacattgtctatttgcagactccatataatctcctccagtatgaagtattgtcttgtgttttccctatgatactgaaggacactacatacagtagtcttatgaactctctctggcatgtcaacccttacctcactcttcgtggatttgttgattcacattccgacgcaaattgccttctcagaactgttgagatatgtcaagacctaacggtaacacaattttgccaaacttttgtagctaagtttttaagttgacaacttaacagtcttgtagtttgtttatattttatctgaagtgttaactttgtaattcaatgagcctttatttggtactcggtgactcttaattttttttatttgtgtacaaatgaagtggacggttaagatgtag

SEQ ID NO: 20262 - DNA, 17248 bp, Oryza sativa
  unsure (1)..(17248): unsure at all n locations
cgacctgattcaacccggttttgttagtttagatttaacccggttcagagatgtaaaatgaacttatttcttaattgttcaagaacaaaaaggcctaacccagttgcaagaaacgctaacgatgagcccataataataccggcccaagggacccctcacagaaaccctagaaccgcctgattttcatcataaagacccctagcgccgcctccgtcttcgccctccgttgctccccctctcccagatccgcccgcctccgccgccactcgcgccgaatatccggcttctcaatccgcggaaactactccctgttgttcgtcgacctcttcgtcgccggagacatctaggttttctccctctctatgttgctgtatgtttgtatggtcgcctcaaaactcttttgtaagtttctttattatgtgctcggtggctaattagccaatcacacactgcggccgccatggcagcaacctttaaccctgtgtgaatggtcagtaagcccacctacattgatccgctttgttgcgtcgattggaggaacgactcttcttgtgcgtgcttccttcattgatgcatcaacgcacactgctatataatatgacctagctctaagttaaatccatcccgtgttgaattcgttttctaggttgcaaataagctgttttagaaatactagtggggatctccatgactcacgtatgcattattcatttagagtggagggttaggggtactgacatgaacaagtgcggtgactcgttagccagtcgcaatatcaaagctctgccgctggtagtaggtggtcacctatatttagttttcgcggtctgcatcttgtgcaatgggcggatggagcaatcggcaaaatcggtccttcaggctgttgttgcgaacactgcttgctgctgctttgctaacagtcaataccaaaacaactctttcaataccaaatcaactctttttttttgtccctttctctaagcaagtcatctcaccacacctgatgttgtgtgttagttgtggtggtagcattttttcctggtagcgcgcagctatacgctattctaagtcaggaaggcgatgggcatttagttctagttatctatatgtagtatgcagcagttgacctgttgttgctgagtggatcatagcagttggcttcaccgcattcatactttgtagtttgccttgcatagacaatctggtacagcgttgtatgaaccttaatgttctggttttgccttttgttatatgttattggacccatctctttgtgattttacttacaatgttgattacgcctagaggagacatctaaaagtttaaacctattctagaaagctgaaagtatcaaaatgccctgcctatcttgatgttcattgaccatgttcctccaaacccctaatggaaatgttctcatctctataaagtatacttcctccttcccaaaaagattcaaatcctaggatgaatctaaacacacatgtgtctaggttcatccctaggatttgagttttttttgggacagaggggagtactactgaattttgatacgtcgagaacaagtaatctttgttcaaataggnnnnnnnnnnnnnnnnnnnnnnnnnnnactttttccgactgaagtatcagtagtaatcattatcaggcttgtctgacagtgtctggcatgatgaataaattgtataattttttttcataggattcacttgtgaagttttttttttatcatctgcagtttccctatacggctataccatgtcgatgcctggtgatgcccaacctgaaggttctcaccaatccgcttcctccgcaaaacctgccttgtcatcgtgccggaggaataaatctgagaacacgtcatttgtctcagatttgagagatcacatccaggagtttatccatgcttccccgaatgagcacaggacctgttttaccaagactatcaagagaatgtttggcatgtcaaaggtcgttgcagagagatccaccgaagcaaaggaacctggagctgaaagtgttttgccacttcagaccacggtgtcgcggtagactgtgatcagtaatataattttctctgtagaaagtaatctgtcgctgaggatgatcttaggatagagaagtcatagttacacttgataccagtagatcatgtacagtaactggaggatattctgtattaatttgactgctaaaaggcctatatatattgtaagaagagaaactgagaagcagttctttgaattatctacacccaattgtgctatcacactagaagagacatttcctcttctatggaatcacgctgcacagcataacactttttttttctttctaatccaatcaaatctttttgttgcctataaaaacatgtctatcatctacaattgcgtcacaagtatgaccaagactgtacaaagcagcctagctgatccagcaagcaagcgccgcggcgacgagctggacgtgccctgctcggagagcgagctgaggctgaactgtgggttggagccgtacaacgcctgcacgccctcgacgtcgtccacggtgaggcgcaccttcttctcccgcggcttgatgctcgggtacatgacggcgcgcggcgacgccgagtggccgagccccaggacatggccgatctcgtgcgtcgccacggactccaggtcgatggccgacgccgtcgcgtcgacgtcgaagtccaccgcccagtgctccgacgcgtcgaggtggagccgcccgttctttggggagaaggcgtggccgaggatgccgagcggcccgtcgaacggcacgccgtcgccgtggttgccggcgtagaagcccaccttgatgtcggccgcctcgtagtcgtccgtctcgacgaagcccacggggatcgtccgcgcccaccgcgcgaacgcgcgctggaacacggcacgcacggcggccggcggcaggtagccgacggtggccgtcggcgagacggcgtaggacagcacgatcggcgggtccgaccgcgtccatcgcggctcgcccttgaagaacgtgaaccggctgaccacgccgccctgcgcccccggcgagagcgcgacggacacggggcgctccacatcgtcatccccgacgccgcagcgcggcgacatgatctgatcgagcgtggcgttgtcgagccggccggtgaccggcaggctgaacctcgtctggtacctcctcacggcgacctcgaggtgctcgtcgaaggcgtccgtcgtgtcacgccccggcttcgccatgtacccgaacctcgccaggtaccgcttcagctccgcgagccccgtgacatggctccctcgccccgcgtcgagcagctgcttgaacgagtgccacgccacgccgccgtgcccgtgcaccacggggagcccgagcaccaccaccatcgccacggcggcgaccaggcacgacgcggcagccgcgcggcgacataggaacatgagagcgcgcgcggcgtggcgtggcgagggcgaggcggccggtgtggccgttattctcgttatcgtgggggctcgcgggggaggcagtggtggacgaagaattttatgtgcacacgagagtacgagacgagagacagaaaaagctgtggatagggagaagtgggtcagccgatggagctccggttggccaccggctgacctcgtcgtcttcctcctcctcgcggcggaggagagacggtcttcctcacgtaatccactggttaagaattcaatctcctcaacgacgaccaactgtcgccggtcatcgtcgtgacgcgaaaatacctaactccactctctaatctaatctatgtactcctacttaacttggtttcgatttggggataaaaatcctaattggctcatcacgaaaaagaaagaggataggcgctaattggaaccgatcataaaacagcaaaacaacaagctgccgtgtggcggtaaggggtttgcttgacctgaagatggcaggaatcgcagggagagtatcaggttcaacgcgtgttggtgttcagaaaaaattgggggtcaatttgtcgaattgatcacggtgctgtgcacaagaggggattggattatggatggccttgtcaaatggtgctttccaagccaaaaccaagaaagcgattggacccgtttctctgcttggacctgggaggcttacgtttgtggacagaccaagaaagagaagctgcactagcctagcctgaaaggtaccttcgagttgcgccatcgcgttgaacaccaacgcatggtttatttttcttttcgttcttctagctactactgttgtacggtatgtatttttccctcatagacatcatttttccatggaatcatcatcatcctatggactgaaactactgaaaactctgcaaaaccgaattagaatcaattaactctggattgctaagttgcgtagctctctagtatagtataattaaccaagttgagtttgacatggatgatagtatatgatataaacgtttcagaaaaaaaaaggaataacatatcttgtttctgatagggtgcttcacccatccatccaatatggctaacatgacaggatcgtatgttgtcgcaacactgccgtgtcatcgtctggtcgatgccgatttcttcgcgtcaagtgcgaggtggtggtgagacacggacgcaatatctttcatccatatcacgcgggcgtccatccgatcgcgacccgcgcgcactagagccgtaccaacggtttctccatgtcattttgattggtctgcttgcttgcttcccttcttaataatctccatcaccttgaataataatcttctaattgtagtacttgagtttttttggtctgtgcaattacgcatgaaggtgttgattgtgagcacgcaatgtgttgcagagtcagtaagcttgcaggagtttgcaagaacaatgcaatttgcagtgtctctacgtcatggcttggctctggctcgtgaggaggggagatggatgacttctgctttgtttattctgtcaacgagatgatgtctggtacagtgtgttggtgcaggattcgttaaaatctgacatgggagagagcaggtattgttgatgagtacggtttggtttaagaacaagatgcctttggcaggcagaggccaccagtccaccaagctggaagagccatggagaattggagatggaggctttgcagcatcagagtttgcgattgcactatcgcagccttccaagtctggttgccgtggaagtacaccaacgttgatgtgcatattttgcaggaggaattttctggtgaaggatgagagtagcttttcgatcgacgcatgtgctgtcacggtcgcagaggaaagaagaggagttgcgtccatcggcgtctggggctccagcccacaaagtggcagctattgtagtcacggcccatatacgaagcttttagctttggggcaggtctcgaccagcatagccttttgcattttactccccccgttttataatgtaaattattctagcatttcgcacattcatattttttttatatactagattcattaacataaatatgaatctagatactagattcattaatatcaatatgaatgtggaaaataatagaatgacttatattgtgaaacggatgaagtactattttagtaaatagtttgtactatcactgctcagtagagttggattgtaacaactgtattggctttgaaaaatgttgacaccacactagtaagttttgttttaagttgtgattttaagttgtgaaatatttggtagggcaaattttaacataaaactaaagcaacccttagaatatatattctccatggtgaggctatgagagacgccgaccaaccttggtgaggctagacagattcttctgtaatgaggaatgggaccttacctttgtacaccacatcctgcatgccctgtccacaggaacatctgatcactgcccactgctcctctccaaccctgcggggctgcgacgtccaaggacctttaaattcgaaaacttctggaccaggctacttggcttcaaagctgaggtacaaaacacatggaaccagagcaccatgcaccatgagcctttccaccgcctcgcagacaaattgagccgaaccgcaatgtccctaaagagatgggcaaagggcatctgctcagaagcaaaaatcaagtatcacatggcgctcgacataattcagaggcttgatgtagctcaggagcgccgggagttaacgcaggcagagtacaggttgagactgggcctaaaaagaaggctcttcggatttgcggtcatcgaaagagcatggaagaagcaagctgcgcgcttaactaatattaaagaaggggacgccaatacaaaatacttccatcgtaggataaatgcaagaaaaaggaaaaatcacatcttccgcttaaggaagcagaacggctgggctgtcacacacacagaaaaggaacacaccattgcagaacacttccggcaagtcatgggaagacctgagccaagagagtgtgatctcaactgccagtctctagggctcacccccgtcgacctctctgggttggacgaccccttcacaaagacagagatccacaaagcgttaagcgaaatgcctgtcgacaaagcaccaaggcctgatgggttcacagggaaattcttcaagcactgttgggacattatcaaaagcgacgtagtggccgtcttcaatgctctgcacgacatgaggcacacacactttaacctcctaaattccgccaatgtagtgctcatccccaaaatggacggcacggagggaatcggagactacaggccgattagcctgattcatggctttgccaagctcttctccaaggtcttagccatcaggttgcgaccactgatgcactcgctaatcccgacaaatcaaagtgccttcattcgcgaacgaagtatacatgacaacttcatgtacgtcagaaacatggtcaggaaacatcacaggactagaaggttgatccacctcttcaaacttgacatctccaaggcttttgactcagtcagatgggactacctcctcacgctccttcaaaatagaggatttccacaaaggtggcgggaatggattgcgggccttctatcaacttccacttccaagatcatcctaaatggtacaccgggagaggcaataaggcacggaaaaggcttacgacaaggcgaccccttatctccattgctcttcattctagcaatcgacccactccagcgccttttggacaaggccactgatctaggggcgataagtaaactgagaggaagggttatttgcttccgcacatccatgtacgctgacgatgcggtagtcttcataaacccacaaaaagaggacgtacgagttttcaccgaccttctacgtcgcttcgggcaggtgtctgggttatgcactaatctgcaaaagtcccacgtggtgccaatcaggtgtgacaacctggatcttgacgacatcctggatggcataccagtaaccagagcaaatcttccgatgaagtatctaggactacctcttaccacagcaaggctaagaagagtagacctgcagcctctcttcgacaaatcaatgaaccgcatagccgggtggaggggaagacatattgggcttgcagggcgttccaccctagtgaaatcggtgctcacttcacaacctgttttcctcctgacagggctaaaagcgtcaaaagagtctcttgaggctcttgacaagcagagaaggaagtttttgtgggcggggggagaagccttgacgggtggaaaatgcaaaatcaactggacccgaacctgcctacccactggtttcggaggtctaggaatcctaaaccttgagaagtttgcaagagctttgcgcctccgatggctttggcaggaatggaagtcaccggagaaagcatgggtgggttctggtacgccgtgcgatgacaccgataagctcctttttgcggcagcgacatccataacaatcggaaatggggcgactgtgagtttttgggagtcagcctggtggcaggggagaaggatgaaagatgtggcaccgctagtctacgcggtctccaagaaaaagaatagtaccctccaacatgccttgcaatcagatcaatggctgctcgatctgggattaccagtggacgtgggctggacaacagagctgattgaccaacttgtcacagtttggaccgccatccagacaatagagttgacagaacatgagaacgaccaaatatgttggaagctcactagccacggtcaatatacgacagcatcggcctataatgcacaactacttggaacaacgaccaacaatttcaacaacctaatttggaagccctaggctcctcgcaaatgcaaaaccttcgcctggctggtcattcagaatagagtctggacctctgatagactatctacccggggatggccaaatggatccatatgtcccttatgtcgtcgggtccaggagacggctctacacctcctcgcaggctgccgctacacaaagagaatatgggcgaccctagcggaatggacggcgtgcaacaatattcaccccaaccattggcggtaggtttcgtcggtgttagaatggtgggatcaaaccacaagtgtaaaagaggcacccaaaaaggctctacgctctctaacgctcctagtcgcctgggagatctggaatgaaagaaatcgcagaacattccagcataaggagctcccaccgagtggtcttctgacaaaaatcaaggacaaagccaagatatgggccttagcaggcgcgcatcatctgagaaattggcttgttccttagttcactagggccaaaggtcctgagtttttttctttccctttacactgtacagttttctccttctatattcaatgaaattggctgctcgccaattcgttcaaaaaaaaaaaaattctccatggaagacatctaggtgaaacccaacacgacgaccttttttaaagacttattattcaagtaaccaacactattaccctttcaagaagaaacaatgtctaataaaaattaatcaaagctatggcaaatctctgaataagttattcaatgcaagtgaagcgtgagaccatgctaactattaacggcacaggcaagacatggagggtagagtggtagacgtacgagtcgccaaaaaaagggttttttctttgctgtttcctttttctgctggatgtgctgttcaatttcccttatagtttcgacgcgcttgggcttggagtcggctgtcaagtcgacacgtggtggtttggcaccgtacagctcctggacgcccttgacgtcgtcgtcggtgaggctcaccttccccctgtaatgcctgtacatcatcgagctctccgacgacgagtggccgagcccgagcgcgtggccgatctcgtgcaccgccaccgactccaggtcgacggcgagcggcggcgcgtccccgccggcgccggccacgttcgtcaccgcccacttccgcgccgcgtgcaggtgtatccgcccgtcctgcggcgggtgcgcgtgggcgagcgcctcctcgccgccgcccttgcagacgcagccgcacgcgtcgcacttgccgtcggctgtgtggaggtagaaccccaccctgatgtccgcctcctcgtagcgcgccgcctccgcgaacctcaggggcgtcacctccgcccaccgcgcgagcgcgctccggaacgcctcccgcacggcgtcccgcgggaggtggtcggcggtggccaacggcgacacggcgtacgtcagccgcatgtccggccgattccaccgtggtctgccccacaggaacgtgaacgccgccgcgccgccgccgccgttgttgtcttgggaccgcagtcgcgtcggctgggagccggtgccacagccacacagcagaaacatcgtgtacgtatacgtgccgccggtgagttgcaatactagcgtattgatcgttgtcacgtaactagttacgattgattaattctataaattagtcactcctgtgttttgtttatagatatgacacaggccgagtgtgagcagaaatcgttctgaataactaatccgaataaaaaaagcaaacatcggaattcaactccgtacatgtattccatccgaatagcattagtaaaagaatagtactagtcttttttttttcttaaaacttactccattcgtccaaaaaaaaaagacaaaccctgagtttccgtgtccaaagtttaaccgtccgtcttatttgaaaaaattataaaaaaaattaaaaagataagtcacacataaaatattaatcatgttttatcatctaacaacaatgaaaatactaattataaaaaaatttcatataaaacggacggtcaaatgttggacacggaaacttagggtttgttttttaagacggacggagtaatctctgctaaataatgtggtggaaaccctagttgtcgcacgtgtttccctgcttcgccgccgtcagggtttagttgtcgagcaatgttgttgctacaggacagggcactgaagtgacaacatcggatccatattagcagggcagcacgacggtggaatcataattcaatttcaaaattcgaacttaataattggtgaattgtaattgacgtagaattcttctttcaaactaagcatttacggttcaaaaactaactgatgtatgttttatataccgtgcaatacaggggttcagattctctagagttggcatcaactccacccagtggatttgggcaaatctcatccatcgttttatttctacggttaagatcctaattgactcccttaattgatgcatatttggatctttcttttcaactgttctatttccaacataatcaagaaaataaacgtaattaatcttgttcctgcaattaatagaccaacatagaagagtttttcagtgtagagaagagtgatatcgtagatggtgaacatggacagccttgcgatggtgcagaaactagctctccgcctcgaatcagagctcagggcaactggacagcttactacaagcaaagccatcgctagcgcaagcaagtagcaacatgtacgtacatcatgtcgagctccttgatgctgctgtacagctcgctgatataacctatcatagagtccttgtttacaagcttgacgaaggtttacataaaaaaagtttgatgaaggtaagatcaaaagtggaaggaacaaattaaggataggttgagctgcattgatttaatctcaaccgtaggtgataaattatggctgagattggcccaaatccaccggatgaagttgaagccaactctaggggatccgaacctgcaatacaggggttggtgactagcatcattaattaatttgctaatgattaatatttgtaaagttggatggttttatccacctaattttaccggatgagttcatccatcatcattgtgaaatattttcactctcggctatcccatccacatttactcatcaactaattacactcgaaaattagtgaaaaaaagataatatataatcggaaaacgccgggatcggatcgggcgctcgacgcgcgccagaaaaattggacgctgcgcgcgcccgccgcccatgtgccgcccccacgccgtgcttcccacgcgcgccccccgccatgtgtgtagtgccgatcccgccacgtgtccccaccacgcacgtcgttgcaacaaatcacccatatattatggaagccctctattaagggaatccgtttcactttttttccaccaaaaatatttcacctagtgtattcataatgtttcactatgtatggatcaaatgttgcagtgaattgaaacactctttcgctatttgctgaaatttttttttatatagggtgaaacaacacttgatttttttggaaaaccgttatttcatacgttgtagcaaaatatttcatgaggtcatatggttatgtttcagctttttaaaagactaaaatatttctatctgtttagtgaaacatgtttgatctacttggtgaaacagtgcccgaaaaaaaattgggcgtccaatttgtaggcgcctcgtatataatttgattcttttttcaataaaagaatggttattaagtaccaatagtcaaagctaattcaatatctaaagaagtttattcaatgaaagtgggagtgggatcatggtaacaattacggcacaagtgagagctagaccacgttgccaaaaagagctgccgcgagctttcttcttcttctctttcttcatctgttggatgcgcgacaagatgtcctgcttgaagtaggcaccgaagctgaaatgtgggtttgccccgtagagctcctggatgccgtggacgtcgtcggtggtgaggcgcaccttcctctccctgcagctgatgaacgggtacatcatcgagctcctcgacgacgagtggtcgaggccgagcacgtggccgatctcgtgcgccgccaccgactccaggtcgacggcgagcggcgccgtgtccgcggccaggttcaccgtccacctgtgcgccgcgtggaggtggatctgcccgctcttctccggcatggaggagtgagcgagcactccttcacagtcgtccccgtcgtcgtcgtcgtcgtcgctgtcgatgcaggcgcacccgtcgcaccggccgtcggtgtagaggtagaagccgaccttgatgtccgccgcgtcgtagcgctccgcctccaggaatctcatcgggatcacgtccgcccaccgcgcgaacgcgctccggagcgcggctcgcacggcgctcggcgggaggtggtcggcggtggccgtcggcgacacggcgtatgtcagtaccctgtccggccgcgtccaccgcggcttgcccggaaagaacgtgaacgggccggcgccgctgtcgttgttgttgtcttcgggccgcggttgcagcgtcgtcgtcatcgtcgtctgcgccagtgccggctgggtggcggtgagacgcgccacatctccgcttctacacagagacatcatcgcgcgtacgtacgtgccgccggcggcgaggtgcagcgcatgcagtactgatgtgccttcacttgatcgtccgttacgtaattgggtacgattgattttgctatatgacaacaccgaacgccaatgtttggacgtttttccgagcaaaattcacgttccgagtagtattatgaacgccaatgtcttacacaaatcgtaactcataatactactctgacttgtatgttctgagcaaacaccagaattacacacgtgttccatgttttatcggaatagtattggcaattggaactagtagtttgaaattacatgtatgaggagtcataatcaatattgatctagtgctaaacgtttttcacaactgcctgcaacaaaagactaacgaggcaattaaccatccttaagaataaaaagacttaatttccctaacttagagggggcacaagtaaggcctggtttagttccccaatttttttttccaaaaacattacatcgaacctttaaacacatacatggagcattaaatatatattaaaaacctaattgcatagttaaaggaaaatcgcgagacgaaccttttgagcctaattagtctatgattagctataagtgctacagtaacccacatgtgctaatgatggattaattaagctcaaaagattcgtctcacagtttccagtcaagttatgaaattagttttttcattcgtgtccaaaaactctttccgacatccgatgaaacatccgatgtgacactaaaaaattacttttcgcgaactaatttccctaactagaggggcacaagtaaaaagacttaatttcctaattttgaagagaccacagaattagataacataatagtttaaacttgtttagtattctgtgacacggataaacacgttgtggcaatagcatatcaattttttccctgccaatataagagcttcttctagtactactactagttaacatgcaatctagatttttttttctagaaaagataattgcttcttttcataatgtgattaatcagagtttgtgcaacggtgcaacccctaaatacaaggtctccagcatagattggagcatgctctcaccatactgcagatcaatgactagctagctagctagagcggcaaaagtaagatgcaggctataccaagtcgccaaaaacgactccttggggtgtcatggtccggcttgaagtagtctaggaagctgaagcttgggttgaccccgtacaactcctggatgccttccacgtcgtccacagtgagccgcaccttcctttccctcgtgccgacgtacgggtacatcaccgagctctccgacgtcgagtggtcgaggccgagggcgtggccgatctcgtgcgtcgccaccgtctccaggtcgacggccgccggcgacgcgtcggcggccaggtccaccgcccaccgctccgccgcgtcgaagtcgatgcgcccgtcctccggcccggtggcgtgggcgtacacgttcagcggaccgtcgaacgggtgcccgtcgccgtgctcgccggcgccgtagaaccccaccctgatgtccgcctccgccgccgccgcgtcgtcctccgtcgtgatctccgcgaagctcaccgggatcacctccgcccaccgcgcgaacgcgctccggaacacggccagcacggcgtcgcccgggaggtagccgacggcgtcggtgtgggacacggcgtacgtcagcaccattggtcgtccgtgtcgcgtccaccgcggcttgcccgtccagaacgcgtaccggctgaccacgccgccgtgatggcgcagcgtaggcggcggcggcattggccgtgcgtcagcgacggcgacgcatgagaggatgcaagctatcgccagaagcaggagacacgcagcatctccgcggcgacgcgggaacatggtcggctgttattctcgttatctgtcggactctcgccggatttgatcgtcgtcacgtcaacgggctaccatgaactgaagattgacacctatgcttgatttacggactccaatggtttgcttctaaaaggcctgagttgggatcatgggaaattattaaagtgtactagtataataatattataactactctataatcacaatatgatttatatgtgtaactcgtatagaattctgaaaaacatgttcatattggattgactagctctagaagctcttaaatctgagatcgggtgttcgactcccactaacgcatagtcgtgcaaaattcgaactcccgctagcttatggttgtgcaaattttttttcctcccctctcacgaatctcgaggcaaccaaaagatcacaaatttgaaacttctgtggagaaaaaacgggttaaagttatttagcaattccatgaatcataagcttaaaatactacccaaacatgttctaacttcggacaaccgatctaaactagttaagtcctgtacttgatacacgtgctcacatcaacggctattttttcactgatagatgatattaacagcgggacgtccgtgataacttcgtattccggccaaaatagtactggccattggcacatcagcaactggtacatagaagagaaaaaatcaagtgctgattatttcttggtacagaagatccatgttctcgaccactaaatcttcatgccctcgacgttagcccttccgtcaagtttggccgagaagaagcgcttcatgaaatcctcgtaggccatcgacttgtacaccggcctgccaccgtccttcgtcacgagctccggcagaggcccgaccgtcgcgtcccggcacgcctggtggaacaccgccgccgagatgcgctccttctccgggtgcaccacggccctgtgctcaacgctcctgtacctcccattgctcagaatctgcaagcagcagccatgttggtagatgattaagctagaaactctgtactggtgtgcaccagcaattcaacatcgatcagcaaagaaaaactgtttcggtttcagatcgacgcatcaggtgaaagcctggtcaatattttacctcaagcatgtcgccgacgttgacgacgaacgcgccgtcgagggcttcgatggtgagccacttgccgtccttcctgatctggaggccctgcatgtcgttcacatggagcagcagcgtcaggctggtcgcgtcgcagtgcggcgacaggccgagcaccttgccggtttgcctgcacggcgggtagtagttcaccctcatgttctggggctggcctctgaatacctccaggagagactccggatcaacgcccatgtccatggccaagaactccaacaggcagcgtgctacttttgccgtctccaaggagtacctctccatggaattcctgtcaaacatttgtgttgtgatatgcagcaaaatggctcattggaacaagagaagccatgaacgttcagactgaaaaactaaaccttggaaataaaaaaaattgttcatttcttggttgaaatttctcaaaactacttatttcccatagtcatgatcaatgcaaagattagttgtggttttgtttgtgaggcagacctgaaagatgaaggatgggcaggccagaacctcaaatccctggactcggttgggcgaagccggaggtgtagcaggtctccccagtccagcttctgcttctctgaaacgacgaagtgctggccatagccttcgtacttgtctggtggtttagcgtacgcctccttggcttcaagtggtagcttgaagaactcagttaagtctctcctcacgtcgctgatcacatcgtcaggcaccccatggttgacgagctgcagtttaatttgtgagatcaatcacagtttatcctacttaaatcagtgtcaccttgtccaaatttgaaaaaaaacactatttaattctctcccacatggtttattgatcattcagtttaataatagttgtatcaccttgtgaatcatcaaagtaaaagcttgattacataatcttgacgtacctggaagaaaccccagtgctgacatgcagatcgcagcttggcacactcctcttgggatgactgcgggttgagcagcttggcgagatcgatgaccgggattgccgtgttgatgccttggccgcagatgacctcttcggtgccagcctccggcctgatgtacctgtcaggtatctgctggtcaggtcggttgcaagtcagtgcgagttcctgcacatttggcacctgtagagacatggttaatctggttttctcttgctgctcttcccactgtgctgatgatg

SEQ ID NO: 20263 - DNA, 630 bp, Oryza sativa
atcccttcctacaacaccatgattccttgattcatgcactgcttccactctccttagttcctccacaagttggttagataacagctggcccgagtgagattgcagaacctgcacatttcacaccgtttcagcgcatttcaattatgcaacagcacatcacccaatgatagctgaaaaataatagaaagatattgcaacctttataattagagggcaagattctcggcaaatatccaaaatcatcacttgaggttgttggacagcaccttctgcagcctcataagttgtgttgctcataatttccttcaagaatttcacacattcctggaagtactagctgttagcatgcatattaaaagtacagactacagagccaagctggaatgaagaccatatagaaaagtacaatctgcctgaatttgtggtgacatgtggaagaactcatatattacctcaagaaaagtctctccttgagcagtcagcttttcaaccaaccatttctcaagattgctatgactttgcctaaaagcaactgtagcaagcttgatgctaaatgcaaacggggtggaatcaaggactgcggataggatctcttacaaataaaattgtgagaataataaaacaagcact

SEQ ID NO: 20264 - DNA, 8857 bp, Oryza sativa
cttgtgaagatgagattatgccagatgaagccaaaactatttccttacctttactagagttgattttgtctagtaattctttaatataatcactattctgtgaaattttattttgccttatcttataatcttctaataattctaatgtagtatttagcttattattaagaaaagaatattgttctacaaattgcttttgttctttatatatatcttctaacttttgctctaaatcttcttgtctcttactccaatttatatagaaattatatattaaatctacaattaaatttagttggctattattagagtgccaactatgttcttcagtatggcttagtctacaccttatgttgatattatctttggtatttattaactttccaatattagcttctaaatttagcttctctatgattaccaggctctgataccactttataattaattcacaactaaaaccacgaagacaccattcagagcaaagcttccaagcgcgctctcaccctccattccatctttcttagtagtagttcctctagcctaccttgcataatatatattgaagcaaggagttgtaatataaaggtttgtaaggtgagaaaaacttgtttgtatctaccttcggggttcccgaaagggaaaaccgtatgtaagcctatttgcttaatatgaagtaattttctttaagtttccctgtttgtttgctctagataagcgtttatgctagggaccctataggagaaacctctcggatgttctcgtttttagcctgcatcttgcataggcgtctggagaaccagtatccgtagagaagtgttcccctcgggtggaactgcctggggagatggtaaacgcttagctagttcaaatatgactagggatacctgaagttggttgcttaaataggcagataagtgaggcatacggctagtaccgagtaggactttaaaatttctaaatcaagcgccggttgtttttggattcgccaccctgcaaagatcctaaaaatttaaagaaagttttcgagtgaacagtaacctgtgaacagtagtgaacagtaattctgtactcataataagtgaattcagcactaagaatagttgtgaatagttgtgaattaattatatatatatatatatatatgtgtgtgtgtgtgtgtgtgtggagcgagttatgagagtacttgagggaaccaaacaagaggtggtggcactggaaggccttttacgttagttaccaaacgatcccatcatggcatgtgcgcagtcacggcgcggcgctcggtcgcacgaacgcaccacgggcacgcaggcaggcaaggcaggcaagccgatggggacgtagtaattggcctgtggcctatataaagaaagattcctcctctccagggccagccagcccccgcccactcgtcagtgccaaaacctactcgaccacaacggcgacgacgttatgtttaacgtacgtacgctgctaactgttgcaggctagctttcagttgcgacgacgcgcgccatcctgttaatgttcaatcgttgggcttgtttatatttttaccattccaattcatgttattatttggtaaaattaataattatagggctatatttagtttgttaccaaattttgataatgtctatgaaattttaacaacattatattgagcacatcctactaaaacttgaaaatattgccaatttgctaattttggcattaccaaattaatgaaatgattcattttagcgtacggacccgtcatgttattgtcttatatatctcggccgcaacaaaaattttaatttttaaacttcattttaattttatctgaatgtttttgtatcgtagtttactttgatgttgcattagcttttaaatcgttaagagcatggataaaaaaagttttattatgtttatttgatgttacttcgttcatctcatattatcattggatgcatcaattgcaacctcagccaactccaattttacctctcatcatatcaacggtgacacatgaatgggaaatatttttagggtcactcttaatatctacttgttgacttatcagccccaatcaaaatttgatcttagagtaacttctaatgaatcaacatcaagagtggtgttaattttatgagaatatagctggagtaaaaccgggcggttaaccattctggatggcagactttctgctgccgagggaattgaagcagtatgagtatgtacgggagagctagcgagctgatgagtgggagagtgcaagctgcgacctgtagctagctagcattgatttcgatcgggggccaggatgcttcggcatccgttttccatggacactcccgcaggctacagctcatggagtcacgtgctcgtgtgcatgcattgcggttaaagtaacggggcagattcttttaatttactagtagcccccctctttgttttttgttggaccaaaacaaaactagtccatcgatggtttaattaagtagtaaattttttagatgcccccaactgatcttatgcttggtgaaaagaaaaaaaagattaagcagagtgctctgctggagtaatggatgagagagagagtgtgtgagtgaggtgcaagtggtggagcatcaatccatctgaatgtgggtgggcagaggatggatgcagtgcatggggcacgttgggggcctgcttctgtgctgggttgcagcttcctctcttctctctcgctaatcctataccctctcacgctaattaatcgcttcaccacccttaatgcacacagcttttgtcaaacattgtttttgtgcacacacatgtagtagtactgggctcgtaccactccactgctactgttagtgcttgctatgctacaccctacacacacatacaaacacactctctctcctcctcccccactctatattaattacttcacaacaacccttcctgttactggtgagcgacttggagctcttcaaagccccagcactatttctcctcccccttcctcctcctcctcctcatgagctcctcctctcatcagtcatcactacactcacttagctagtggcaaaaagatagatagctctagctcgtactgcatcaaacgggcggtagttgcactgcccgtttcaagggaactccagtgacaaccagcttcttgccaattcagaacgtgaccgtgtggtacgtacggccaaggcagtggctagctcgcgatggcgtcggagtgggaaatggccatgggcgtcgacctcggcatggggatgagcacgtaccacaacgcctccggtggcatcgccgccgcgccgatgatgggccaccacggcggaggaggcggcggcggcgggtactccgccgcgcaccaccaccaccaccattactacgggatgcctcatcaggcggcgatgggcgacgccatgcgcgtcgacgacctcctcgacctctccaacactcccggcgcccacgacttcttcccggcctccgctgccgccgccgccgcaggtgaccacgggcaccaccaccaccaccacatcggcggcatgggcgagccgtcgggcgccacgccgtcggccacgtcgtcagatcaccagacgtcgatgctctccttcgccgacgacttctacatacccgtaagcaccctggataattcgagatcgcacgcaaagctagccacttgcatatgcacgcatgcacatacccttgtgaattttgcatatgaagttagctagagtgcttaattttgaggcttgatgagatcaaacgggtttgagctgaacaatggcgatggatgtgtgtgttgatggggttcagaccgaggacgctgccgagctggagtggctatccaagttcgtcgacgactcctactccgacatgccgaattaccagtcgtccgcgcacgccgcaatggcggcggcggctgcttccgcggccaacaacggcggcggcagcttggccggccaaaacaactgcctcacggcggcgcctggccgcggcgcccgtagcaagaggtcgcgcgcgacggccgcggccgccgccgggtggcactcccttgttccggggccgccgttccagtcgtcgccgtcgtcgtcgtgctcgtcgtccgacttcccgtcctcgaacaagccatcgggcaccgcgaggccgaacggctcaggaggcggcagccgcggcaagaagagccccggccccgcgggggcggaggtgggcatggaggccggcgtgcggcggtgcacgcactgcgcgtcggagaagacccgcagtggcggacggggccctgggccccaagaccctgtgcaacgcgtgcggcgtgaggttcaagtccgggcggctgatgccggagtacaggccggcggcgagccccacgttcgtgctgacgcagcactccaactcccaccgcaaggtcatggagctgcgccgccagaaggagctcctcatcatccgcggcagccaccgcgactccgccgcggccgcagcagcagccgccgccgccgccgccgcgggatccgccgcggcgaccgggaggccggagctcatgttccgcgactacggcgtgtgctgatcaagcggcgcacgcggcgtccagagcgagccatgcaggcgcagctacgcatcacatcgcatgcatggatggatgcatgcacagcacagacgcgcgggcttagatccttttgcgaaattctcccgtctccctttctcttgtttatttcctctccctttttttctcttttttgccttattccagatatttttcaatgcttttttgttaattaatttgttggtacctacctcccttgcaagttcttcctcctctatgagagagatcaatcaattctgttggtataactatgattgtgattagccgtccaaggcaggggcgattagttgtctcacgtacgttcgacgtactaacgtacctcccgttcgttcgttaattctccatctgatcctttgctttttcgttattttctggtgaattttctctcgtggtactaccagtacttgcccattgcgtttgcgccttagtttcttcatggccattaataacttcgactcgactcgatcgacttcggttgctagtatatgtgtttttatttcttatatgaaaaaaaaaactttgggatggtaggtcaagcattttaatgggtgaaaaagaaagacgcgaggtaagcggggaatggtggtggaggtgggtgggtcagcacgtgacttgccctatcatggcctttttggcaggggaaagagtgggcaatggtccggtcacgtgacggtgctcccctctccctccctcctcacttattcgcgacgtttctaattttttccctttcattcctcctttctttctccttggtggggctagcagcaagctgccactgctttgagaggaaaaaaaactctccataagaacctaggccgagtttacttttaagctttttcttcaaatttctaactttttcatcatattaaaacttttttacacgcataagctttcaacttttccgtcatatcgttctaattttaaccaaatttttaattttagcgtaaactaaacatatccggatgtgatattttctagtactatgaatctggacaggtggatagaacatcttcgagtactatgagaaaatgtataatccgattttaggttgctatattttgggattgagagtagtaaagcggagtgagctcggtgtggtgttggccatggagctagcgagcgtgctgcctgccgacttccatgtggagctgtttgcttgagccgtatattgtgggctgattattgtatgccactagtactactaccacccccgttactgttactgctgcctgctgctactactagtagcactgaataatgtactattgtaatcatgcatgcatgttctcttctcttctccggtgtgctcgatgcaaagtcagacgtctctggtttttgcagatgtgacctgcggatatatacatcggttgaggttttatctgcaggtcgaagacgagaaagaataagcaaagcaacttgcagagggagaggggggtaaataagccaacgtgcttgctaccggcagcaagtgagggggggtggtggtgaccggtgacagaggaggcatgcatggcgtgcaaagcgactgtacaggagggtttcttggctttacacaaagaggggagatggcgagtggagacgacgagtagttatcggctgtcacgttcgcgcgcaggccgcgatttgacacttgccccccatgcgaagcggcggcggccgcagaggcctcgtcgtcgtccatcgcgcgggcgcgcaccgacgcgcgcgtcgtcgtccagcgtccaacgagagattgacttcgccggcgcggtggcagtggcatatgggtggtagttaacgggtactcctaccatttcaggttataagtcgttttcactttagtaaaagttaaactattttaaatttaactaaacttatagataaatgtgtaatatttatagaactatattagtttcatcaaatcaataattgaatatgttttcataataaatttatcttaggttaaaaatattactattttttttctacaaattttattaaacttgaaccagtttgatcttaaccaaagtcaaaaacgaagagagtaacaaggtaagctgcgtggcccgcggtgagctgtgtggtgacgcccacaccgtaaggaggcctgggccactactgctactagtagtagcaggggagagggggggcaggtcaaggcacgcatcggcatcatcatccatcatgtgtgtgttcttctccctgggaatcctgcagcaacccaccccagctgggagcaatcagacacacaacaagacgggggccagttgggcctaaacgacgatggtaaatgcgactacccactgacaaaaagcaattgcaaagaccaccttgccccacgcccaaagggccacaaggcccacaacccaccaccaacagtccaccaccacacggtgaattttcgaaacgaaccgataactttttttaatttatagtatgtgttttcttttttaaaaaaatttacagaaatatatttgtttccaaaaatatattataaataaataaatgcacgaaccgacaggtaacaattgtactgacatgtgtttgtttagctgcctcggacgctcattcagtccgtgcccattcctataacaaaaaagttcagtgcctattcgatttgttttccgtgaaaaatctttagtactagtagtacgttgttgaaaaaccatcactgaagtaaccaaatcaggcctcataagtggactttgaaaagaaatccagatgatacagaacatcctaaaatggttaggggcaggcacactccatgcatatcgaacaaaaaatcatttgacatatgctctcggttgattgagattccaaggacaaatatacagtcacacgggtacagggccattcatcggtacacgacattgcaatatagcataggcacattatgccggtcgagttgtcctcaagtacgtagacaatgttatggctatagcttatttcaaattactagtactgtgtctgtaaatgttattctacctcgcgtcctgagtgtacaataaaaagaatctgatgccataaaagacttaacagctagcagccctaaatgatggtgtggtagctggtgagagaagttttttctttcggaaggttgttgatgacagaagtggttaattctgcccaaaggatttcgtttaggtgatagtagtgaccagtgatcagagatagcgggacgagcagagacaattaaaggccccaccaacttttttgtacttaggagtatctaattaattaggtaattaagtataataatgctacctccacccaaaaaatacaagacgtatttattttgaattaaaacaagaaaaaaaaataacttatccaacatataacaaaaatggacgaggcttcttgacttaccgccatctttgcctgttgctgcaaagattgctcaacactgccattgcaagaatcagaaatactcctaccatctttgcctgttgatatttcagttaggagatcattttcttctgaatcttgcctgtcacgattacccgggctacttaaaatctcctcctccagaggtgtctgataagaatctgcacatttatcttcactaactctagtagtttgcatcttcatagtatatatttgttcaatattggcaatcatacgttgtcttccaaaattgttgctgcgtgcattctcgtttggacatctgagctcattcaaattaatattttattctaagttattttctggttctacaagagaattgcagtcgttctcttccttgacatgcctcttattgtgaaccatttcagtcacactcttcaattcatttaaagtttgggcaacaacaatactccagcttctacttcatccttgatgaagatcctgataaaatgttcagcagattctgaacccagtttatccaccaagtctttaaatgctactcccttcgtttcaaaatgtttgacatcgttaactttttagtacgtgtttgaccattcgtcttattcaaaaaatttaagtaattatttattcttttcatatcatttgattcattgttaaatatactttcatgtacacatatagctttacatatttcacaaattttttgaataagacgaacggtcaaacatgtgctaaaaagtcaacggtgtcaaacattttgaaatggagggagtataatatatatgtcacgcagcagttcaactggtaatgatcaactcatcattttcttctgttagcttctgcatccagaacagccaaatttctcactaagtctctgaatatttctgaatgtaacacatgttgcagttaacatctgatctctgaacc

SEQ ID NO: 20265 - DNA, 1379 bp, Oryza sativa
aaacaaggaagctttgctcagatcaaaggaggcgagccctagacacatcacacaaaaagaaagaaaatggaacgaagcttgaagaacaaccagaagaaagaaggggaccaagtaaaggacattgattgatttcccaatccatgatttcacaaatatttcttcctctctgatttggccccaaactgatctgttggctaaaaatagcgaaaaaaaatgtcagatggcaaattgcaaggccaacaaattccgcaacataatcaggaatttcgctatgggtgttcacatatataggtagctagaccagtgtgtgctttggagtattcagaaatcacgaaaagtttgtgttgtactgctcaaaaccttcccagtactaataatttgaaaagatttactcattacaaagactagtacatgtggttcagtgtggctttttcttccctctatcaatcatttggagtctccccataggcgagaacccatacctgaacaaacatacttagagcaagtataataatacttagagcaagtataatagtagactataaaccggctaaatgctgagttggaggagagaagagagtagagagaggagaagcggcctgtaaacttacagtcggcttgtggcttggacacaagaaccaaggcttgtggcttggacacaagaaccaagaaacactgtgagtgagacaagtgggccttgtattaattgtaaatagctgactattatatgggtagagtgagagaatgctaaaaaaaccttatagccaacaggtcggatgtattattagccttgctcttaggtaactgtttctccagaaattgaggtactcaatcactattttgaaaacagagatcatagagagggtacttaatcacttcaacttaattcatgccataagccactaaataccaaattattttcagattctttagaataaaagcgaggtagccgcagctggttccatcttcttcggtttccatagctgccttagatacatgcctttttctcattttgcccctgcataagcacaaaaaagtcatagaagaagaaataaatccatagaggttaagcgaaaacaacattcagtattgcgctttttaatgaaagccgggcgtttaattacgcctttcctccaaaaaacaacattcagtaaaatttcagatcatatacacacatgtgaaattattttctaaaaaaaaagctaacagaactagcatttaatgcacactattcatagcttcaaaaaaaaaagttgctgatgagtttttgtgcatttgaaatataacagaccacaattagtatttatgtaatataaaatacttgctgaaatttactaagaaaactaaccttatagttgctgaaatttgctaagaaaact

SEQ ID NO: 20266 - DNA, 3940 bp, Oryza sativa
tttaaacatagtgctatgctgcatggccggtgccacattggtcaacaaagatggagctcatagaaagagggttgggagaggagaggtgattgatttgtgctttctcacttacttagggggtgtttaaatgtaggggtgtaaagttttggcgtatcgcataggatattatatagggtatcgcatggggtgttcgggcactaacaaaaaatctaattgcaaaatacgttagtaaaccacaagacaaatttattaagcctaattaatctatcatcagcaaatgtttaatgtagcaccacaataacaaatcatggagcaactaggattaaaagatttgtctcgcaagttagtcgcaatctgtataattagttattttttagcctatatttaatagtgttcaaatgcttgatgtgatagggtgtaaagttttaagatgggatttaaacagggccatgtccatcaacattggcttcttttttaaatttgcatagatactagtcatttcaaaatgttactaagtacaaccttgggatgagatttgatccatctaactagattcgttgttagaataagttaaattctattctactactagattacaatattttagacagatgcagtaacttcccactcacaatacggatttcgtcaccagacatcagtaaaggagaaattcattccagtcatgacgtgtcagctcgtagaaattatagtatactctctccgtcccataatataaaagattttgggtggatataatacattctattacaatgaatctggtcacatccatctaaaatcctttatattatcatactaatccataaagcgaacttggcaaccttgtgttaattaagctgaaaattttattgacagaaacaacgcaaagacaatgttcgagccgcttagactgttctggccgtggaacccaacatgctgctcttttggcccattccaagcccacaggagaaaaaaaatgtccacttggacacgtgaaggaataaaccgtcaaccagtaaccacctgtctaatacctgtcacaaatcacaacccgtggacccaccatgagcaccggagtcatggacccaccatgagcaccggagtcggtctagctcgcttgtctacgtgcaccgagtccacgagcaccccacccacacccaccgacccaccccaccaacgcatcggcgcaacgccgtcgccgtcgccgtcgcggtctagaaaaagccgccgcgatctccgaccgtgtcgtgcgctcctgtccccctcctctccgacgagccgcctcgcccatggcgtcgcctccgtccgctccctcctcctccgccgccgcggccgcgcgtgccgctccccatcgcccgcgcttgcggtcgcggcgatctctccggccgccgccgcagccgcagccgcgggtgcttccctcttccgtcgcctgccgatcctccgctctccgggtgagttcccagatctcgcgggcgccttcgttccttctcctcctgctagggttccgcatcgggggaatagccgcctcgctgatgttcatcgaggctttagcacgtgtactattggcacgaaatgagtgttctcttctagtttttccccgtctgattatccatgtgttggcgagttgggatgctgcttgtgtgattcgtttcgatgctatttgatctcgtcgagacggttaggatgttgcctgttggagaaatcatccacagtatcaccttggatttctgagtggtgactttatgatggatgtttgtatataactaattgagtttgcgcgagaatgattcgtttgacaaaccaatgcgtgtgaaatggttaagctaaggcaatcgcattgtcatttaattatcctttcaggacttccaattcagaaatatctccacgagacccacaagcaggcgcgatgtccttccagttgcctctgcatttgatgaggtactgttttatttttctttagataacattgattcttatggagtttcttgatacattgattcttatggagtagcttaatttactattagcgttggtttttatgtaggatctgggtgatttctcgctggtgcacgctgatggggatgaccctttagaggttgttgtatattcaagtgagagcgactggagcgatgaggaggtcgtgttaaatccaacgagtgatgttgagttacctctaaagagcaagagccgctttgagggtgtagagggtgcgatgacagttgctgcccataggtttgccacgattgagaaagggcatagggacagcaggcaagataataatatcttctgataatacttaaaaactagagattcagcgtgtagatttgtagcatgcattatgatcttccaggattatctgtttatgttattcctggtaaatggcacttaaaagttatcaaactagtagtaagaaacacacgctttttacaagtgtttttgctaggttctgactgaagctctttacatcaattcccagaactcaacaagggctgatgaataatgttggactgattgctttcttagcaatattacttttgtttgtcgactggtgttcttggcggattgttagactacctctggactctttttacttgacacgtccttttttaatatcatcagttctatcagcattagctggatttgtttttgcaccagttgctgataacatgaagattcatcatttccggaggagagggaagcttatgtctccattctatagaaagccaacaccagcaatgggaggattgttctttgtacctattggcatttttgttgcaagaagacaggttggttcctcaactggagtgaatggagcagctattataaccctcatatttgcaatggttggatttcttgatgatatttcaaatcttgtcatggactgcaatcgtaaaataccgcattggatgagattatttgttcaggtgaatggtgctttttcaagagagatgataggatgctcttcccttatttttttgacgggagatgctcttcccttattatgttgaaagcaacttacagttcttttgcagattgttgctgggatttacttatctatctggttaagttctacaaatatttcaacaccatataacacgtaagcattacttcaacttatatatactgaaaaactaactgcagtttgaattaatgctttatcggttaggcaatgtggtaaattgcctttttttttttgatgaggagtaacctttcttaatggcctatatcaaagtattatcatgatgcagtacaatgtacaattcagttaataaggtgcacaacattatttctgcctccctgtactcacaggaacactgcacagatacttcgtgccttacattacttccaaatgtactgatttaacatctattttcaactcatgctagtagctagtcactagtgatcgtgttcacatgttaatttagaggcaagggtgctttgctaaccacttctgattttcatttcctatttagtgcaccaagctagtcatgtggccttaaattccataaccagcattgatgtggccttaaattccataaccaacattgatgtggtcttaaactccataaccagcattctgtaacaaaaagatacatgtcactaccgttgtcatagttctatagctttgccattttgactaatactttaggatgtttttgacttttttcacttgtcagctttactaattcgaatttgttcatgaaggaaattccttgttcctcttcctcctcctcttggccttgcattcataggaaaaatctatctcgttttggctgcaatatgttctctttccatgggcactggagttacattggttgatcatcttgatggcttggctggtggcgtcgctgctttagcacttgctggattgtctgttgcttccctcccaatttgttcaggtaatttgccattctggcttgttgagctaatctcaaatatactt

SEQ ID NO: 20267 - DNA, 3627 bp, Oryza sativa
gttcattccgatgttcatcgcatgcagcatttttcttcttgagctgctcttggtaatatttcaggtaagttattgcttggattacttcctcttttattttttttttggagacaatcacttccttttgcttcaattattttttatatctggtggttgttacacttagtcagcatttctataactgttacaaagtgtagcttctgctttgagctgcatgaaccgatttagatgttttccagtagataatggttgagtattgttggagttcattatttgattgttctcattctctgtcaaagagcatggacgatcttactttggttatagctttacacccttttaataaaaatagatgggttaatatatctgaccatcaagtgatctttgttgtaaaccactattttttgttatcgtttccatctttctgggccccgcagcccaaaccttatgtgcttaatcaggaccccctagaaggcccttttactgtccatgagcaattatattcgtatggaagtaaatttagctgagttatgcttccataatccacgttgtgaagtttgcttatccttttcttctgaaaagtaagtttcgctggtacattaatcgtatcatgccttgtgtatatgtttttgctgaacagtttttagttaaatcttggtctagtcagattcaaatatgacaatcctttgaagtagagcgcatttgatcatagaatactttttggtgatgaacaaagcctgtcttatttatacgattatctctcacaggtcccttttcagatggctaagaagcacttccttgggacaaatagatatcccttgcgtattcttccctcgtattactttcttaagtcgtggggtatcaaggaaccttatattgtggctggcgcatacattatatcatgcctattgacggcatttgcaggatatcttggtcttgtttcagcgtaagtggaagcttaggttacttactattctttcattctttttctgtcgctcctaccttattcttttcagaaagtttgaacctatagcattcttttagaatggtagttaccaagtgtatgattcatacaacaaacatagaaaatgtagatattggacctagtaggattcctaacaattgtgggaattgggtattatagcatgatatcgtgagctacgttttctgccttgcataaagaattgtatccttttgtgacctaaattattgtagttacaaaagatattagactatcaaggaaaatagcttatgattcttgatttgttttctccctggtatgaaagtttcaataatggattggtatgctttgctagaaattagttttgaataaatgcctaaagggctagcctacaactttctcgaggaaaaagagtacagaagttttagccttttagggaaaaagtttttgaaagatagataatctaatcggtgtatcagtgattcagacattcaatgtatgtgtcacagactcacagttgggtcggatacatattcagctgtttcacaagtcggaggtagcagtcagttttctaaaacgcactgctaaaagtgcaataagttagtactacctccgtattataaatataagacactgtttacggcattgatgtgtaactttattactatcttcatcccaaaatgttataatctaagatgtgatttgactcctgacaacaaatctggacgactagcttgcaacattttaggacggaggaaatacttttctatttgatataacaataatgtctaaaaattacaatattataaaagggcttataaaacatagttattttgagagctatctatagtcacagttttaaaagtttgaccaaataaaatcaataggataatatatttaaatacacatggtaatagtagcaatgttttttttttgacctttacttttgcaatgatgagtttagggtttgtttcgatacgtgacgacacaacttatgcacgcaggagtgatcttgcacgtccaagtcaaaggtccaaaatgcccctgacatatcgtaggcaaataacggttgatatgaattcagtggaaaataaggaatattcccaaaaatatttacaggtaacaaaaagaattctgataaatgtacatgctaaattactgtacactagtatgaaacagatttctacaagtggtcagaacacattcgctggtggttaggttaagttgttcactcgaaaaaaatgattttgctgaaattaattcccagaaaaatgattttcaacgaacgagatgaaaagtgaaattggaatcggatttgacgatataccaaccccaaatgaaaacattataatagagatacagatcagaagaaagagagtgagacgtgggtaacaataataaaaggggagctataagacacgtgccacaaacacaatcgtgcgaactgcacgttattacacgtacaacggtacaagcacgaacatgcaattatgcatgacgtagagagcttgttattactcaccgttgacttttacgtgtttgatcatttgttatattaaaaaaaatttaagtaattatttattctttttatatcatttgatttattgttaaatatacttttatgttcacatatagttttacatatttaacaaattttttaataagacgagtggtcaaacacgtaataaaaagtcaacggtgtcaaatattttcaaacggagggagtactaataactgtgttgacgaagagaaccttggagggagatgactggggaaatgaaaggagcggcggggcaatgaagaatgaacgagatacgtaatgcccatgcagtggaggtggaggaaaagaaaccgagcggagcaggactgggtaacgggaaccagctcagaacgatggcaacttgactcagcgctgcttgaggtagacgacgcagccgtccctcggcaccatggtcggcatgtacaccggcacgtcgcagccctccgtcctctcacgccggaagtcgacgagggagacgaagagcgccatgaagatgacgaggtggttgagcgcgtaccgctgaccgacgcactggtgcgggccggcgccgaacgcgaggaagttgcgcttgtacaccacgtcctccctccgcgcctccgagaagaagcggtccgggtcgaacgcgtcagcgtcttggaacccttggaacgacgactcgtacaccgatgggaacaccatggtgcccttgggtatagtgtactgcgccgtcagctggaacgcctcgacggcgatgtgcggcaccagcgtcgccggtggatggtaccggacaacctcgcgcgccaccgcctgggtgtatttcatcgccgacatcatctcggcggtgatgggttcgccggactctggcgaccagagagcggccacctcagcacggacgcgggcgagcacgttcggatgggagtcgagcgcggacaccgcccagcagagagaggaggtggacgcgtcctgcgccgcgaagaggaagccgaacaggagggcgccgacctccacgtcgctggtgtgcggtggtggcggcagccccgctgccgtggcctcgtcgatctcacgcaccgtttcctgcatcaagtagtccggaggcactctggctcgccgccgccaagcatgcgttgcctgctctgacgtgcgcagt

SEQ ID NO: 20268 - DNA, 1259 bp, Oryza sativa
gccccacgaacaccgtttgcgaggtctccaggttcatgtcgcggcagggcacccgtatcggctcggccttgccgccgttggaagcactccggtcgagccaccgccggaggtgggagatgatgacacgctgctggatgacggcataagtggagagcgcgcgcggcgtgaagttgggcgcgatccggcggcgcaggtccttgtgctcctcgccgaccaggtagacgaggttgtgttcgccgaagagcttcttgccgaacgggtggctgacgacgtggaaggcgtcggcgcggacgttggcgaacacgcggtgggacagctccgagtcacggatgaagaccgtgaaccggccgaagagaaagtccgcggcgagcccagcgccggacttgcgagcgagcgccgcttgcacgtcccagaatccgaccgggtcgcggatcaaatgcgcggcgctaccgaggaacggcacgacgagcggcgcccctggcatggaccccttcttgcggtggtatgacagctgctctatgagcatgtataacgccacagctgcagccagcaatggcgccgccgtgcggaggtgtacgaggccgtgaaacgactcgattgagccggacgggtcagtgctggttctcatagtgcgtggggtgctgaaggctctcgagctcctgctcagacagttgcacttatgttctactggacatgcgcgtatacgtatttataggaaaactatttcaatccggcgggcaacgtacgtcccatcagtttattcaaacaccatccaaatattcgtgttatacaatacatctattgaacacattgactatagggttaactatagataacatggctatcaattgaagcgccaacaacaggctctcttattaaccttgcttttatacaagctctctctcttaatagctatatataaatgacctggataaatattgaagccagtagcctactaaactattgaccttgctcttagagcaagtttaatacttagtagagctactatctataagcctatattaaagctaacatgcctataatagatagactataagattgcctttaatctttttctttttctttttctccaactatctatcaactattatatactaaaaatccattaaaccacgtacaaaagctcttaaaccatcatatgacactcctatgaacgcttcttaaaccatcatatgacacttctataaacgcttctagctagattagcgatgtcacgtgtcgctctaataaataagaga

SEQ ID NO: 20269 - DNA, 870 bp, Oryza sativa
tgcttcttcgccatggatgccggtaagccctccacctcggactcgctggtccttgccactgcagctagcaagcagtcccctccatctctcgttgctcctccgccggcagcagccatgacccgtccattcctcatcgtccccaccggcggacgcgacaccctcgccgttgtcgttaagggaatcaacggccggggcgcttctccgccatggaggccggcgagcccaggaggacaacggctaaggggaacgagcgaccggggagccgagggtgaagctcagcgggacgagcggcacgggggaaggaggtcggtggtggcagcgacaagggttgaggacggtgacgcggcggtggctgggtggcaaccggcacaggggcggtggccggggaccttgccgggggagcagacgatgacactgtaggcgcagcctggcctgccggctccgagacgaggggctcgacgacgacgacgcaagcgcagtctggcctgccggctctgagacgaggcactcgacgacgacgacgacggcgcagcccagctcgccggcttcgagacgaggggctcaacgatgatgacgacgcagtgcagctcgacccgccggctctgagacgaggcgctcgacgatgacgacgacacagcgcagccccactggctggctcagagacgaggcgctcaacgacgacgacgcaagcacaacccggcccgacctccatctctaagatgacaacggcgacgacacctgccgcgtcaatggtggtggcgagagaggaaggggaaatagaagagaggggagggaggtgggcccacgtgcaatagggggtaacggggatttttgacggaaaatatggagtggcacgtattcaatttctcc

SEQ ID NO: 20270 - DNA, 8034 bp, Oryza sativa
atgatctcatgaactttattaaagtgatggatgcatataatgaagcaccaaacagctgaacatgcatcaaagttaacagtcataaaacatctcagattctcaggaataaaaattttggtgcatttgccctggtaaggcatttctgtactttcatgctgttattgatgagaaacagtcgagagaggaaggcatgatgcatgagaaacctattgaggccagtgtgctgatatttacattctgctgcagtgctaactatacctggtattaatttaataccaaccaatactattgtaacagttttatatccccttggatgcttggcccatgggtgtcataggacagaaggtaagatctagtgctgcaaaaggggcagcaatcgatggtggaacattaataatgttggttctgcatccttaactatggttacaatgaggttcagacatagtagctgtctcattggggaacagtcttatgaatttcacaattattcaccaaacagtcttatgaactaaatcactttatcaagaacttcctgcttgtgtttacctatttagtacttcctaaagtactatacataaaagcaacagagggcaaagatgaaagaacaaagctaattcttactagataaggaaatgacctaatgttgaaaaaagttgacatggatcttgcttcaattgttgcagaggatatgattagacgcaagtcgggccgacgtcgttgaatctggtatatatgattatattcatgtaaatatacaagcatcgtgacagataaaatattattcacacgtgaagatatggaaagatcagactagcacattccaaagatgaaaacctttttcagaagacccagcaacatgtcagttgaaatggatcgttcatgggcttcatcaaccataattacactgacaaaaaaaaagaggattagtgtgtgaatcaaagaaactaaaccatgcaagacaataaataatacagcttagtcatgcattttcttaaactagaaaaagggtttaataccactgaaaatatgtcactcaaagtatttcactcaaaacttgtgcaattggatcaaacatggttcaataatcaatacaaatggacagttgactacttgaatggccatcttatgatcatgtcgacgttgagggtgatataaactgatacctatacttggtcagaagaggatcttccatcatttctctgatcaataccccatctgtcagaaatttaatcatggtcataccctgccaaaccaggtatgtaaggaataagcagactaacaggagagagagagagagagaaaaaacaattttattctaatttgtattgacaaacggtgaaggaatactgtagatatacaacaatgcttcatactgcagaatccatataaaaaaaacaggcataaaaaggaaatgggtcatactggatttgtttgatcctcaaatcggattgtgtaaccaacttcttctccgagtctcacacctacttcttccgctactcttgatgcaactgactgttcaaattactaacattatgagttggaaggcaattatcagataaaaaaaagaagcatttgcaggtgcaatctaagaaaagtaaaggtctatcagaactggagcatgaaaataagaatgtcatctacgaatgaaactgtaaaaaatttcattcagttgacatcctttaagtcagtaaacatgaaattctatccactaaatgatctagaatggaaagtgaaactgtaatgggcatgttaagggttggcccataggcctagtcaaggtgttcctggacccaagtggcatgtctgcatcatggaggcattgacaccgcaagggcaatgaaaagagatggaacatcagccttatatagaaggggtgacttgacccttcatacactcatcttttaaattaagaaaatgcaaacaacaactcaatataatcttacctctaaagatcaaatccaaatagggattgtgatcattaaccacatggacaactgttgcaaacagtctaatacatatgttcgataagttattgtggaaatgtgagacatactgcaaaaataccatctctaatgcttaagaagaatcttctagctcagatgccatgtttatttgaactattggactacacatgcaggtatttccaatgaggatgagtcaacagagcacaacagtggcatggtatgagatcaaagtgaaatagttctctgtagccaagaaaaaataatgtcacatgtcatcatcagatggtcaatcagaaagacatgattttgtgtagaatctagagacagctgcaaaactaaataaaggttgcaaacactggatacctgcacggccaatcgtcttggttgagtgcagcctataagtcgaccaccctcggcccatccagcctctttaaggtactgataaaagaatacaatgaagccagaaatgaaaatcatttgccagtaagatggtgggaaattatgtagtgctgattcaatatacaatgaagatggaaagggaacatcatccgccagaagacaatggcagattatatgttgtttgcagttttcatgggcttttaaagtaagtaacatttaaacaaattcctctaggtgatttgaaggccattgttcatgtttactatgatatgtctttatattgatatatgtccctagaatatgacatacattaacagaaggtgaatataatcaaacaatagcaccaaagtgattcaattaaatgcagaaagcaggaaaatgaaactggagatccaagccatagcacatgctctcatccagtcaagcacccagagctcatagcataggccagtcttgcacacaaggtgtttttactctcagtctctcttactagggaacagacatgaggtattcggtggaatcaaaacgaattagtcagacatgacatgcaagtattcacaattttgaaatgtaaccttccaccatgctgcctaaggcacccagacaaaagtgcatgcaggtgcagcataaactgcggatgcaactacgtatgcaccggtcgcacgcaagcaaacccaggtgttcgaccaaatgcctcggacagatctctccgcacaccaagaaaatcgtcccagtggcaactgcaatgggaaaccgagagccattcatacgcctagaacacatacctgagggatctgcgtggactttccgctgccggtctcgccgacgacgatggtcgtggcgtgccgctccaccaggtagaggatggccttccggtacttgtacaccggcagccgctgccgctgccgctccaagctcgcgtacccaaacctaaaaccaaccgcggcgagagcagcggtgagcagccacaccttcagaaaccgcgagtagcgcgcgcgacaatgcgagagggaagagggggggtttagtttagggtttgggggagcacccggatgaggaggaggagctggtgcttgtgggcaggaagaggacgccgccctcctcgtcctcgacgatcgccgccgtcggcttctccgaccccggcctccagaacctcgacatggcacgcgccgccgcttctcgtcgtcgccggtggggaagaccgtgtgtccgtgttgtggtggatgggggagcgatagtgtgggaggcccgcccactgccggtgcttcaaatgggcttttgatttgggcccaccttggatgggctattaggctttggaatgaagaacaagtctattttgcttgataactctatgctcccgattaaatcgtctccttcaaccgcaatactggatataactccacgtttatctccgaaaacgaaataatttgctttggtttcaaagattgaggaggcgttatatccggtattgtggttgagagaggcaatccgatccggagtaaaggttgagtgtggtaaaatagacatatgaggattgttgcccggttcctgaggattgatgggctaaaatcaaacctcacacatgcgatggtgctgggcttctggaaagtcggttcgattcacagcccaaggcagccaactgaatgtgctacagtggtgtagcttagattgttcctaaattttcttatcacacagtagtcgcacatgcacaatatcacattttgacttgtgcaaatacgctccccaacacaaacttaaaaagacgaaatcccacgatatatcattgatctcactaaaatcatattaaaagcccaccttcataggtgtagtcatacacccacaactccatcaccatattactattacttctttagttcgcagtgacattgttttcctctcaccagtaatcgataaaaggtgaatgccaacggctaaaaggtaggagctgtactagaataaagcacctcgacaacatccatgataagccatgaattcgacgatccactctattctctttaatcatgcactctgtatataggttccttgctatcaaaagtacatctatttgttccaatcacaggatcgagttaatcgtccggaagggctggcctcgtaatcgtaggttgttcgtgtcgatcagatcatatcgatcgatggattgatcgagcggacgtatccaaaggcgacaccacccccaatttggtgatcgaggttccatgcatgcacgtctcatcatcgcttgctttccgtccatgcacgacaaaagctgaccaaattaatcatcaatacgtacatctctggggtcaatatatgcagatatgttccgagtgccgagccattctgtctcaactctcaacccataggatcaaattaggaacataggtctattctaaagatgttaattaagctgcgttcgttcatcacatctcccctcctctgttccatctttttccttatttttcctaaacttttaaagatatacgttaataagttgtttcgttttaggtatgcatcctaacccaaactgaatttctatcggaaaaaaaaacccaaactgaattttcttaatcatcacgtgtttttcacgcttacctctcatgctcggcgctttctctcccacgtgtctcttcctctcccccagccagatctggtcctgccgctgccaaagctgaccggcgtttgcgcggtagccaggacggtggcggaggggaagtgggaggcagaggtgcggcgatggcggccagaggcagccggtcctgcgcctggccgtgtgggttggggatggctggaggtggtcaggagggcagcgggaaccggcaaggagtcggcgatggagtccctccggacggcggtagggacagcgaagcacggcggaagatggtgacggcgctcggcggctacggcagccctaggggctgcggcgtcccaagacagtggcagtctgagcactgtgaatccgataaagtggaagctgatcccatcggttcgtgtatggttggctagtttcagctaaacgacgaatgacgacgcatgaaagtgggctaactggcggcatgtggcgtcagcttatctgaaatggataaagatggcaccaacggaggtttacattgacggcgcactaggggcggcggcgactagacgactttcactcgtcaaatcgggctgtttcaggagaacaaggtgggacgtagagaaacaaggatgtgtcgaggttgtatggttttcttttcgttttttggttgtgtgttttcctccttgttgaggtgtgagtctaaatactcacgtatcattttggttgtgtatattattcgtggatatagaggccagattaataaaaatttattataaaaaaaatcctaacccaaactgccgaaaacggctttagggtgtgtttgaggagaaggggattgaggagattgggaagataagcaaaacgaggtgagccattaactcatgattaattgagtattaactattttaaatttaaaaaatggattaatatgatttttttaaagcaactttcatatagaaaatttttgcaaaaaacacaccgtttagtagtttgggaagcgtgcgcgtggaaaacgatgtgcattctcactccctatcatccaaacgaacgcagccttagagcatctccaacaggatggctatttttggctctccatttgtctatttagccaactaaccataaagattcctctcccaatctgcgcaaagactctctaaatcctaatggctagtttcctctcaaaaaatccatatattgcatttagttcacacataccatatccatatattgcattggtccatacattgcattgcattcagttcactaaattaaaggtccatacattgcattgcattcagttcactaaattaaaggttcatacattgcattacaaaagttcactaatttaaaagtccatacactacactgcatacattgcattgcaatcagtccagtaatttaaaggtccatacattctattacaaaagtcaaataatttaaaggtccatgcattgcattgcaattagtccactgatttaaaggtccatcatattgcactgcatttagtccgtagcagtacacaaaagtttagaggtgattaattttgatgcaaataaagataccccacttggaatccttaaaccgcttaccaaggatttcagcttgcaatgagtcatagtacattttccttggtccagtcaagcaaaataatgcagttcatacaaaatcaatattgtgagcaccatgcttctccacgcacttgcaaacgcaaacactataacaacaaggtacatttgatgcacacatatttctttcgatcttcagagttgcacacattacagagcaaatacacattacagttgcacacatatttctttcgatctttcgatctacagagcaaatacagaggggattttcgatctacagagccaatacagaggggaaaggagtggtggatgggggttttacctgctttgctatgggcatcggcagggtggtctcagcagggacggcggcggcctcagcaggtcctatcggcagcagtcaatggcggcttcggcaacaaaagtgaaaagacgacggcggaggggcggccctggtagcagaagacgacgacggaggggtggcgcagaggggcggcgctggcggcaaaagacaacggcggtggtcgacggcgtcttggcaacaaaacacaacggcagaggggcgcccctggccgagaggacgccggcggaggggtggcgcacaggggcggcaccggcggagagatgcgcgcgctggatctgggggaagggaaaaacgcgatctgtggaagagaggataggtgggagtagtacacgtgcgtgggcccacgaatggctaggcctttttggctggccaaatttggccagtgcgagcagcactttgtccagccggatggcttggcttggccagtttgttggaggacaaattttaattaaaattgtcaaaatttaatttagagagtagactaaggaggctgttggagatgctcttagtagtagtatcgaacatcgggacataccaaacgagagggattttggtcaaggatttactaaagtagtagtagatcatacgcacacgtatataaacagatccatgaatccatatccatgcatgcatacatgcaccgtcatcaggatattccaactcttttggagacagggtacgtgacagggcccgaaagcgatgtgcctgcccttttttaggctccggccggaactactagcgtagccatgcaccctcgtaaccgagcgacgagatatatcgatcgcgatgtggatggtgccggccgtcgccgtcgccccggccagccgcctgcatatatgcagctgctgctgcgcgcggtggacgcggctcgtgcatgtggtgtcgcggcggtgtcgggccggtccccgcgcgcccccgcctccaccacggcaccaccactccggtttgcgctgcttgtttgctctccgctctcccctaatcatctccacatgcgacttgtacgcacgtagagtaggggaaatttactccatcaagcgctacgtgaagcaagatagtgaaaatacgatccgattcgatgttatctcgtttcctatatctcgtagaaatagttttaaaaaaaccgggaatgctcattggcgggcgtccggcgcg

SEQ ID NO: 20271 - DNA, 10905 bp, Oryza sativa
gcgcgccctcccccacgtgcgtacggcccacctacttctctatctcattttttcaacaaaagatgtttcaactagtgtatttacaatgtttcactatttatagatataatgttgcagtgaattaaaatactcttttacaataaaaactcacatattttgaaaattctctattaagggaatttggtttattttttgttctataaaaaatgtttcacctagtgtactcacaatgtttcactatatataaatctaatgttgcagtgaacgaaacattctattgcaacaaaaaaacccatatattttggaaaccccctattaagggaatttggtttattttttgttccaccaaaaaatgtttcacctagtgtactcacaatgtttcactgtgtatagatctaatgttgcagtgaactgaaacattctttcgctatttgctgaaacattgtttttatataaggtgaaacaacacccgatttaaacgagtgaaacattttcgatctgctcagtgaaacaattccgatatacctagtagaacatcgtgcaacatttaaaaataattcaataataagttaaattttttttcgtcggaatatatccatgtgtggtctgttttgaagatttaattgtaacgaatttaatggtgcaattggatcatgatttggataagtaatttaagagaaaaatcattttaaagtagttttgcacgtaaattgggcgctgacgtcagcgcccaattttaacaattttgcatcgggcgctcgagcgggaggcgttcactaaaaaaaaactgacaatatttaagtttaaattttatttttataagttttaaattttttttaactgcctgtatatgctagagtttaaattgttcttctttataaatggtggtagaagttaaatttaaacgtgcacatttgtgtagtagagtaatatatttattttaatttataatgctaattttttattattatttgaactatttagaaatgagaagtctgctgcaaaacgtatctaatcttctcgggtccggaaaagagacgcagaattacgttagcatgcacaaccgcatatctacaagcgactctgcaaggctctcagaatcaatcaggccgtaccatactatcgtccttgaaacctgctgctgtctattcctagatctgcacggtcatggccccctctgttcttaaaaaaaaaagtttactcgcttttctgtgacagtgacactggctgccccaggacattcattcatcttttcctgtgcggaattacttgcagtggttatcgtgacactggaactttcttttcctgttcctgtatgcaacgaattactttctctgtaaatttcttaatagaattcgttaaattcctgcgctgctgcttactacttactccgtacttcagctcagtggatatgtgaacagtgaactaaacaagaagaaagagtgaattcagtgatttatatattaccagcaaacaactgctcaactccaaaattgcagtatgaggaggaccaggaggttgtacatggtacttggtcataattcataacaaatcatttgcttgtagccaaaatttgaattttgaaacttaattttagagttgattttaaggattttttcatcatattttattttctatatgattggtttttaaatcaccaagaatttaaaataaaggtcttattcataacttatttctagttaattattcaatttttaaggtttatcagttgtgaagcagatgatgagaggccaaacctattttttaagagtaaatttcataaaacaccacctattatgatctaagttgcaaaaagacacaaggattttggcacgtgacacataactccgggtattatatttctaaagtttcatgaaaccacatcgttaaccatttgacatactcatgtattaaatattttaaaaaatatgtaccatttgacatcctcataattttgaggtgtgattgtagaactcaaaagtatgatagatcaaagtcaaaataattaatagtatggtctcgtgaaactttaggaccataatacatatggtaatgtgccacatgccaaaatcccaatagttttgtgcagcttggattataataaatggggttttatgaaatttacttattttttaatgatagtgtaagggtgaaatttcaccgagatatgaaagcacaaaataaatataatgcccataattaattatgcacataaagtgttgtatcttcaataagattttagagaagtcaagggtttattattgtccgtacacatttttttaagcgtgtatttaagaggacacaccagtatttgtacatgtacagtgttatgagagtgggcagatacgtccagtggtgttcccacgtatatacttcttgggtcacaggactcaatgtagattattatattctaactaaattataccatgttaattattaggatatcagttagtaatcatataattagtattagtatgtattattggatccttgcataatttttattttaagatcatcgctggattctcgtcgtatatatatgtatggtagtagtgcatcagtttgtatcaacgagtgtaagctcggcgcctccagcctgcaggtgggccagctggtggctaggttgcccaaactcgtttatacagcctccggtcccatgatcgatttaaatcagcctgcgtcaacagcgtgatgtacacttgcacacgtataggtacgatctgattgagaccgtgtatcatatatactctctctgttttaaaaaaccaaatttagtactagatgtacttcctccgtttcacaatataagtcattttagcatttttcacattcatgttgatgttatatgtagattcattaatatcaatatctatatgagaaatgctagaatgacttatattgtgaaacggagggataacatattatagtacaataaaattagatagagatatgtccagatttatagtgttagggatgtgttacatctagtactaagttggttttttataggatgaaggaattacgtacgcatacatgtatagcatatcatcatacgtatagttgggctgtacttgatctgaatcgtgaggctgggttaggtgtgcatctctactcatggcattttttcaatcataggtatgtagagaggggtaatgcagctatagctaggagagtacgtacgtggtgcgaaacgtacctctcgtgtatatggcgccagctgtggcatgcacgtgcatgcatgggatggattggtgtctcgtattctatcgatcgaacgatcgagagcgacacgcgcgggagatgattacggaacatgcggacggttccgcgcgcaattgcgatcggtcgatcatatgcagctgctggtaggtgggcgcgcggcgcgcccgtggcggcacgtgagacgccacgacggccgtccaattaattcccatgcaagacatctcgctaccactggttagtggagtactacgatcaaaactcaaaagtgtccagttacccccgaagtatatctcgatgtagaaagtgattcatttaattatttaattcttacggtaaaatggattttttagtgtatttgacagaagactaataacgaatgataaaaagagatgaaaagaaaaaaaaagataatataatgatcgatgtgccatgcattcatatatttaatttatactgtaagatggaattttcgtatgtatagtatatttgatagaagactaatgacgatgataaagggaaattaaagaatagaaaaaagataatatgaatatctcatccaacggtggagccaattagccaaattcccggagtggtcaggcggcggccacctagactccactactgttacctgactggcaatggcctacgaattttatttttttttacggcgcctacgaaaattaattgatctcactgaaaaacgttatttgtcgtttggctttgatgatgccgttagattcgacactggtcggtgcaacaaagcctatggtaactaggccttgatccctaagcatgtctcctaaatctctttccaacgtcatattaaaaatactcctatatacaatacggagtataaagatataaagcaagatgcatgcgttgttaaattccagggttcgctagtttcttggctttgcccctgctctcaaggagtagtacaacctgcatatttcctttgcacatgatgcaacacacactagctccatcccagagctcccaaccactgcgggcggcagccaataagggcgcagcaaatgcagaaacgagggcgaggcgaggatacaaggcaaaagctgaacacacaaccctgcagctagctagcatacatgcatggaagctcccaggggcccacatgctagttgctgcgtgccggtgagtccatcaatgcatgcacgccatcgaaacaaaaaaaagacgacacgtagtaggaaacaacgggagcacactagcacaggcaccagcaagccaatcgaaaatgtatatataaatatagtggtttcaaatagagaaaaggcctaaaaaaagggaaaaaaaggggtaaaatatagagctagcattgcatgcatgtggtgcatgtggtggatcatgcatgcatggctataacagcttgggagttgggaccaattacacattgtgccgtggagggaggattacaacattggtgtgtgctagctgccacaaagaatggcacatggagaggaaaaccacttaataaatagtactagccctactaatatacatctactatgcaatggccgcccgtctactacgtactcctatatatctgcagcgtcacctggttgtagaatcgaatcacaagaactaagtcaaccagaggggggtgaatggttggtatacccaaaaaccgaaaactcttagctgaaataaaagttaccctcaaaatcgacggatcgcggtctgaccgaagttgtcttgccggtctgacagcctggttgccgtcggtctaaccgagattatatctccggtccgaccgccgagatcagctgcttctcgctgtcgctgccgtcggtctgaccgccgcttgccgctggtctgaccgccggtagatcgccggttggaccgccggaacccggtaaacacaaatcgaagaactcttaaagtagatgacgactttattgattctctctgtatttacaaagtgcaccaacagcactctttacaaaaatttcgactaaactcgaaaccctaactcaaaactcaactcaattgctctcaaaagcgataccgggaagcctcacgctccccctctatttatacatgaggtaggcagcctaaagccacgaaccaaactcatactaagagttctaaacaccttaggaaaccctctagtacaagaaagaaactttacataaccaatcgtaccaaatttggactccttccaaattcgactccgcatctcatacgcacacaataactccatcgtatgccatatggaatctccatcaaccacgtgcatcaactctagcctaagtatcccgcatgatctctgaccaccacggacgtcgtcttatccccaaaccgactcccggtccatcaccgcaaatactctcccgaggcatcaagtcacctacattagaataaacaaagaaaccatattctgagaccaagctatctccaacttgactcattagtagcaaacaacagtattacatacatatagtatccatctagaagtcataatcaagaaataaactcggatatacaaacaaacaacccgaaaccaaaaccgacacagtgtcggccggtcagaccgcgggctgcgccggtcactcattagtagcaaacaacagtattacatacatatagtatccatctagaagtcataatcaagaaataaactcggatatacaaacaaacaacccgaaaccgaaaccgacacagtatcggccggtcagaccgcgggctgcgccggtctgaccgcgcattacacgccggtctgaccggctaccagagcccggtctaaccggttacatgaaatcacctgtgaatccaatcatctccaaaaccacttcgtgagtaaattccaaatatcaaaaccgataatctccaatgcccaattgttcataacagaataataataaaaaacacttttgattttacactggtctccatcatctctctgatcatgtggccagcattgccaggtaccgctttaattcgagacgggtagttatgcgaaatttctcacatggtgtgtcaaagatgattgatcactagtttaattgattcaagacgtttgtatgcatgcatgaacattgcatgccacatgcaaggtgtcaaataaattactaactggaaagcacgctgtttatattgcacagtttggaagtacaaaaccaccatgattaacctgtctgtgtctggtatactactatcgtttcccagaataaaagtgctgcagcttgaggtaattctggtcgaatgcttgcacgtacgtatgctctccgggcgccaagttgaagaactttaatactccaaccatatatccagcagctatatatagctagcagagtgatgaacagttgactagctagctggaaaatgctcaccagaacagtgtgagatccgaagaaccggctgggccggggctatctctcacatatgcaagttgagcctcgctaagctgacacactcggtggatcatgcaccatccatgcacgcagatgcagccatgctgcagccatgcgtgggtggctcaaattgctcaaatttatcgctcaaccgcgcgcagatcgatcggaaacaaaacaaataatggccaatcgatctgtttgtcgcccactgcatgatcgtacatgtgtagaaacgttttgtctaccctgcagtgccaaaaccgtttcttagatctaccccaatcaatagatctccatagtcacattttttgcttacgatatgaactgggcctggcggtccaaacaaatggcacagtgcaaatgcaggcgtaaactaaaaaaaaaacaaattaaaatcacaaataaatcgcacaatgcaatgcatcacagcaactacgtacagcgtacgacgcattgtaagagttctttttttttctttttgatttgaattctactactactcctataggaagattaatgtacattctgattgtagccttgcacggagctcgcagcagcgctggagccgtattttaggccataataactcgagcaatgaggggaaataaggggagtacggactacggagtaggagtacacctcactgagaagtaaacaacgacgacccaagctgaaaagaaaaaccgaagagatcgaacagtagctagcgaccgccccggcctttggtgggataaaaaaaaggggagaaaataaaatcgaacagaggaggcggccggagcgggcccaccggaaaaacctaggggtcacgtcagcacgtggcggatggtcccgctagttaatttaaccgccccgcgcagtaggcccagcccaccacgacttttgagcgcgcggccgtttaatccattaatccacacggcgggggggattcgcttaatcccattgacggcgccgcgcggcacggaccgcgttcatgacccgccctcgtgcaccgatcgaatcatccagccgtccatttttgcgcgtcaaagatcccgcccggcccggcccgggagccaatgctttactctacaattttcgccggtagataaaaccgtactccctttatccttaaagaaaatatgattgaacgtgacatatcttactcagattcaaatacgttttggttttttatgaaacggataaagtactatcgagagccacatgatacatgatacggagtatttcattattccgatttaatgcatgtatatttttaagaaaaaaaatagtactgaaatcataaattttggtggatgctacgagtatgataaacgaaaaacctgtggaaaacattatactccagagatgagttcatgtcaacactgataagtatatatcactccggccctttggttaaaattattcgccaattccgacagtaaaagaaactacgagcaagtcatttgtacgatggaaacgaagagtacttttgaccggaggaagcatttgtgacaaataatcatactgtatatagtcacctcattattctctgccaaacactagcaccataaattacacatatgcccgggtttattttgactaaccaactactcccgtcatcccaatttaatcatacttataaaagatatgaagaccaagaaaaaaaatcatttcttctaaaatttaatctcatagatcaaggtgatgtgttagacatgcatatgagcacacaaacaagcaattggatgcatgcgagacatgcaataatactctcacggttctattttaactacgttttgaacaacattaaataccaataagtacctaaaagcacccacaatggttatttataagctctctacaaaagatccatgtcagcatattttcctacttggaagatattaaatgaagagagagagcaaagctatctactaacttagagatagtctatagagaaaaacgaggcaatgcatgagagagctatagatacccatgtagacatactattgaggggtttactattaatatagtctattgctgagatgtacatgttttatagagagcaccttactttaccattgtgggtgctctaagtctatgtttagttcctctaaaatagtaaaagttttgcagttttggagtactttttgtcaaaatggatctaatcattagtagtaaaagttggcaaatttgacatttatcatttgggagtctagagtagcaaattttgctaaaatagtgcgttggaagccgtgctctttctctctctaaaatggcaaaatcttaccatgcatctaaacacaccaataaataaaacttcaataccaaatcttttgctaccaaaacttttgccaaaaatatttgctacagcaaattgatctaaacatgccctaattgggacacatattcccggctatacccatattaagggcctgtttagggagcttaagattctgagaagcagctggcagcttctgagaatttggaaaagctgggtttttcagcttctggcttctagtttattttctggattctacagtatctcagaatttggaccaaaagctggactatttgggggagcttctgattctgaaagaagctgcagcagttagaagctccccaaacaggccctagatacattcagggacatcacaacccaataattttatctagctcactttgttaaaaccactattttcaaagtattgagttctatgtttgagtcctgtggcactctatttttccaatgactttggtcaaaacgaagcaacagatgcatgcatctttattgtgtttgcatgcaagcagggatacttctgggaagctattagggcagtcccaaccctctacctaggatggtgtctatggcattaactacattgccatgtaggacttttagcttatgtggtactatattaactagctgggtggcccgcgcaattacacggctagcacccaaacaaaatcatatatttttcagtatgattttacttaaaatttattaaatagctatctcgtcgtcttaagactttaaaagactaaatcttatcatcccgtatttctaattatatagtttttaaaagtcacaccagctactaccccttacttctgtcatatacttctttatttgcttgcttgatctaccactatttctattcattctccttgaaatctttaaaaatcagatcttatagtttttataatttctagaagtctcgtcaaacgctgtcattatactcctctacgggccgtcaactgtcttttctctatattgtcattgggattttaattattttaattattccgagttttaattaatcacatattggatttctatatggacttctctttcaatattgcatatttttaattccgaatttcagctattttttattgtgtttatatgtggactcttctttttttttctccgattaacgtgggaatttctagcctccacagcgaacgtggttatgtatttttggcttgctaatttttggcttggttgtgtatttattggcatgacaataatgatataattcggaaacggcagagtttgattaggattattttctttcaatgtttctaaaagtggtgtcaacacgcgtattcccaaaatattgtccgtttccagtgtataatatgattaggtttttcttttcttttcttttgttttgtttttgaccgattgtacatttcgtttccagtagattaggttttcttttttttttaagacagattgtctgattccagtagtatgattagtttttttttttaccgattgtccgattcgtgtttcttaatatgcctttttttttcctttcttcagtttttaactaatcctaatctagttctatttttttcttttttcttattttttggagtaatgtgagaatttttaggccatgagaacgaacgtggaggctcctttttctattactttaaagatataatagatagatagattaagagagagagagagtgaagagaggaagaaactgggtttcatgcaagacacagcttcaacacaagaacctatgcactagacactatcaagttttgcgttaggagagaatagtgtctttataatagatgaagaatatatatgattggtagagaagaaagatgatatatttattaatggcccactttaagtaaccatgggttgtagagtgtagtttctattgtgatgtcttattgacatggcaccatagacactacttatggacaccatgggttgggaccgcccttagcctggaacttggaagctaagacgtcaattttctctatccaaaatctattactccctccgttttttaatagatgacgctgt

SEQ ID NO: 20272 - DNA, 35760 bp, Oryza sativa
aaattataattacgtaaattttttaaataagacgaatggtcaaacatatgagaaaaagtcaacggcgtcatctattaaaaaatagaggtagtatcctctaacatcagttaatagtagagaacaaaactactatttactcatgcacagataaattaacgaacatgtatacaataataccttttatttatgcgcgaataaacaaatacacacatattagacgatcaatttaatttaggaagaccttataaaacttaggagtagtaagctatgccctaccgacttatttttttcaaaaatttgtcgatatgtttgtagtaattttttttgtgcttcctttatttttcacaacgagaagtttaagcccctctagttcattttgtattgtacatcacagtactactactaatgtttagtttattgtgctaagctgtcaaaatgaacttcagtaagagggaggtccacggatcagcgctgtaggcataaaccatgcagggcagcagagaggagtgtcacctcttcttcttcttcttcacctgctataaccaccagctgttgctagctgtttctctccccttgtcatgtgacctccctactcccatctctattatttctctctcccctccctgtccctatcattcccattgcccgatttagcgctcgccgttgttttcgcagcagcggcggcggcggcggtggcggcggcggcgcgcggcaccaacaaacacgcgagctaaaacgagggccgcacaatctccggcacccgcgccgcgctacattaggatacgggcgctcggcgacggggaaggtttcgggcgtcgcgccatcgatcgcgggcgcgcatttgcgttgattccgggccaggctccctccccggccatggcgcagctgccgcccaagatcccaaccatggcgacagcttggccggagttcgggggcgggcaccatcaccatgctgcccacggccaccatcaccagcgcagcccctccatgggggcgttcctcgcggcgccattgccgcccttcccgctcccgccgccggcgccggcgaacggcggggcgcagcagcagcagcagcagcagcagcatcagccgtcctgggtcgacgagttcctcgacttctcggcgaccaagcgcggcgcgcaccgtcgctctgtgagcgactccgtggccttcctcgaccccgtttccgacgacaatgccggcgtcggggcgcacgacttcgaccgcctcgacgacgaccagctcatgtccatgttctccgacgacctgcagccgcctccaccgcagcaacagcctgccgcgcccgcggcgagcgcgtcgtcgccgtcggaccacaacagcatgaatgacgagaagcaagacaagggcgagacagatgaggcgcagagcgagtgcgacggcgccacgcccgggcagccggcctcccccgccaccgtcgatcccaagcgcgtcaagaggtactacaattccggcaatgcacagcttgcgaacgcagaattccccaattttccctcatcgttcttggcgatcccctcaaccgcaggatcttggcgaaccggcagtccgcgcagcggtcgcgcgtgcggaagctgcagtacatctcggagctggagcgcagcgtcacgtcgctccaggtgcgtgccgaattacgcatttcgtgcccgtaatttcgccgagcaccgcatgcgcgcgcgcgccgtgaatttgacctccaaccgtttgctctttttttctttctcccgagcagacggaggtgtcggcgttgtcaccgcgcgtcgcgttcctcgaccaccagcgctcgctgctgacgctgggcaacagccacctcaagcagcgcatcgccgccctcgcgcaggacaagatcttcaaagatggtgaccgccatttgccacctcaattatgctactatatatcgttctcacaatgtcgctgtccgaattcaattcggcgacagcacgcaaccaaaattccacagctaaactaacactcgttctgaattctctcttctctgctctgctcagctcatcaggaggcactgaagaaggagatagagaggctgcggcaaatctaccaccagcaaagcctcaagaacgcggaatcccaaccggcggacgcggccccggtccgcggccgcgacaatgccgacctgatcggcagcgagggggccgccgcggccgcgccatgcccgcactcgtgatcggccgagatccggacgctctctagacctctagcgaggtggcgccggcccgtcgcgacaaccacgagcgttgccgcgggggtgggccggcgccgtgttaggattggtgcattgttaatttgggttttgcattctttggggtgtaatgtaacatgatttgttcattcgggttgcttttgttcattcttgtgcatcctctgctgctgctgctgctgctgctgctgctcctgattcttctctacttccctgatttgtaattttattccggcattttgggcgaaggttgtagctaagaattgtaattcagattgggtgaggtcaagtgttttgtttggctggtttttttttctctttttcttttttgtatctgataaaatcaaatgtaatgttccttcatttttcctgtatgatccactgtatgtatttacagctatccatcagtctctctctctcttccctttaatccttctttcctctcgccaactttcgttattgccaactgttacgaagctcgcatgtaaagttcatctacacgttactgtagtatctaaccatttttttctctctctctcaattggactgtgggtgtgtgatgcatactttacaatcaagcagtacagggtaacaccggcgtcagtcacatgcatgcaattcgcaggtcgacaccaaacatgcaaccaaagcatcacattccttgctgtttcatcgcgagattttaaatggtgaacaaggagaggggtcaccgggagggaggtgccttgcttttgctgcaagggataggcatgttcgtctgcggcatgtgcatgtgcgtgctgcgcccgtatcggccggtacaagttaactctggcaaaaacgggttaggtttagcgtacgtgcctggtgttagtaccactacgactatacattatccttgggcttgggcattcgcatgagtaattataggttggttttggactctggcttcgctggttctcgtcgtcagcttgcccaagagggagaaacattttggagaaaccaccgggtcggattttttacagtttagtttttttttaaaaaaatattttacaaataaaactccaagaaaaacttgtttcagaaatagatctttttcttggcggtaatgatcatgacgtcgaggtccaacgtatttggcgccaacgacactagtgccgacatcctcgtccctctcagcggcggtggcaatgatactaacactgaggatctatttgtaagaaaaaaaattcaaaaaatccagaacctgggtggcgcagatgccccatcaatggatagtctgctcttgtttgtggtgtaaattttggccctagagaaaaaaaatgctgctacatggtagttacatcagtggcggagccagaaattatataatactagggaaattatataatactagggctaaggtagggctcgactaatggaggattagttttctgaaaaaattacatagtgaatcaacaaaatttaagcaagtttttggaggcaggcctagcttgagccctaggcctacctccgcccctgagttacatacgctggatctacctcccggcgaccccggacagctgcccggactcatcggcagataatccactaaaactccatgtaattaggaaaaagaatgaaatataatttctgtagtaaatactagctataatgtagtttgtctgggctctgtaatatttcctgataggctactgtatacaccttttgtactgaactactgaagggctctgaagtagcctggctgctctgtttcaaggctttccaggaaacaacaacccatggcgctgaagaaacactgctgcttgccgacctggaatgggagagcaggaatggtcttcgtcttattcatgttactctcggttgccggggggaggtgggcacatgcggctcgaactggaaacagcgcgcaacgaagtccgaagtcggcgatgcgtttggacatgtaggaatattcggctgtcgtacgcgactacccgttaatgcttactgtttcgataggaatcgagttgtttgatagtatgagatttctgtgaaagtctcacagattttttgcgtgtttcaaaattagttttgtttaagctaaaatgttatcaaaatgccctcaaacatgaatagggggaacattttggaacaccatggagtgcatgtttcgtccgaaaggtaagaaactggcccaagttatgacctaagtctattttacctccttcacgtctggcttctaattacattgcattctttaaccgcaaaactagatataacgcctatcccacgtttaaaaactagtgcaactgactcctctagtggtttggaaaatggtttctgctgatgtgacaggttgactatgggaggctgagaaagcagatgagataataaagaggctgacatgtggccccacttactaaagagtcaatcgcggataacgtgccatgttagcagacactgcttccaaaaccaccaaaagagccgattcacactcgttttttaagatggtggaaacatcatatccggttagacttattctaattccaacggagccatcgtttgagtttagcccccaaacaagctcgtgcacaagaatgcggcccaccttgtcaagcccataattgtctctatggctttgaagtctgacagatgtatgatatagacctttgcaagccaatagacttgttttaagagatcaaagcccatcgattagtggcattgtagcacactgcacagtgcacactatctgatgaagaaaaggaaaacgatttctatcttgcactgaccatctgaacgaactgacatccaagatccaacacatcaagcatcagatcagaacgcagaaaacgcagaaagatcggcgcgtactagcgtacgtactaacagtactagagtacaataggactcttgcacgggccgtacgtgcatgtgccaagacaaacctgaaattctgaatactgtacaattgtactccctgtttgcgtggaaggcaaagacaaaaaccaggacgtgggatcggctgatctggattactattgaaaaaaaatccaaaaaataccattgataaacgtcccaatcaaaaaataacatcaacgaacacaatttcttacaaatgtcgtcatacaaatgtcttatacaaatgtctttgttccagaaatactatctatgttaggtttccatttgcatccttccgttaagtggtataaaagatcattttacccctacgaattgttaaaagttgattaaaatttttgctcttttcgttcgcttacagtatatttgtagtttgctttttacactaaattattttaagttgactgaaagagtaaaagttttattcatcttttaactattcttaggggtaaaatgcctttttatatcatttaacggagggctactaacggaaacctaacgatgacatttctgaaacaaaggcacttgtacgatgacatttcctgaacaccaatgatattttttcaattggaatgcttgttgatgcaattcttagattttctcattactatttcgtgagcaatttctgtttactgctagctggaaaagttttttatccaaggtcacaaattaatacagacggtatacactccacagtactactacctccgtctctaaaacactatatttctaactatacacacggtaacttaattcggttgcccacacggcccgagagttataccctacgtgcaccgtcgatcttgtccttaatggcacatggccacatccatttgtcgtataactcaattctgtcacaaaaaaggccttttctagtatttaaattttatcttaaaaatacaatacaactactttttcatctactatctcatttcaaacgattacaatcatatctcatttaatttctgtacatagtactatgcatccctatttgacttcacttatctctttgatgtacatgacaaatttgagatgtgcttatattttaagacggagaagtaactttgtttttttaaaggaaacctaaccaccagaatagatgccaattatatttcactaaacaaaataaaaatccgaatgagttacataaaaaaaggacatcatctaaacaaaagccccaccaagcttctcaacaaacaaacaccactacgccactacggccggctgccactacactaggccctatttagtcgcgaaaagaaaatttttgggtgtcacatcgatgaccatatgtcggaaggggttttcggacgcgaatgaaaaaactaatttcataactcgcctggaaaccgcgagacgaatttattaagcctaattaattcgtcattagcacatatgggttactgtagcacttatggctaatcatggactaattaggctcaaaagattcgtctcgcgattttcatgcaaattgtgcaattagtttttatttttatatatatttaatgctctatgcatatgtccaaagattcgatgtgatgtttttgggaaaaactttttgggaactaaacaataaacaattggcctaaaggttcctcaaaatagcagccccacagggggacacgccatgaatcgaccatgcatagtcacattgctgctcaaatcctgccacttatctgcctaatctggtattgtggcctgccgtcaccgtcctagttggccgcttgggcttccggcgactagctcaagtggtagtaaagcggggaggagggagacatcagctgctagggtttggttgtctcctttgagtgacgcaagggaggggcaaggtctagtttgtaactttgttgtatcgtaggaaagaaaggaaagttgtttactttctttatacttgttggtaacccatacgtgggtgcacggcttgttactgatatttgaaaatactaaaggagattatcatgatttaataaatatgtacttggttaggaatgttagttgtagttttttcatgtttaataagtgaaatttggaattaataaaaactaacttatatttatatttagtttgaactctcaattctcacaaacatgcataggttttaatgtggtctacaatgttaaatgcgtaatcagggtaatgattaaatgatgcatagataggtgtgacttataaattgcagacaaattaccagcaaatgcactaaattaaagaggaggaacgagatcctctaccacaactccctattcagaaaaactagctggttagcccgcacaattgcgcggctagcacccaaacaaaatcatatattcttttaatatgattttacttaaaatttattaaatagctatctcattgccttcaaactttgaaagaccaaatcttatcatcctcgtgtttctaattatatagtttttaaaagtcacaccagttgctactccttatgtcatctccttttttatttgcttactcgatctattactatttctattcattcttcttggaaccttttaaaattggattttatagtttttagagtttattgtcacattgggtttcgtttttataatttctagatgtcccgtcgaacattgacattatactcctctacggcctgtcactgtctcttctatttattgtcattgagattttaaaaatcaaagataattatcatttgggttcatttttactttctaaaagtcctgccaaaccatcagcagctttgccattgtactcctctacggctcgcccactgcctcccttctttattgtcattgagattttaaaatcgaacatgattatcattgtttttttttactttttaaaacttctgaacctttaaaaataggacttgtagttttattttttataatttttagaagtcccatcaaacgatgccactatgcccctctacagcccgtctgctgcctactctttattgtcactgtgattctaaaaatcgaacataactatcgttggaattcattttttttttattttctagaagtcccatcaatcgtcggcggctctgcaactatactcttatacaccccgtccgctgcttctcctttttattgtcactgagattttaaaaatcgaatatgattatcaatgtgtttttttttactttctagaagtcccggcaaccgccttacttgtttgctttacggcatgtctgacgtccctccttttaattgtcatcaggattctatttggtttttttattaacaatttttatatatcgtatcaaccgccaccactttagtcctttataggcctgttacttaattttatctcatcatgtgttttagatggtattttctttcaatagtctttatttttatcacaaatttaattatttacaaattgtattcctaattgaaatcttatttttccttttctaatttcacaattttttttataaaaaaattagttaataccgtattgtgttcttttaatgtttttattttttttattttcaatttcaattgtttcaaaattgtatttctacttgaactctcttttaatttttctaattttggttattattttatttttatttgaaattttaattaatcttgtattgggttcttatatggattcttcttttaatattacttatttttaattctgaatttcagctaattttcaattgtattcctacttgaactcttcttttattttcttttttctaatttcggatttttttttatttttattctgaattttaattaatctcgtattgggttcttatatggattcttcttttaatatttcttatttttaattccgaatttcagctatttttaaattgtattcctacttagactctcctttcctttttctaattttagattttattttatttttatttcgaattttgattaaactcctattgggttgttatatggaaacttctttcaatgttacttatttttaatttcgaatttcagctatttttaaatcgtatttctacttgtactcttctttttctccgattaatgtgggaatttctagcccccacagcgaacgtggtgcctcctttcaaagctgttttagtaatataactagttagatggcccgcgcaattgcgcggctagcacatatacaaaattatctatttttaatgtgattatacttaaaatttatcaaatacctatccctttgtcttagggctttgaaagaccgaaccttatcatttgtgggtttctaattttataaaatttttaaaagtcacaccagtccactacctcatagtccttttgtcaccctttatttatttactcgatcttccatgacttctattcattcttcttgaaacctttaaaaattggatcgtatatttttagagagtttattctcattgaattttatttttttataattttagaagtgccgtcaaacattaccactgtactcctctacggcccgcccgctgcctcccctctttattgtcagtgggatattaaaagtctaacatatttatcattggggttttatttcttactttcaagaagtcctgtcaactgtttgcggctttgctatactacttctctatagcccgctcgctacttcgcttcttgtttttattgaaattttaaaaatcgtgcataattgttattggggtttattttttttactcttcagagtggcttctccgtatctctcttattagtcatcatttatattttatttggggttttgtttatagttttatatgctcggttgccaccagcctactcctttactggcatggtacttctctctttattgtcatttgtcatcattgtgttatagatggacttttttttttgaaaattccgtatttttcattccgatgttttgttatttataaattatattcctaagttaaactctcataattattgtttttattttctaaatttattttattttttattctgaaatttttgttatttataaattatattcctagttaaactctcataattattgtttttattttcgaaatttattttattttttattctgaattttagttatttataaattatattcctacttgaagtattaattttcttttttttttctaatatcacaatttttttttattttgaatattagttaatgtcgtatagacagtacagtaagttgcaaagctccaaatttgatttcttttttcagtccaaatccatgttagtatcatagtatggaagcctatgtccgattggttttttttaaatctagaatccttatcgtattcaactggagttctattgatttatcaaccatactatcaatacatattaactcgatcgttacagtttagatctagtatgatctaatggttaatattttttcttcattaacatggtaatttttaaccttcggagcaaatgtgttggattttttttaagatgccttaatgatataacagatactctctccgaaaaaaaactaatcctggttttaaacctggacatatgggtttttgctggacgaagggagtagatagagagatttttagtggatggattttgatctagttacgcagcttaggacagtcagattgagcgtcaacgacttatgcttggccgataggcacaatgagcacacttatatctggtaaactgagatccaattttttatggtggtacactgtattgaggacaggctacttggatccagctcattcacgtcttgtatttctcatcttttagtaaaggacgcatactgtatccggtgaattgatctctaattttttaagttccttcagcattgcagagcatctagatgtaacctttttcaagaatgcatgttcttttgctggagattctgtacttatgtgattgcttttgttattggttggtatttattgggacttgattgaaagccatagttggaatcggacaccaatttatacctggacatatttattttgcttagaaggtgacatgacatactttacctcaggtacacgtatttgttccaattctaaataaagaacgcaaaatcaaaacttatatgcatattccctataagtctacatatcccgttagatttaatatacaactctaaaattttatttctataagaaccattaagtatattttgatttatatacaattcttagtttctatttttataagatccagattttatatacaactcccaacttctatttttatagatataattgtatttcatatacaactgtataaatcaatatataccgttataatccggacccaccatgatcaaacggttaagattttttttctttttctctttttttctccgattaatgtgggaatttctagcctccacaacgaacgttgtgccttcttttaaggctgttttaataatataatagatagattggcggctcgtcgattcgttttttttttataaaaaattttcctctaccacagcaactgctaagtcggcagaggtaaacagcgacgggttacattgaattgctacaatgagacgccatgcaatttccttgccacagtaatgcctctacaatgagctatagactatacagtgcctgcgtgtaatgctgcagacgatcccagtagtcctctaatccatcttggctacgggcaattatattcacgacggctttcttatctaacactgactggcgaacgaacaatgtgcgcacaacgtttggatcggcatgatgaacagaatattcacgcgtcacgcatggatgcatgcaaacaatgaaacaatcctcaccaagggaccccgacccatctgctgcgcctgggcacatctcacgtgcggagctgcagtctcctcacgggtactgtcagtgatcggccatcacgcagaccccggatctcacgcacgttaagttcatgatgcaaattgcacaaattggtactaaaacttctagctaaaccacggcggtttaggtgttaattatgtgtgctgctaactaattatcaataagctgactgcataactggacggaaagcccagtgaacaaacaacaaagctctgaatcgccatatgtggcgccatgtcatgttgtggtcacatgatcggggacaaaatgtgtctagaattggcatctagtagctgctgcctgaaatgatgaatcactatccgagcaagtcgattatgactgcgcgcgtggtttgcatgggtaaaattagcagggccatatgatgtttcaccttttaattacggatttgctaaatattatccgatatgaagttgagataaatataggacatgcggctagtagggcggaaagaagcgggtttgctgtgaatatcagatgggtgagttgatattggactattgaatattgatccgatggataaaaaattgactgagatgggaatgtgttttcttgctattggtgcacatgcagtccctttttatttattcaacatacatattgattacttttaaactgttaataatacagatataaaaaaaattagcagcagcaatttgattggttgtttactttcttcattcattttactacagcttatcgactaccatggtcattgctttattttaatttttcagaaacgtttcgtgttcaaatgaaactagcaacgtataatagtatagtaccagttggcaagtactgtaccaagtagctatagtaactactattagcgagatgcacaattttctggcagctgacagctaaaccaaagcacaatggagttcaagggaaagctacctgcgtcagcgattgcgtttgtatgcatactcctacgtccaaacacgcaacataacctgcaaaaacaagcatgagagtcggtacacctcccacgttttagcatgttctgaatgcagcttaccctagtaggtttcaacatatatacttcctccgtttgatattataagtcgttttaatttttttaacttattttttaaaagtttaatcaagtttataaacatttccaatcaaaccaacatattattagaatatattcaatgttagatttaattaaactaacttgatattttggatgctgttaaattttcttataagtttaatcaaattaaaaaggtgatactatgaaaaaaaatcaaagtgacttattataatatgaaacgggggagtaaataaaaccggcactaggaacaaattaactaggcatgacagaaaatccaagcaaggaaggaatagttcggtagtagtagtacgctagtttgctcggtcgcgaaaataaattacgcgtagatcgttgaggaggaaaggaatggcgaatcgacgacaagggagaattgggcaagtcaacttctgcatggaatgtgccaatctggcttggctttgccgtgcaagatcccgctcgtgttagggggtgtttgggagagaggggctaaactctctctcaaacatcccctctctcaaaagcataagtcatagcctctctcttctaaacacccctttaattattttttcgggtgtctggaccaatcggcgaacaggcgcttctccgattgggcatttgccgcattggagagcgctcgaccttgagcagagcagagcagcactgtgcctcggtggctcggtacgttggtgcgtgtgatcggtaagccgcgcgtgcagagtgcagacaggcgtggccgcgtggcgtcgccgacggccggtgtttcttttcccagccgccccggcactgacgccaagccgaagccggggccggccggcgcgccccaggtttccgctgcgtcacttcatcagtagttcagaactgtattagttaaccaggtttatttatggccgggagttgctgcgagatggaatcccaaacagatccggatcagtgcaaggcaataatcaatctacctcaattgtcttttgcagtcgcattcatagattagaaaatgcggcgtattcgctgtagaactctgacatcacctgtggctgaggatataacacgacattacgcgcgaatataatcaatgatgatatctatagctagtaaatcattatgcctaaacaataactatcaccaaatctgcaattttattcttgcattatctgaaaagttaatccgacgttgcattatctagtattaggtctccaatctcgtggaaatcttgatccgtgtcttctcattttcgtaattattttgtattgtttttctttctttgaagcattcaacaatatgattgaaccatgtcatggggatctggaggattgaacacgcaatgatattctactcctggattttctttgtgattttagaattccactttagaaacaactggaaaagaagccctaacttgttgatctgtccaattccaccacagtcttctcaaaggctcgtgacaacaaggagtacttcgttatggtcaaatctttattagttttctgttcctttgttgttgcttgttagggacagtgaggcgctccattaatttggttatgcttccattcgtgcaaaggtgctttgagaagatttaagtggcacccacttagcagggtaatgaaaattcacatcgaagattaaacttaagagtttcgatataaatttcataatattccgacatagtaatagtcacttcaaaacctacccctatcccaaaacataagtttttttaatcgctactgaacacacccaagatactaattgtaacgtcccgcctctcccaagccgggcccgcttacatctgacagctttcataggccacagactaccctcacaaagcaacacaagtgtcgttgctgcttgcagccattccgaaccagcgacagtaatcgctactgaatacacccaagataagatactaatagtaacgtcccgcctctcccaggccgggcccgcttgcaaccattccgaacctccgaaccagcgatagtaatcgctactgaacacacccaagatactccctccgtttcgaaatgtttgacaccggtgaatttttagcacatgtttgaccattcgtcttattcaaaaacttttgtgaaatatgttaaattatatgcctacgtaaaaatatatttatcaatgaatcaaatgataggaaaagaattaataattacttaaattttttgaataagacgaacggtcaaacatgtactaaaaagtcaacggcgtcaaacatttcgaaacagagggagtactaaattttaacgtcccgcctctcctaggccgggcctgctcagaacctctgaaccagcgacagtaatcgctactgaacacacccaagatactaaattgtaacgtcccgactctcccaggcctaaccagcgacagtaatcgcaaaccaacacaagtcttttctgcacactttgtcctcacttgtgcgcactcgggaacaatgtcaccggtcgggaaattgttcccaaattgtaacgtcccgactctcccaagcctgaccagcgacagtaatcgcaaaccaacacaagtcttttctgcacactttgtcctcactcatgcgcactcgggaaattgttcccgagtgccaggccttccgaaaattgtaacgtcccgactctcccagacccgaccagcgacagtaatcgcaaaccaacacaagtcttttctgcacactttgtcctcactcgtgcgcactcgggaacaatgtcaccgatcgggaaattgttcccaaattgtaacgtcccgactctcccaggcctgaccagcgacagtaatcgcaaaccaacacaagtcttttctgcacactttgtcctcactcgtgcgcactcgggaaattgttcccgagtgccaggccttccgaaccagcgacagtaatcgctactgaacacacccaagtcttttctgcacactttgtcctcactcgtgtgcactcgggaaatccaggccttacgaaccaacgacagtaatcgctactgaacacacccaagtcttttctgcacactttgtcctcactcgtgcgcactcgggaaatccaggccttacgaaccagcgacagtaatcgctactgaacacatccaagtcttttctacacactttgtcctcacttgtgcgcactcgggaacaatttcccgatcggtcacctatcccgaaattactccacgccgcactcgggaacaatttcccgatcggtcacctatgcacgcttaacctcagagttctttctagatcagcttccggaaaaaaagttgcaacttattgatatgagtattctattaatactattaagccttagtccggcatgtcacattaatactctatacagtaatattatttgtgcccaatgaataaagattaaagagtgagcaccacgtgagccacgcgaaacggcccaaaccagcggctcacacacaccttatccatgcaccgttttccgatgtgatgtacctttaaccgagaaagcacgacctcatcagaaatcctaatcagttaaaaataaagctgaaatttaaattttcaaacttaattttaagattaattttaagataattttgatgtagtttctttttagtattagctttgaagtcataaaaatacatatataaaatttttacctataaattcatttttatatgagcaaacgatggcactctacactgtataccattgtttcatatcagcacttcacaaaacttcgtggtactctccccgtccaacagtatatgcccatttttagaaattaagaaattaacgaaaggacaagtcatgcaaaaaaaaaagaaaaacaaactactagtaagaaagttggtatgagaaaaataaactaataaacgttggtaggtgagacaaaataatactataaaagtcaataagtatggaataaagtactgtatcagaattttaaaatatcttatattttaagataaattaaaaagtaaaatcccttatattaagagagagtatatacatatttctttttctccttcaaggaaggaaaataacacatcattgaacgacagaatgagtaaccaaaaccatttttgaaggcactcctggtaaaacataggacaaaaaattgtaatactagtatagtacaaagagcatgaacggatatgaacaaaaaagtttcagaactggttgtccctttcttctgacctgactttgccacaatccggcgaagccgccatcagaagttagtagaacattcgacaagttacgactagtttcactttgatccgtataagaactcaaggggatttcaactccatccgttatggtcaatcaagaacatcttctagatcgaagtcaatagtccaacagaggcatctctgtcggaagaccccagatcaaagtttgccatctggccaactaatcctccagcgacggttaactgttatccctgctccaccatgtctgaccaaactttattctcccttcctctactctatatcgagattcatttagaatgtttctcattttagtataatgttgatttattttagaacggagagagtactctctctcgagattcatttagaatgtttctcattttagtataatgttggtttattttagaacggagagagtactctctccaaaagtgcaggagcagcacgtaacgtacccataccattctagtcgtgtattgatgattgattgcttgcttgctgtgagtatttttgtcacgaggatcaggtgaaacaattaaaaacacaacggccaaaaagacaatggccaccatgtgttatacacagtacacattcgcacttgcaaatcatggaacatgattagttacaggacgatccagtagttatagtactacggagtagtatcaacaatcaagcaagtagtttgtgaattgtgaccatcaaacagattcgtgtagtacaggttgaaatgaactgctcgccggcgtcgcagcggagtagtgcgggtcgtcgctactcacgagcgtgtgccacttccccgtcgttgtcgccacctacttctacctgcgcggattcccgtcccgaagtgacaatttccccgtgaaatccccccctatccacaagggtaaggcccgtgcagccgccgccaccgcctcctcgcacctcgtttcttccaccaccctcgcgcggcggcggccgtctgccgtctgccaatccgcccgcccagaaaagccgcctcgttccgttgtctcagcgcgtttgaccagcgatctactatccccccttccccctcctcctcccacgcctcacacactgacacacatatgggcataaatatgcctccgttgggagagatgccaacacgacacaccagctagtagtgtgcgggtttgggagaggtgcgtgtgcgccctgagctgctgctgccgcccggccgccacccgtgacccgcgccatggcggcggtggtggacttcctggacctgcgggcggcggcgccgttcgtggtggccgcgctggcgttctacttcctggtcgagcagctgtcctaccaccgcaagaagggcccgctgcctggcccgccgctcgtcgtgccgttcgtcggcagcgtcgcgcatatgatccgcgacccgaccgggttctgggacgcgcaggcggcgcgcgccaggaagtccggcgcggggctcgccgccgacttcctgatcggccggttcgtcgttttcatccgcgactccgagctgtcccaccgggtcttcgccaacgttcgccccgacgcgttccacctcatcggccacccgttcggcaagaagctcttcggcgaccacaacctcatctacatgttcggcgaggaccacaaggacctccgccgccggatcgcgcccaacttcacgccgcgcgcgctctccacctacgccgccatccagcagcgcgtcatcctctcccacctccggcggtggctcgaccggagcgccgccaacggcggcaaggccgagccgattcgggtgccctgccgcgacatgaatctcgagacctcgcagacggtgttcgcggggccgtacctcaccaaggaggcgagggagaagttcgagagggactacaatttcttcaatgtcggcctcatggccctccccgttgacctgccggggttcgcattccggagcgcgaggctgggcgtggcgcggctggtgcgcacgctcggcgagtgcgcgcgggcgagcaaggcgcggatgcgcgccggcggcgaaccagagtgcctcgtcgacttctggatgcaggagacggtgcgggagatcgacgaggccaaggcagcggggaagccgcctccggcgcacaccgacgacgaggagctcgggggcttcctgttcgacttcctcttcgcggcgcaggacgcgtccacctcctccctctgctgggccgtgtccgcgctggactcccacccggacgtgctcgcaggcgtgcgcgccgaggtggcctccctctggtccccggagtccggcgagcccatcaccgccgagaagatcgcggagatgaagtacactcaggccgtagctcgcgaggtggtccggcaccggccaccggcgacgctggtgccgcacatcgccggcgaggagttccagctgacggagtggtacacgatccccaagggcaccatcgtgttcccgtcggtgtacgagtcgtcgttccaggggttccccgagccggacacgttcgacccggagcgcttcttctcggaggcacggagggaggacgtggtgtacaagcgcaacttcctcgcgttcggcgccgggccgcaccagtgcgtcgggcagcggtacgcgctcaaccacctcgtcctattcatggcgctcttcgtctccgtcgtggacttccggcgagaccggacggagggctgcgacgagccggtgtacatgccgaccatcgtgccgagggacagctgcaccgtgtacctcaagcagcgatgcgccaagttcccatctttctgagctggtttcccttgtcctcttgctctgctcctcttcccgtgcatcgcataatttttcttcttctccatttttcttttcaatctggtggatcgtgtcgcagctgtgatgcattgttgatttgtaggttttgatgtttggtccattcaattatttttgttggtaattgggttcagttggggtttggactcagctttgggtcccagccggctaggggatgatacgaacactacatctggggttgttggccacatgtgtgggtcttctggtttggttggttggcatgtctcaggaaattggtggtatttggaatggatttgctcgattgttttggcaactaaaatgtgagcagttgcacgctacttctgttcatttatgaatgtaaggcgctcgatttggattgagtgagcgttggctcgtgccagcgcagctgccaatgcgtatattcaccttctttttgtttctacgaaaaccgtcggcgaggcctctttttttttttttccagttattacatagtttatgcctaaatttagtttttattggactaagtccaaattcaaatatagatgttggttttcatgagacgaagagagtagctactactacactttgcctactagtagctagttaacggaagaagaagaggagagatttttctcctttagaaaggaagcttttttcttttcatttgagtaaaattccttttattcttctatttctatccggttagtattcatcatttccgcacaactgtttcataacaggacaacagactcatgcatactgtctggctttgaaagcgatagcctatccaaaatacgatggaaggagtactattgatggtagtataattaaattctaaccatagattttcttgggtatttaaatactttatgtaaaactttgctagggtaattttatgttaatataacataaaaatctaaaaagattgtagcaatattgccttttatttcaattttagcccttcaaaacttatactacctatattggtaggtttaatataatagaatcactttcattggataaaaacagggattgggaaccaacaaatatagatggccaaatgggccgtccggcatggcacggcccgacctacggcccaatacgactcgggtccgcctgaaggcacgatagtccatcgtgcttctccacagaataagtctatttttcatccctcaactctgtgggttgtgtccatatggttggaaaataagtctattttgtgttcctcttctcattaggccttgccttatatggttatttaagtctattttgcatccctatactatttttcttcaatcgtgccatgccgggccggcccaccgtaccgagggtgcagccctgtcacgacctggccgtcgggctgaggcggcacgggcacgaccctagtcgggccgtgccgtgcttgcgccggccgggccgcggacctcgggtgccaacagagtttataacccccctcccccccccaaacaacgcctcccccctcgcaagtaaaataaggttgtgtttcggaggagggattgggaacccttcttcctggcacgtaaagcagagttgaattaacatatgattaattaagtattagttaaaaaaacttgttcaatatgatattttaaagcaattttattgtagattatttttagaaagacacacatgttagcaatttaggaaacgtgcgcgtgaaaaacgagaggatagaagttacgaacaaactaaggtgtgcttgatatggtgttaagcatctatttgtactagatgatgccccgcgctttgctgcgggatatatgttagataatagagaaatgatgaaatgatttagattgaaatgttatgaaatgatttaacaatgatgatttagcatgtgcatgtttagttttagaatgaaataaattgtggatataattactatatggttgcatgttgagctttgtgtgtttaatgggttgatgtggtatgtttgcatgtaggttttaggatgctaataaatattatgcttatatgttgacctttatgtgtttagtgcgcattaactttatagaaagaagatattactagatgatatgtctgtgcgtttccatgggatcgaaaaaaaaatctttattgtctattatatacctacaattgtcttattactaagctattttttgccattagttttgatgcctgctgagctagcaagaggcacatattatccgcatcattaaggccctgtttctttcagcttgtgattattataatccagattattgggagtaagctgaaagaaacagataacttattgaagtagcttattataatctggaggccagcttattataatctgataagctcatttaggtgagctttttccagattattggatgaaaaattacccaccatgccacccactccctttttagacttgcaaatctaggaaagaaagaactaaccacttattatactacatattataacaatctagcttatagtaatctgacttaaataatctagattataataatctcaagctgaaaaaaacatggcctaagctagcccacacaaccgatgttgattttccatctgattaaccatctccttttgtgttgtatttttatataatagaatagaaaaccatcccgcctttgctcaagcgagctacaaccaattattacaccaaatcactcagaatgagtgcaactcaaagaaacttaaaaatcaaaattcttccaaacatgaagcgaacacaaactcataaacgccaacacaagataaacaatatacaattaatgaataccatttgtgaatctccatccaaaattgacaaaaaaactgcataactgtcgtctcaagattatgatatgcagacttcacaagcttgtagttttcatcacacttttgtagttgtgcccaggaccggaaccaatatattgctgaaaagaacctgcatatagaaaatatatggtgatttatcaaaaacaatatcatttctatttaaccatagagccctatatatagcagatgctcctataaaaataagtttgctgattttttctatcaatccccacaagctaattttgaaagatatgagatataataagtggaaggtataaaccagaagaaaactgaatagctctctaaagaaattttgtaaagtggcacttcttaaaaagacgttgaatagtctcaatttttctatctcctccattctcaatcgccgtcagcaccagcagctgacctcctcaagcaccgccagcctcttgcccttcttcagtcttggtccagctctctcctctagcacgatatacccatgtccccttcctcgtcctagttggcaagcagaaaccatgcaacgtgaacctccgacgcacgaagcgacctcaccaccttggcacaagtggggtttggaggttggtgcaatgcggcggcagttcgtgcttggagaatgtcgctggtgaggggcttggcttcttgttggaccggaggaggcgaatagctggggcattgtcggccgtgggccgtgccagcccgtgtgatgactgaagaaggcgctggcgaggggattggctacgtattggtgtcacgtatccgaggaggatttggatcgtctgccttcaccctgtgaaggcacggtcgtgcagtcatcgcttattcaccgtccatacaattcaacggctcacgtgtcacgcgcacttaactgctgttgcaatcagtccatggcagcccgacaagacacactgatgagttaatccgatgaggcccctcgtcgctgctgccaccgccgccgccgtcgatgccaacgatggcagtgactagctagctcggagctcgtctgcttgtacgcacacgccgtcaccagccatcgtttgggcccaactttttttttgttcctcatttttcggggccaaagtaccaaatttgctaagtttatttctttgttcaactgttgatggtactgaagacatattttagctatggagattgtagtttctagtgcgttgcttttgttcttgttaatcctttttgatttacgatctctattctctatctcttttgatttacgatgtggcttactctctattgtagttagtaatgaatgatgttgtttgaaacttatgaattgtctgatggaatgcatactttacttgctaaatagttgaatcgaatgcatgctttgctctgctctgctcattgtaataatgttccaaaatccaaattccgggcagcaagcatgctgcatcactgccgattgatacatccagtcctagcaggaagatggaatggcaaagcttccatatgaagcccaagacggcggcggtggcagcgcgtggcgaaagacgagctccagctattcgccggcggcagcgatggcggcactacaagtctaccaaactgactctgaagtctggagaacgtgcctcttgttgagctgacataggtctctatgcccgggagccgttggattgcatggacggtggataagtgatgactgcacgcccgtgcctccacaggatgaagtcagacgatccaaatccattcgaggaagatggttttggcgtgcaaagagcgaaatcgctaaaaagcaatcagtcgcgcggctcccctcctgcgcggcgcggccacgtggcacgcgcggagagggggccgcggtggaacggcgcgggagcgccatgtgcgcacgtttctcttttttttctttttttttctttcggtttttctttttgttttttctggtttttttttctctgatttggcgtttctcttttttctttcggtttttctttttgattttggctggtttttttctggtttatttcagttttaaactcatacatatataaattttgtattcgtatgtatataaagtttatatacgtacaactttgtatacgtacaaatacaaagtttgtatacgtggcttttttttgtttttttcttggttttcagtttttaaaatatgtatgtatttacgtatataaagtttgtatacgcgtatacaaagtttgtatatgtggttttttttgtttgttcttcgttttcggtttttaaatatgtatgtatttatgtatacaaagtttttatacgcatatataaagtttgtatacaacagtgtagtagtagtactagtagtatagtagtagtaacagtgtagtagtactatcagtagtagtatatgagtagaagtagtaggtgtactaatacgagtatacatcggactgaccgtgcgggcggccgtccgttagtagtcccctgcaaagagggctaagagcatctccagtagagacctcaaatccaacctctaatcaaattttgagagttaagataaaaaaaaaactagatccagcaggaaccctactactagagccctaaagtgaggaggccctcaaatcctccccccaaggccccagtcctggggactccgagcacagcccccatcgtccttttttttggcgcggaacaattttgcttcgcgcgttttattgttactcccgcgcggctgcgacgagggatcttctccagcgaccaccgacgaactcccagcacctccgccaaaactgccccaaaaggtaagacttttccataactttgttgcctgtcgtccacaatgccgtcggcggctgtccatgcgcatgcccggtcgccgacctcccgccatccgccggccgtcgcgtgctctccgagaccacccgcgcgcacgtcgcccacctgcacggcgtctgcccccatgctggcctctgcccgctcgtatttccagttttcactggccggagcctgtacgccgccgctgccccattgatttttctggaaaaaaaacttgaagtaggtcatgtggtgcggtggttgagtagtacagtagcagtcaattttctgaataactcgttcttgactacaattggacatgcatgtggtgctagatggttctcgtctggtggagactgatttgtttttaatttttttttgagaattgcagtggactgtcagccaggagaatctaattttatcaactagtagatatcactgtacttatagtagcactgcattgtgtagcactgtacaattgttgcaatggatcgattagaaccatatacatatatgtaacgctccgcttttcgtgaggcgttaaaaaactaattcggtaaaatcctaatttcgaaaattttcgttctttgtgtgcgagtctaagtcgtgccaagatctcatttcaaatcccgttgatccctctcatcgaaatcaaaatcctccacctcaaatttctcttccgattcgagtctctgaaatcaagttctgaaattcaaatccttcctctaaatcctcgccaaatacttctacgaatccagaactattcagatcccgcctcgaatcctttccttgactccaccctatgttcccgaaaacaaatacccaagtattccttttgaatcctttccatgacttctccttgaatcccccttgatacatccctaaaccctcgagttcgaatatcaaatttgaatttgagtccaaaccctaaaatctctccaattctatccaaatcagttttctctgtaaaagtctactttacctccctgtatttttggatggaccgatttccctcccccggctcatctcccctcccagcccatcatcttaccccccctcgcacgtgcgttgcacgcatgcgagccgagagagagctctctcgctctctcgattctttctctctcccgtcttcgctctctctctgctctatcccctcccggcgccgattcccgccgtcgccgcccaaaacccgccaccgccttcgctctttcccgcgctcgcccgcgcgtggcagaccgcccggtcgccgccgcatcagccctggccgcctgcgccgcacagccgcccatgccgccctgccgctcgcccccaccctgtgcgcgcgtgcgtccaagacgtggaggcagcgcgtctctctgcctcacgcgctctcctctccctctcccacctcctttttcccaaaccggcatggtaaagccccccctttccaccgtcctcccttctctttttccctcccaagcaacgacgccatgcctccactccttggccgctagcgctcggaggcagagacgcagacgccagcgccggctcgccacccccaccttgaccgcgccagcccgcgctaatcctcccgctcccgcggttcgattttccgacgctcgatccaccgccttcgccgcccaacgcatccacaccgtcgccgccttcgcactgcccacgaaaccgccgctgccgcccgtgaacaccagcagagctccctgttcccccacctttttccttttgcccgacaccgccggcgtcatcacctgtcgccgccttggctgcacgcgtcgatgaccgccagctcgctctccttgaccgccaatgtcggttccccctcccaaaccgcctcttttccatctataaagcccgggccgagcctccctatcttattctctctcggcatctctcttccaccgccatcgtgcctttgttgccgccttgcagctgccgacctcgcctcccttcgctgtcgcgcgtgctggtgaagccggcgtgtgcgcgaggagccgaagaggactccggccacccttcttcttccccttccccggcccaaggccggagagctcgccccgcgccgtcgactgcccatcactgcccgcccggctcggtagtgcctcctcccgttccccttcctcgctctccctcgtccccgctagcttgcgtggtagctcggtagccctgccgaacgcgcgtagacgccgccccaaggaccgccgccacccggcgtggccccaccgccattgccgcccacccccggaggccgcctctcgtcgccggacctccacggcgccgctcagacccatccgaccccggaaatgagttccttgaacaccggagatgcttccgccgcctttaattgagtcctcgtcgcccctcagtgatttcccctttctctcgccgccggccgccactgtcgaattccaccgccgtcgaactccctccggcgaatccgagccgttggctcgctccttctcgacgccctcgtcactccggtgtgctccccgaagaccaaatccgtcgcgcttgctccggtgaacacggccgccgtccgccgtccatctcggcctccccttcttcctcctcccgccggcccgcgtggctgccacgtaggcgccacgtcggcgccacctcggctttgaccgggccaagccggtcagccgtcccctccctccgtcttccctcccgtgcgcgcagtccacggaaagccgtgcggctgcatgtgggcccgccgccatccgtccaaccggtgcaccgctcctaagccatgcgcacccgaaacccgtgcgccgcacctcgcgtgcgcccatcccaccgtgggccgtgccaccgacaagcgggccccacccgggaccccgcgcggtggaatcggtccaccgggccgtctctctctcccccgcgccccctctgttgggccgcctcctcgcgcccgcgcccggcccaatggctcggccgcgccgtgcttatcccttgggccatacccgagcctcccaaagaagtctaaattacatccctccacccttttctttttcagggatttaataaatccttttttttttccttcctttgtcccataaatcaattccttattcccaaaattccacaaaccatttcctttggtcccgcgtgacagtgactatcaataatatttttgagaatattatttctataaattccataaaccatttctcctattccagaaactccaattaaacttccaaaattcatatcacccaattcgcaactccgattgactccgttcaacttccaatattcccataaaattgagatctatttaatggcactactaattagtctaaataggatctttcttttggtcttttgtttaggttttcagttgtttgcgtatagttgcggttatcggattttcgtcgatcgcgtgttttctcgaagattcgtgaagcttcgtgaagaccttgagcaaggcaagtcaccctttgatcaattgcccctataattgaaaagtcattattattttgtttgcaacttgcattattagaatcacacacttaacttgcttggcctcggtttgcgtgccaaaccgacggacctacccagtagtcgcactaatttccgtaggttgtactaccctgtttccttgtcgctccacccttgtggtacctcggtattcgtgctctctgagcgcgtataccaaatatcccacatacaccgttgtttgtcgaaaacttgggaaatgggtttgtgaagccttcaaaacccgacatgtggtgtcggtgtgtttgaaaataaaaatgaattgtgaaaactcgcgatgcgggggttgtgcctatgtggcactgtcccgtattcgcatataaggaccgattcctgtgggaaactcatcgaacataatcaaagtgcaaccacaaggtggaatgggacaccctggctaagtaactagtcggttcagggaaacctcgcatgccaatagttgggaacaccggggcggggtcggttggagccaaaccgggttcctggtaatgcaagaacgagaagcttgctgaattaccgatcgaggtggttggagtttgatttgtgaacgcctaaaatggcctatgattatgtgaggatttgatccttctatgtggcatgaggtatccctgggtcggcttgggaaaggctttgtcgcgaacctctgacaccggccagtgtctggagtaagttcgtgtcttgtgggtaaagtgtacccctctacagaggttaactaactgttcgaacaaccgtgcccacggtcatgggcggatgtgaggtggttcccgttgcgtagatttgtttgcctgtgctttgtgaaaagttgttgtggtgtgggaatcgtaaccagaatcagcctatgtggcagatggatgacctgagtggtcagaaacgaatctgtgtgattcgggatgtctgtgggcatcatagactaggcttcccgagtggaagcggattgttgtgctgctgggcagctggactctgggagtccgagaaaatgaaaaaggctctgggagccgattaatcaagtggaatggctctgggagccgagaagtaatgatctgacccgggaggtcggtacattaccaattgagttgttgaaaagcatctcttaaagtcgaattgagatgcaagtctctcttcggcccaaacttagaaagaaataaatcacttagtgatttcaaaatgccttcaaataaaagatttgtaaaacaaccttgcctctcctccaagcttgcatcaaacacctaagttcccgtgacttgctgagtacgaaagtactcacccttgctctatataaatatatatatatagttcctccgccctgaagagaagataaagtgaagagaagattagggtttcgtcctggttcccagccgtcgcctgtggtgttgggtgttagttcgttggttccgctgctgctgctgttgttggtgtttcctcatccgtgtcgtcggttgcattctcgggttgttctgagctgcaacctaagttaaggtaaataagtcctctatttattttaaggattgctatgattcatatttgtcaccgtgggaactagcactatgtcctgggactggtaccgagatcgcggtttcgtaggaaacggttcacgccgttttccctacgacacgctcctgtcaggtgccgttgtacggcggtatcagattggggtgtgacaatatatatgcaggagtatgtggtattgtactagtacgatatcactgcttttcatagattgagtgttgcatagtgtatatgggtatactctgttggatacgtgtgcatatgctctaaattttcttattaattttatgatcctgtgatggcagtgttttttacatggacttctacgacgacgacgacgacgacaatctcattaccgaatggtgggatcaagaggagttatctgacgatgatgactactacattgtagctgctcttcttacggacatagagcataagaggaccaaaagaaagcgtcgtggttcagtcccagctcgtgagataattcatagggacaggtttgctggcaatttgcgcatagtggctgattattttgcagatcctcctgtatataatgcaaaattatttaggaggaggttcagaatgtcaagggagctcttcttgcgcatcgtggctagtgtggaggctcacgatgactacttcaggcagagaccgaatgcaatgggtcttctcggtgctactgcactacagaaggtgtatggtgcaattcgcatgcttgcatatgatattccagccgatagtcttgatgaagtcgtgaggatttcagagagcaccatgatagaagcttttaagcactttgtcaaggctgtggtagatgtgttttctgatcagtaattgagggcaccaactgctgaggacactgtgaagcatctaggcccccggtgttaattttggtaattaatgacaagcactaattgtggactaaccgttgtctttgagttatacatttttaagttaggtccacgtcatatgtgcgcatagatgattatcgatggattaaaattgacggtgcaaagcaaagggaaagaagacggtaaaactagcgctttaatttagaattgatcgaggtgtagggcgatcaaatttgctagtttaattttagtttcgccgtactattaagaggggtaatgacctagcaaagagatgattttaatttccacattaggtcattgcattttcatttgtgctctctttttcatttcacacacattcactaattcactgggttcggcctgaccagggacggtcagactggccacatagtggcggtctgaccggcgtgccctggccggttagaccagctacatagtggcggtctgaccggcggcactttcccggtcagaccggccccctggaggccgagatgatgctgctcgggatggccgatacggagccgacggagccgtagtcggtcagaccgagctgatggtggtctgaccgagccgaggccggtctgaccggccgccccatgccggtctgaccggctaggccgatggggccctctgacagggctacaacggctagttttctagccgttgcagagtagcacggtctgaccggccacatacctccggtcataccggtagagcacaaagttgggggatttcgcccccaacggctagttttggtgggtgggagtataaatactcccccaccagcagcaagggggctctcttggcacccaattcaattgcatacactccttgcacctctctcacactcacttgagctttgtgttcatccatctagtgtgttagagggttgtttagccaagagtcaagtgcatttgcttccattgtagatctagtgtggcacttgatcatctccacaccgggtcattgcttgttactcttggaggttgccgcctcctagacggcttgtggaggagttgcccggtgacctctccgagaagattgtggaggaggcccggcgccggtttgtgagtggtttggagttcaccaccttcggagtgaaggaagaactatcccgagtgatcgaggcttgggtagtcctctccgtgggccggctcccgccttgcccaccccttgacgaagggggcgtgcggtggcttcgtggttgagcggtggagttgggcttgcctcaacggggagtaggaaaccggcgagttctcgaacctcggtgaaaaatctcttgtctcattgtctcatttgattgtcgcatttacatttgtgcaatttacatttctagagacacacttgagatcatatcaccctaggattgcaaaacattgacataggagcgtgatttactttcctagatatataattgagccactatcaccctaggtttgcaaaacataatttagttgcttagttagagttcaccctcaccaagcctagcaacttaggttagatttgattaggtgttatttagttttaaatcgcctattcatcccccctctagtcgacatctcgatcctacacactgcaaggttgttggctataaacactccaagggggttcccagggatgctaggttctattgactgtatgcattggaggtggaagaattgcccaacaggctggaaaggacaatactcagggcatgtggatgggccaaccatgattcttgaagctgttgcatctaaagatttgtggatttggcattccttctttggactaccaggttttcttaatgatatcaatgtactacagagatcaccactctttcaaaggcttacatcagggacagctccagagttggagtttatggtgaatggaaagaaatacaccattggttactatcttgctgatggcatatacccttctcgggccacttttgtgaagaccatttccaatccacaaggtaataagagaatacattatgcaaaagttcaagaaggagtgagaaaggatgttgaaagaacatttggtgttctacaagcccgctttgcaatggtcagaggccctgctagattttgggatacagagaccctatggtacataatgacagcttgtgtaattatgcacaacatgatcattgaaaatgagcgagatgaagatgtagactttgactaagatcaggaggacagtgaggtgttgaggaaggaggaatagcaacgacgtaataaacatgtgttagagaagtttctaaagatacataaagaaattgaagaccggcaggtacatgagcaacttcgagatgatcttgtggaacatttgtgggcgcttcatggtgctcggtagttcaatttttgcattttctatcatgtattgggttatgttcaatatttgcttgtaggacatatcattttcatgtttgaaatttttgaactcaaatttgaattgtggtgtttgaaattgcaaatttgaatatggttgaattccacgcgctagaattatttatgtttcaattattgtgtgttaaactggatataaatataaattctatactaaaataaaagaaaaaaagaaataggggctaagatatggaggctactgctagacataaagacatatttaggatcctaaagcattgggggcagctcccatttaatctttggggactctaaagtaggggctactactggagatgctgtaaggcgcgcgactgttgcatgccatatatggaggtctcagccgacggcgacgacgaggggttggctgcatcaaccgcgaaaaatggagaagcaatggcgacgacggtgataagctgtggcattattgagaaagatggttgggaaaagagagtgttttctaaaatttgaagagcaacaagtgtttccctcacatagtggagtcggcatgaaggtgagagcaagtttaatagtatagctcactactagctctaaatcatctttagccaatgtaataaccaattcatacaatagttgcttactatactattaatatctggtcccacatgtcatacacgaattatgtcttggagtccgtgctgtagctggctacatatctgtagcccgctgcttttctctcttttcatttatctctttaaaatatatttgtagttggcttatagcctgctattgtacctgctctgatagagggggactcacgcccaccactgttagctccttttatggtcttgttgggaagacatacttgtcacattgtagctaaccagcaactgcaactagtcaacagtagctactcccaccgtcccaaaaaaaaaacccaatcctgggtttgaatctgaatatagtgtatgtctgggattgggttttttttttttttggacggagggagtacaacttatataggtgttgaagccagcaagtgtagggagcactagttcgtgtgcaaccgaacggattggctgtacagcacagccagaaagttgtaaaaattggagtaccgagtagagtagagatatgagattatagacatctcaagttttgtgtgttgtgggcttgtggcctgagttccgagtggggtggtagtgaatatggacctggcgggtcaatttcactggacatggtcttataggtgctttgcaaggaacacaccgacctggccttttcggcctagcccaaccagccttgcagcatactccgttcgtttccacttaaaaaagtggattaagttctggatattcatgtcacgcttttcaaactactaaacagtacgtttcgtgtgaaaactttctatatgaactaattcatttttcaagtttgcaataattaaaactcaattaatcacacgttattatcatcttatttttacgtgaaacacttaatctcgtcatcttcatcttcagagattcaaacaccaccattgcacccttattatatactgctactacgctacacaatgttttctatctcacatcaaaattcaagttagattataatttgtccggtatgtgtatctttatcttctaaagccagaggttccgctggaattcaattggtccacatggcatattaaatctgcgagcgagttgatgaatgcgagtttctacgttaaaaaaatcttcacatttttttctaattactatcattagcattaactagaggagttagttatgcgcgaaagtatgcgtcgctggtgcgcacacgccagctagctttccccgttcattcgtgctagcttcccctgttcattcgcccgcacagaaacaggcagaatgcataataagaaactaaaaatagcgtaaaacttaacagttgaaaaagagaaaaagaaagaaagaagtgggttttttttttaaaataaaaatccttagacaaatacttatagccccaccggttgcctaaacagaatatgtcaaagccaaaatttaaattttaaaacataattttgaatgattataagatactgtcaatgtagtttctttttcagcattggtttttaa

SEQ ID NO: 20273 - DNA, 26703 bp, Oryza sativa
cgattgagacggatggattagattgctaccgattgagacggagggagtaatccatgttaagtccaaacacaaatcaacaaaagaaaaactaagtgacatacatattattccatccatcccaaattgatcattacctaagcaatgctgagatcaagggcatcaaaatgttcaacgttctgaaattaatcctcgttgatcaaggtgctccgtcgcttcatattcaacataaattaattcacggtttgaatgttgcatgtgattgcaccagagaaattaatcttggctagttacatctatacggttgcatgcagggcattcaactatgcacatttacactttacacaaataaaagaatacacactttattaatgatgattatttcaggaagaccttaaaattcttaggtgatgaacaaattgaaatgaagggagtataaaacaatggaccaaactttgtttcacctcaaactgtctttttggaatactccctccgtcccaaaatataagaatttttagtatagtgccaagtcaaccatttttaactttgtaaattaatagaaataaaatcaaacatgtaaaattgatattattagatttatcattaatcaaaatattataatatgcaactctttttatttaaaatattttatttttatagatattgttggtcaaaataacatctcaaagactgtgtcgaagtccaaaaatgcttatattttgggacggagggagtatttattttatactagatttttaggaatatgcaaaactttcaggttttttatgaaatcactgcaatttgagaaatattactcccccctcccctctaaaagcatcggtaatcatttgtcaaagttaaacagcatagaaccaacagaactgatggtaagcccttaatcggaaatgctaaaattatgttgacagaaaatacaacctcaaatcttgcaaattttagatcactggatatgctggatgtgcttcatgattcgtgctcttcttctcaaactccggcgatcacctcttcttctccggcgttggtgaacccaaactccgacagagggccgacgaattagggtcccggggtgaggtgggggtgggagggggggagggaggggaggggaaggaggggagttcaccggctttagagggatggccatgggaggtggcagcccggcggtgggcggctgatcgggcgggcggcgaggcggcggcaccgccgccaaagccgtggggtcgggagcaagcggcgggccggtgtaggaggcgggggcaaagcggaaaaagtgataggaggaggcgaccggtggtggcttcccgccgccggcgacggggtagatgacggacagctcgccgccgtcggcttgaggcaaaggagaggagagggagggggagggggagggggctagcctggggggcctcgccggcactgttgacacctttcggccagccggcgaggccgggcggcgcccggggggggggaagcactgaggagcggcggcgtgaggaatcgggagaggagagaggatttttagggtttggttgtctgcacgaatcttaaagcaatcgggtggtctaaaatttgcaagatttgtaagggggttttttgtcaaatgatctttagacagtccctaaattaatatcctactttgattcggtcgtctttagtacgtttctccataggaattaataatctaactcatgtagtcagaaaataactaactcacgcaagaattatataaaaaaatctttgtactaaatgaactctaaataatatgcatatgtactattaaactaactggcacgcaaagtggcgtcccgattttctatttgcttccaacgctgaatgtacgtatctgtcagatcttccaatagcaatggatgttgagagaccagaaacacatgtaaataggccctttgggagtttaggttgagagacgagaaaaatactagggcaatccatttgagagagagctttgagccaaaagcaccccacgcactagccggaccggcgaaatggtggactcgctgctatacgggctcctagacctgcgcatggcggcgccattgcttgcagctgccgtggcgttgtacgtccttgtcgagcagctgtcctaccaccgcaagaaagggtccctgccagggccgccgctcgtcgtgccgttcatcggcagcgccacgcacatgatccgcgacccgaccgggttctgggaaatgcaggctgctcgcgctagaaagtccggcgttgggttcaccgccgacttcctggccggcaagttcacgatcttcatccgcgactcggagttgtccaaccgcgtcttcgcgaacgtccgccccgacgccttcttcgtcatcggccacccgttcggcaagaagctcttcggcgaccacaacctcatctacctgttcggcgacgaccacaaggacctgcgccgccgtatggcgaccaacttcacgccgcgcgcgctctccacctacgccgccatccagcagcgcggcatcgtctcccacctccggcggtggctcgaccggagcgccgccaacggcggcaaggccgagccgatacgggtgccctgccgcgacatgaacctcgagacctcgcagacggtgttcgcggggccgtacctcaccgaggaggcgagggagaggttcaagagcgactacaatctcttcaatgtaggcctcttggccttccccgttgacctgccggggctcgcgttccggcgtgcgaggcaagccgtggcgaggctggtgcgcatgctccgcgattgcgcgagggagagcaaggcgcggatgcgcgccggcggtgagccagagtgcctcgtggactactggatgcaggagacggtgcgggagatcgacgaggccaaggcggcggggctgccgccgccggcgcacatctccgacgacgaggagatcgggggcttcctcttcgacttcctcttcgcggcgcagacgcgtccacctcctccctctgctgggccgtgtccgcgctggactcccacccggacgtgctcgcccgcgtgcgcgccgaggtggcctccctctggtcccccgactccggcgagcccatcaccgccgataagatcgccgaaatgaagtacacaaaggctgttgctcgcgaggtggtccggcaccgcccaccggcgacgctgatgccacacatcgccttgcagaacttccagctgacggaatcgtacacgatccctaagggcaccctggtgctcccgtcgatgtacgagtcgtcgtttcaggggttccatgaccccgacgcgttcgacccggagcgcttcttctcggaggcgcggagggaggacgtggtgtacaagcgcaacttcctcgcgttcggcgccggcccgcaccagtgcgtcggtcagcggtacgcgctcaaccacctcgtcatcttcatggcgctcttcgtctccctcgtcgacttccggcgtgagaggacggagggctgcgacgtgccggtgtacatgccgaccatggtgccgagggacggctgcgtcgtctacctcaagcagcgctgagtcaagttgccgtcgttctgatcaagctggtttcccgtcatcttctcgtgttccgctctgtttctccgctcctctcgatccatgcacggctctaccccaccacctcgcctgcatggctgcatgggcgttccacatcgctgcatgggcttgggcatcccctatcttgttcattaatattggtcaaacaatcatctcccataaccattccatcttctctttaatttgcttaatatattaaaattgcacaccagtgtagttgcgggtggcacgtgtgcgtttgcatgcactgtgtaggtggtcttttgcatcaagcggtctgtgtcttgcgtgtcgtccttgtatgcgtaacagtgtaataacgtgctgcttgtatgaatattgtaatttgtggtatatttcgtttgttagcacgcgctccatgtatgctacttcctccgtttcagaatgtaagtcattttagcatttttcatattcatattgatgttaatgaatctagacattaacatcaatatgaatatgtttagattcattaacattaatatgaatgtgaaaaattctaaaattacttacattatattgtgaaacagagggagtatatagtttcatttgttagcacgcgctccacgtatgttatccacatggatgtcgaaaactatcaacgcattttatatgaaagaaatattagaatgctacctagcgataggggcgatcagattctgattccctccctccacctggtttccttttttggcaccgtattactttcctattttagtaaatttatacacctaaagtttgtacacctcaagtttacacatctccacaattttttttttaaaaataaaaagttagaaaaatttaggtatataaatactatatataaaaaaaattgaattcaaattcaaatttgaattgggtatgtaaactcttaacttataaactttggatcattaaacttttggtgtataaactttagatgtatagaaatactatatatataaaatatttgaattcaaattcaaatttgaaacgggtatataaacttttgacttataaactttaggtctataaactttagatgtatagaaatactatatataaaaaaatatttgaattcaaattcaaatttgaatcggatatataaacttttgacttataaacttttggtctctaaactttagatgtgtaaacttgaggtgtataaactttaggtgcataaatttactaaaataggaaagtaatacggtgccaaaaaaggaaaccaggtggaggaagggagggaggagggggtcgctacccccatcgccaggcgatcgatcgcccattaggcgtaccccatgcgagtttctaattatgtatgcttcatccattacgggattgttaaaattatggcgtcacacttttcactgagtcacttttttttcctgtacgattttctctctcctatatatataaaagtatatttctatatctcatagctagtcttttaagtaaacaataaattacttttgatcctaattttcttatacattatatatttgaaaaattaaaataaaatattgaaacttatacggtgtaattacgtaagtgtaaataatttacagtataaaaatgatttaactatttttttctgaaaaatatggcgacataaatatagctattccaatctattattcaccactagaaatctccatgttccatgttgtttagttgtttcctgttagtgtatacaaagtccatgcaaaaaatattgttccctatagtttttatatatgtagggaacaaagggtggaagggcctaccatgctcctagtggcttgaagagttctggatttcctttttttcaatcaaagttggttagctggtttgtgatgcagaataatatgtacaaacatgcaagtttaaatttaatatgcacttgaaaaaacaaaaataacaaaataggtattggagaatagaaacataaatgtttatatctctttaagtgtacattaaatttgtagttgtatgtttcttgaaaaaaatatagttgtatgtaatgcgtatgtaactatggtggaaattatgacatgccataggacaactgaattggcagttgagctaggagcgataaaagtaataattgaaactgatactatgaagtggtgaggatggtggctcagtcagaactaaaccgctctatctgtgggactaggatccatgagctcaagtctaggttacgtgtcttccacgagtcgaagataatctcggttcggtgctcagtaagtatagtagcacatacttcctctatcaaaaaaactcaacctagaagaagatgaatctggacattacatcccctcctaggttgagtttctttgggacggagggagtaggcttgtaaaagaaggtttttcttctagttgctttacaacctgggtctctatttccctgggttttgttttatccttccttaaggatgattgtaagaatgaaatgtggcttgaatagagttattatcagttcctctaaaaaaatatcatcaaatatattaagtttatttatatcacatgcgtatatctatgtgttgtcacccttccgcctcacttgtggctggaccatgccccatccacatccctgatgtctactgtccaccaggatctcccactcttcaacgttcttatatattctatcatcccatagtgtatttcttgcattatcctttcaattttgatttaacaaaagatatgatttggttgatgataatgactcttgtattatagaaagactgagatgttattttattaatgtgctaaacaagcaagctaactcctgtattacaaaaaaaaagatatattttctattatgcgctaaaagtccattaaacttcgtataaacgctcctaagccgactcgtgttatcctacaaacgcttctaaccaccatgtggcgctataacaaattagagaaaatactgaaaattctcaggaaaaaggaaaatctccaacaattgatttttacttaaatttggtccaatattctaaaccgtcatattagattatattaaactacatcctaatcgcaccttccctcctccgctatggagataatttactatttgccatcattccaaaatgcacatacccaaatgctactctcccaaatttttattctcatttacaactttactgtgcacccaaattacattgagccattcatttttctaaaaaaaaatatgtctattacatcatatttgtaattagagttggttgccaactactgaattggtaattacaaatattcgtactgtagcattgaactgttatatataattacatttcttcatgcatatatgtctgtactaatattatgcaggcattgaatatataataccaaaaccaaattgacttgattcgagaaggtactatacaatggcagctatatgatggtcttatagagaagtctatccaaattcagaatggttgtacttggtggtttgctacagtacagtacctctcaatccatttttgggttgtagagttccattacctagatagggcaatgagattgtttggaagaaaacaattaattccaccaccacttccacatggtgagactgagctccgcaagctgcacaaaccgaaacttattggaggaaaatatgtttttggaataaattccacgccaagtatgtacaataataatgatgaggctgaacaatgaatggatcaagaagatttatagtactagaatatgtctcatccagttctagattagttttttatgggacggagggagtaaattgctaaatatgctttgcgaggctatagatggccatatgacccgaggtctgcggccaggcccaaggcacgccattttggcctggcccaagcacggcatggcccgactggggtcgtgcccttttcagcccggcttgacagtcgagctatgcctgggctgcaccctcggcacggtgggccggctcgacacaacacgatcgaataaaaatagtatagggatggaaaatagacttaagtaaccatgtaaggcaaggcccaaagcgaagaggaatacaaaatagacttattttccagccatatagacatagcccacatagttgagggatgaaaaatagacttattctgtggagaagcacgacgggctatcgtgccttcgggccagcccggcactgcccgagtcgtattgagccatgcctgggccgtgtgtgcagcccgtgggctagcacgactgtaagttcaagtgccttaatttggtttcggtgattaatgacaaatctaattatatgagactaatgtttttatgagtctttctttgactagtcttatttggatatgaaagtaaaaatgataggaggcatgtattaaacttcacatattctaacttggtctctcttgtggatccaaaatatagtgtgagctccctcattaatcttgattgattatgtgcatatgcattccttcatatctatatgtatgcacatcttgagggggagcttattctatattttgttcattataagatctctaccttaatttgaaattatctttcatctcatctctttgtattgtttatatcggattattatctatcacaaaagagagaaaagattgaaagatcttggattaaacaatttgtgtaattgttactttggtgatagatgataaaccgatgtttatgggattaacctctcttttacataagttttcaacaaggttatttcccgataatgagatgtggtagatatgcattatttggtgatggaccttaatcatgacaaggatgaaattcatggagattaagcgatatgtatcacttcttatctcctactttttgataggttcatatatatgatttccatgttattgttatataagtgtgagactaatgtttacttgagtcttatcttatttagtctcctttacattgagaacatggagatcatgaaggtatgtgtttttttgtttatcttcatcattactacatatgccttctctatgtgtataggataaacccccattggttcttctttacttatgcatacacttgtctctcttgtatatttctttgtatgcatatacttagggggagcaaatcctatacatttattgtgcatgttttagatccatgttgttcacatattatttatatcggatctttgcacttgagcttgcatacgagtatatgacacttgtgatgttaatgaatactcaacaaacatatccatatctttcatatgcaaccggttggtcatcaagtgaaggatgagaaccgatttgttgagactaatgttctcctttgagatgtgaaaaggaataggtcccactacgatgaggctaatgaatgacaccatgggttaatggtcaccaagccaaggacatcgtcatgttggcaagaatgaagtcaagcttgtgatgagaataaagtcttgacaaaggatggtaaagacctcggcataaacatggttcaaccggatggtaacaagtgttgatcttggctcaagcattgaccccaagttggatggcgcaaggcaaaggtataatggagctaagagtgttttcttagtcctttcccggtcttggtgtttgctgtagaccggatttgctagatagacgccgtactatcaagaggggtctatgaagtgagcatgtggatgatcttgcgccatattagttcatatgcatgtaggtgcatttggtgggcttgtctagccaagtgtggtgagtattcttaagtcctaaacaaagagagatgtgggcaaatcctataggtttgggtagcctcatgtagttatgtccggtggagtatcctttggagtgtgagccctttctccctgagaaaagttgtgtttcttggatggattgttcatgggttggatagccctttgaataagctttccataaagtccaagaacgccaaattccgagacccgagtcaagagatatcgtcgttttactaacggtcggttgagctgaaaagtgacctgcggtctgaccgtgggccttaggccggtctaactgggcctgttagccggtctgaccggtgtggtaagaccggtctgaccggcctcactggtctgttgcactggtctggtttttggtggcgatacagagccgcaaccggtcagaccgagccgacggcggtctgaccgagccgtggacgatctgaccggccactacactgcggtcagaccggccaggttgagtgggctcaatgattgccctgtaacggctagttttctagccgttacaaagtagtccggtttgaccggcctcacaacggcggtctgaccggcagagcacaaagttggggagttcggttccaatggctagtgttgatggttaggggtatatatacccactccccagtagcaagggtaagattttggcactccattgcattatcttgaacccttgcaagagctctcacacccttgggcacttagtttatttagtgaggtgttagagagtgagttaagccaatccaagtgcattgcttcattgttgtagctagtgtggcacttgatcatcctcggcaagcatcctagacttgttactcttggaggttgccacctcctaaacggcttgtggaggtgttgtccggtgacctctccgagagattgtggaggaggcccggcgccgtttgtgagtagtttggagttcaccacctccggagtgaaggaaaaactaccctagtgatcgaggcttgggtagtcctctccgtgggccggctctcaccttgcccaccccttgacgaagggggcgtgcggtggcttcgtggttgagcggtggagttgggctcgcctcaacggggactaagaaactggtgagtttccgaacctcggtgaaaaattccttgtctcttgtctcatttatttgttacatttacatttgtgcaatttacattcatggagacatatttgagcccatatcacctaggtttgtaaaacttaacttagttgcttagttaaccttgcacctcaccttgcctagcaacgtaggttagttttgttgaagtgccattaagttttaaaaccgcctattcacccccctctagtcggcctccttgatcctacaacgactcggcccaatgtgtaggtcgggccgtgccaacagcatgatgggatgtcgtgccttcgggctggcccagcacggcccaagtcttattgggccatgcctgggccgtgtgtgcagcccgtggggtggcacgacacggcccgacgtgtaggtcgggccgtgccggcccgactaacctcggcccaagcacggccgagcctgggccgtgccgtgctgggcagctgttgatagaaaacacgaggcctgggagatctgcttaacttcaatgcaggtccaaagctcgccttcgaatatatgagcgtgctagttgatttgatcctgtaatcaacaggaaatagagacaaagaattcatggttaaatctataaatgatagccgatcggctaggtgccgatgacatatcatttatctttgagccgatgtcatatataaatcgatcggcggttataaatagatagtaaggaactaaatctatttgatcggctgtagatattaacgatatatagttcttacattaatatatacttaaattaagtgattgggatagatcggtcaccatgccgagacagtataaatcacttagatcgaaatacatattaataacagaattatatatttttatagcatagccgatcagatagatctagcatgtatcggctaatactccgatactactttatataaagatatcaaaacaaatataatataccaaacaaaagcttaatatacttaaatgcaataagatcttgacataaagggcggatttaacatgtcattgaagcacatagatcgaatatggttaaatcagataagatcggctgaaactccgatactaccctaatcggcaaccaaaggacatgctagagattgatattctaagcacgacttaatagatcaaactcaactgatgcagcattaagtatgaaaagaagaacaatatctagacaatcaagccgctgggtgtttcataaagtggtagttatcttatataatctaggacaatgtcgctatttaacctaatcggctgtcttctattaacagatgttagccgattgtaggttagatgatgatattgccaaaggttatgtaagatatatgataacttgacaaattatatagacaagattagagtgtcataaagatggaagcactaatctcgagaacacaagtcatcataacaagttttacctcttgttaaagatcgaaaccaatgcagctcaacccgaaagcaagaactcgtcgaaacaaaactaaagcaaaaaggtgacgatgcgccgaaattgtattaaacatgtgtgttaaaaattacatagggctcagagtctatctatacccgagaattacaagatatgtctataccggacacgatcactatctctaacaaactctaagataacataagtctttacggcagacttttgcccaaacatatctctaaggaagttacataaaacatcctaattaatagatacaattgccttctcaggactctatccatgtgcggcaatcatcttgaagcacctcaattcaacccaatgtcatacactaaattatactatcagaatcggctgcatcgggtcacctagtccgactcagacccagccgatcctaatcgtagccgatctggacttcagccgattcttgctctgttcttggatcaatctccgccttcgactccaccttgatctaatccccttttccgatactgatattaccaaatttggtcattaacagcagcccatttggccatctatacgcaaggctagactaccaaccaacgttgatgaaataccatcttagatgatcaccgattatgcttcctaagcaagatatttgaccatccgcctgcccatccacgcactgcccatcctccctccacccatccacgtgccactcgcacggccgccgccctcccgccatctgcctgcacccccgccctaatcggtaccaaatgggactactactagagttgaagacctttttaaggtcttaaaagaatttagggcagcctctatttagctttgaggggctctaaaatagaggttagtacgtattggagatgctctaaatcactagtagccatcatttcagctggcacatagtgtttcgtatctttcataatcaatgtggcaatagtatctgaaacggggaattctgttgaaagcacaactttgatggtacacattactttaatcaatgtggcacacatgctgtttttatatatataaatgcaacattacttgctgtgcaccaaaactcatctacatggcttaggcccctatgctatgcgggcataatatttttttttgtacttttcttcgttccaatttggatacgtaatgaacctcctgatacaaccttagttgtagaatttcaatagggcagaataatataagaaagcagagattgaaggaaatttaactaatctgaagaaactgttaccgcaaaaatagaaattcttaggcactgttacctcattaaaaaccatatgtttaacactaaaaaggaggatggctgtggcaagcatgccacgaggaactgatgaagttttggttggatcttaacaacagatatttgctttatttttttgacaggtcaacgggaggcgaaatgcccacctgacatatattatgtcaaacagacttacgcaagagctattcactttatgatatgattgagctattcactttatgatatgattatgtgaccaaagcacatcaaattatttatttttttgaacgaatcaccacttagaatgtgccttcgttgaatagagtgggagagaaaactttgaactaatttatccactagtaattgtatgggcattgcaaagatatattttacctcgaaaaccaaattcccggttgattctatcactaattcactctgccactccagatgtgtgaagagagcaaaggggcatcggccgtgccacgagaacatgaatgatgagggggaatcgggaaggccggccactacggatgacatgatcactgatggacttggtttcaggtaatctctgagaaaatggcggttgcacctagacttgatgcgagggtcccaagggagttgcagaagcgtagctaaccaacggtgagcttagattctacaaaggttgatcgagaaggaagagcgactgccatacttggccacaatgctatagagccaaccaaggaatagaaccaagatctgagcccccctctaagtcttgcgagaataccacgagagacgaaggatggaaagccacgcaaggtcgaagtggccaggctatgagatcaggagctgtgggtgtccccgatgccgaccaacgcgatgaagagggaggtcacaagagaagacatggtgttgggtcaaccacgtcgtacgctcttccgcgtgacgtccatggctagacgatatccataatagcgttcgtatctggacgccatccaaaacagcgtccttactagttttataactctttactctcaattattacttttttaatttcagaattgttaattattatgaataaaagaattggtcaatcctttacaaatatgtgtagtaccagtaaacgagcatagcaacacgagattgttaatgggcgatcgatcgcccctagcacgccccctctcctccacgtggtttacttttttggcactgcattactttcatattttaggaaatttatacacctaaagtttatacacatcaagtttacacatctaaagtttagagacccaaagtttataaattaaaagtttatatattcgattcaaatttgaatttgaattcaaatatttttttatatatagtatttctatacatctaaagtttatacacctaaagtttatagacccaaagtttataagccaaaagtttacatacccgattcaaatttgaatttgaattatatccgattcaaatttgaatttgaattcaaatatttgttatatatagtatttctatacatctaaagtttatacaccaaaagtttatagacccaaagtttataagtcaaaagtttacatacccgattcaaatttgaatttgaattcaaatattagtttatagacctgaagtttataagttaaaagtttacatacccatttcaaatttgaatttgaattcaaattttttatatagtatttctatacataaattttttcaactttgtgttttctagtttttaaaaaatttatgatgtagtaggaagagaagaaggagaggaggaaggaagagagtagtgtatagggggatggggggcgatcgcctagggcggtcacccgcccattagccggccccataacaacatatgtacggtagagctatgttaaggaaatgaagttttctcctatgctgagagagataaacttcttcatactcgagatatacctctttatgcaagttgccaaagctaaaatttacacgttgaaagtaggattggaatctcatcttatctgtgttcttgactttttgttccgtttttagaggtgtttgtattatgtgtaagctatactagccaggaggtatagacttacctcctaatgaccagaaagatctcgataatgctaaccataaatttgtcctcagatatatatctctaaggatgagaaaaaaaaatctctaggaaacatatcaaaagatgagcttaattaccagggcctgcatgccattgagaatttgagattgctagtccattgtagataaaggaaattcaaccactaaatacaaggtagttcaggccttcagtattaattgaagcatacaggcatcacttaaaccgaattaagccagcactagcgtagatacgatacgtgcatcccattccacacgaaaacacttgatgatgccactgaagaaaaggagcactgtatgaacggccctggcttctctgatgctccggcaacaattcaacaactccgcaaagaacagcctacatcaccacggcaatctaatccggccttccgccacaccatccaatcagagcaagtcacacgagaagaaagatatatataacaaaacaaaattattttcggttttgctaaatttttggcgacacattttctggttgattacagtcgcttgttgagccattggatcggtcataggattcatgctagcatacttaataacgcgtaactagttatgcttcataggttacaggtcgctaattagcggtctactggagaactttgctactatttttttgttcactgcatgcactcgatcaagtatgagtatttgtaccgaccagcgaaacacatatgtaattaaagtataaatatgtaattagtatatattagtagtatatttagacagtagttacaccctacttacacaccacttacatatgtaattagtatgtaattttgtgacttacatatataattttaatacttatatatgtaattttgggacttacattgtaaatacactaaaattacatatgtaatttagtgacttacaatgtaaatacatgccgactaacttttagtgaaaaatatggtgctataaatatagctactcccattatttttccttccatacattttccgcaaaacaaacagagacccggccggtgtcattatccacctgtgcccagcagtgacatggccttctagcatccgtctgtaccatgaagactgtatttatatggcgatggctctcgggctccggactgtgaagaaaccaagcgggtgaagaggaggacgaagcacattgtgccgcacagttagagaggatcggtcgtattcaggttgacatcctttatcataatagcactattattacagtcattgacatatagggtaataaaagaatgaaacccatatgttagtgattgtaatggtagtgacattatggtagaggatcaatcctcacccgtcatattcgtatcgtctctgttaaaatattttatgtggtttaacgctagtcaataataagggggagttgggaatttgtcccatcaccttatttctcattttgatttacttttatcttacctttttattactattaaatttatagttgtgtgtcttatgacaaaagctggagatgtaacccatttctattatctaaaaatattcgtatcgtctctgttgtggttgtggttgtgggctcgattagcaaagaagcctttggaaacagagcccacagctcaaggtcatatgaaatagaaaacaggaaagcgatctacttgggcatgaagctgagaacacaaacatagtataggtaacccgagttgtgagtgaagggcagacggacgaccgacttatatatgaaacagacgacggaaacctctttagttatagtagagacagagatataatgtgcaaattaatataaatgatcctcctcctataaaaatcctataaaagtaacatgagtagagttattacctaccagttaagggatctgaacctgtaaaaaaaatactgtctcccatctcttttatctcaatcttgcgtatatcctaattccaacaattatcattctttataaataatgtctacgggtatagcccgtcgacagtgacgaacatgtaaaaacactatcatgacagagtgtatgcttcggactcgaaaacaccaagcgaagcagggtgaggacataattacttttagtattttactagcaaaatgacaatatgatgtaacggatgaaatcaattttaattttacatacatacatcaaacatgcacgttggtagattagtcgaaagcaatgacacattaactaccacatggtgagtgcataaggagcagaaatttaccatctctcactaaatcgattagtccataattagccataagtgttacagtaatctatatgtgttaacaacggattaattaggctcaaaagattcgtttcgtggtttccaggcgagttatgaaattagtttcttcattcgtctctaaaatccttttcaacatccggtcaaacatccgatgtgatacctaaaatttttttttcgcgaactaaacaggccctaagaatggtgggactaattccactgtccctcgtgcacccaaaacttgctggttgcacaaccaccgccctcctcacgacacgtgccatcttttttaccctcttacaaaacttaatctataagagcaggtacaatagcaggctataagccagctataaacatattttaaaaagataaaagaagagagagaagagcagcgggctacagatctatagccagctacagcacggactccaagacgtaatgtgtgtatgatatgtaggaccatatattaataatatagtaagcaactattatatgaattgactattacattggctatatatgatttggagctagtaattgactatactattaaacttgctctaactagatattgacaaaactataaccagaatgagaccttgtcagtaccttggtcctagacgctgacacctttgacaaacaatataaaagaatggtagatccaactgaatattgaaagtgtaccataaatgacgtttggaaaaaaaaaacaaagaggttacggacggcaaatgagattcgaacccaaaatcctattagataaggagcaacttaccattgagttacttaatacacctagttaagaaacaacctaccttccttttgatttgtaccatactcaccaaggttcatggcgctgatatattggatcacagcgtcaagacccatggcgttgaggtagagtttcaattttggtaatagtttttgtcaatgcatatttataaaacaagttttgtgaaaggataggagtggaagaagtttgaaaattgctcgccactcccaaatacgcaaccatgaagtaatccaatggcgttgacccctctcactacttccaaaataatcactcccaaaataatcaccaacttccacatccacccctccaagcgcctccgcccttccttcggcatccctttcctcctccgcatccagactctcacgtgagtaggcaccgccgtgccaaaacctgtcgcaatgcatgcctcaccggcaaaccgagtccagtgttaagctacaagcctacaacctccaacagtccaatattgatccctagtccgtattcacacgggaatatccgtccttagggttttggtgctggccattagtctagcttcaggccggtggcactagaaaattggaggagcttcttgtcgaggagacgtggctaaaggtgtccctcaaggaactccgcaaagttagaagtgtaatctgaagctcgtaatcacgactgtaacacggactcgtaattgatacaaacgcaaacatagtcataaacaattgtacactgtgtatttggtactcattcaagaatctatacatgtaagcaattagaattaagtagcatcctcccagaaaatgcatatagcaaggagaataaattaattgataatcattatatcctctactaaaataggacacatgaacagaagtaagagaaaacccaaaaagaaaatctggaaggtgagatattgggtaaacaaacaagtatcgtatcgttcatccaggaattacaaccaaataatatagagtatatttttactgtatcctaagttgagtatgattcattgatttcgatccaaaggcttagattttattataatacatcagaaatagtatgtgtagtagtagaaattgtaagagggggaaaaaaaggaaataagtcttctaatcttcttcccgatttctgctactgctcaccggtttttcgcacaccatggcatcttcgtcctcacgattcagcatggcacgacttcattctcatgatccctgtagcttccagcgactttgtttgtcaccacgattcacgaaacatgatcccggctgccggtagccctcaagccatgtgttcctgatcctgactccctgaacagcatcgacaaggatcgatcacaggcaattttgtcatcttgtgtttctaggggctaaaagaaggacatgctgcacggcagcttggcggatgtgcagcttcggcaactgcacatgcagttttgcttttgggactagggaagctgcttagattctaacttttttccaacaaactttcaattttttcgttacattcaacttttctatacttacaaacttttgacttttccatcacatcgttttaattttttcaaacttctaattttgacgtggaactaaacacaacatagatgaagacatacaattcaattttggggttcgtccacatatttggggcacatttcaagaaaattgttctttgaatagcttcaagatgtatcagaatagaactgaacttgatgatctaccattcgtaaacagaaatttaattggtgctgaatattttaggacatgttatcaggataaacaaaagcgatcaaccaacgtttcgaattggggaactgtggctaaattagcgatgccttttcttctctttctcgtgttgctcaggcgtgggttgcttcccagaccggcttgtttgttgctcacgaggcgcgcggataatcgcgaaggccaatgctagtatgcatgactaaaatagtctaacggccatggaaattaacggttagatttaactcatactactctactgccatataggagtactccaatagtggaaggtaccgtagaagtgcacataatatacgcagtttagcatggcagttgttccaccacaatctgcaatattatttgagtttactgaaccatatataggtggtgttgggattcagggactaaactttagtctttgtcacatcggatgtttaacattaattagaagtattaaatatagactacttacaaaactaatagcatgaataagagctaattcgcatgacaaattttttaaacctaattaatctataattagcacatgtttactgtagcatcacataggctaatcatggattaattaggctcaatagattcgtctcgcgaattagtccagagttataaaataggttttatcagtagtctatgtttaatacttctaattagtgtccaaccattcaatgatgtgacaaggactaaaaatttttagtcccatccaaaaacaaccccatattacacctttcgtctcaaaatatagtaatgatgggatgagacctatcttagaactacgaatctggacatgaggcatgtccagattcatagtgttaggatgagttaggttgctacattttgggacggaggtagtatttgagacttgctctggtcaaataaaaagtacctcaagataccagtacttcacgctaccaaattgtttccgatagttatgtttagctagacaggatggacattgttagatccaaccatccgaaacaatacggtaccggtacctcgaggtactttctgttggacaggagcaaatttcatattatttgggtttgctcaattcctaaaaacagttcaagtcgaacgactagcatgaggtcgatctagtatagtgggccactgtatcggtttaaaacctggatgagatggtttgcggctagctagttatggtcggcttacttaggtgttggctcgataagattgaaggtggcttgaattgtgttgtctcgggttgaaatccctcactcacatcccctcccggtgaagctttatatttataccctcatatacccttatttaagtaaaagtaaagagacaaatgtagattttgaatcgttttaatcagtgacagatttatgtgtaggttgtggggtcagcccagcgttttcactatcatccagtgagtcttaaattttctatataaatctattcaaatctgcataaatgacctcaccaaaatatgaagtaataataattaaccccaccgagtaaatttcctagcttcgccactggttttagtaggaaccaaatagaactatgtctttctttcatcatctcctcccggctttacatatgtttgggtttgttttcatataggagtcagtgatatatggtattccgtcgaggtaagtatacgtctaactacatattaagttcaaactcaatctacaccagggtttgaaatttcggttcgaaatttcgccccccaccgaaatgctcacatctcacccgaaaattttgttttttgcaatattttgtgaatttggtcaaatttattcaaaatcagtcaaattttcaaaaaaaaaatcgtacaaaaaaaattcggaaaattcggttctttcgcccacctgtggtagaaatcttagtttcgaaattttaaaccctgaactacacattaaggggggaaatctaagaatagactcaagattttatggaacaagtcaagtaattgaaacgatttccccccctataaatacgctctttgttgagagtccagaagagcataagtgagacagtctgagcaagagctcgagccttcagtatcccacgcactatgggaaccagaactaacccgcccggctcaatggtggagtcatttcacggcctggtcgtggtagacctccgcacggcggcgccattgctggctacagctgtggcgttgtacatcctcatagagcagttgtcataccaccgcaagaaggggtccatgccagggccgccgctcgtcgtcgtgccattcctcggcagcgtcacgcacttgttccgcgacccggtcggattctgggacttgcaagcgacgcgtgctagcaagtccggcgctgggctcaccgcggactttctcttcggccggcttatggtcttcatccgtgactcggagctgtcccgccgcgtgttcgccaacgtccgcgccgacgccttccaccttgtcggacacccgttcggcaagaaactcttcggcgaccacaacctcatctacatggtcggaaaggagcacaaggacctgcgccgccggatcgcgcccaacttcacgccgcgcgcgctatccacctatgctgtcatccagcagcgtgtcatcctctcccacctccggcggtggatcgaccggagcgttgctaacggcggtaaggccgagcccatacgggtgccctgccgcgacatgaacctcgagacatcgcagacggtgttcgtcgggccgtacctcaccgtggagacgagggagaggttcgatagggattacaacctcttcaaccacggtttcataaccttgcccatcgacctgccagggtccgcgttccggcgcgcgaggcttgccgtaccgcggctgaagcatattctcgaggactgtgcacgtcagagcaagcagcgcatgcgcggcggcggcgagccggagtgccttgtggactacttgatgcaggagacggttcgtgagatcgacgaggccgcggcggcggggctgccgccgccaccgcacaccagtgacatggagaccgggaacctcttgtttgacttcctcttcgcggctcaggacgcgtccacctcctccctatgctgggccgtgtccgcgctggactcccacccggacgtgctcgcccgcgtccgagctgaggtggccgctctctggtcgccggagtcaggcgagcccatcactgccgagatgatgacggagatgaagtacacccaggcggtggcgcgcgaagttgtccggtactggcctccaggcccggtggtgccgcacatcgccggcgaggcgttccagctgacggagcagtacactatacccaagggcaccatagtgttcccgtcggtgtacgagtcgtcgttccaagggttccccgacgctggcacgttcgacccggagcgcttcttctcggaggcgcggagggaggacgtggtgtacaagcgcaacttcctcgcgttcggcgccggcccgcaccaatgcgtcgggcagcgctacgcgctcaaccacctcgtcattttcatggctctcttggcgtctctcatcgacttccggcgtgagaggacggagggctgcgacgtgccggtgtacatgccgaccatcgtgccgagagacggctgcgtcgtgcacctcaagcagcggtgcgccaagttaccatcgttctgagctggttattttccgtcacccatcaatttctccacggctgcacctccactgcatgtgcgttccctgtactgttcacgggtgtattctaaattctcaaggaaatatcgatatcctttatttgtatgtcatataaatggttacaaaataaaactaaaaacacaacaagttaaattaacatatgagaaaaccattctacaaatatacaagttaaaatttaacttttacaagttaaaaaaaaaactatgaacgtatattcacacttaaatttatttttttcgttgcaattggttgaagttaaatttgatcttgtatatttttatgaagtgatttatcacatattaatctatcttgttgatttttttttctaatcatttgaattatatgcaaacaacgaggaatatcctcttaatagtttaaaatattttccctattgttcactatttggacaatcatgtcatgaccacttcgtcttctctattgtttgctatattaaaattgcaagccgatgtagttgcaccttgcacatgcatgtgcgtgtattaggtggtgtttcgcgtcaagcgcttattgtcttgcgtgtccatgtttgtatacggttgaatgatttaaccgtataaataaagggatggctgagattaaggcaaattcatcggtggagttggccgcaactctatgggatctgcacctatcttttaggtgtgtgaattacaaactattaggaggatcacaaattcacaactgcaatcccgaaatattggggcagccgaaattcagaggattttattacttctttaccatatttttttttcaaatctaccccttcgctaattctactactcaagctacatgtgtagtacaactgattgtagagtccgtcagatgaaattcatagatggcggatggccatccctggctccaagggtacataaaaaatgctctatacttaatttagatacgttaagtagggtatggacggacgtacgattgcacgtagaagcaaataacgatttaatttgaaaattaggagtaggagggcgtagtatgtacatacacgaaagatttttttcgttttttttctttggtgaatagtactcaatccatttcatattataaatcgttttgacttttttcttaattaatcaaatcatttaagtttgatcaaatttatagaaaaatagagtagtatttcaacgcaaaacaaaatgtattatcaaaatatataaaatattgctatttttttatatactagaaaaatattaaaatgacttatagtatgaaacggatgaagtagtatgtatttatacgtaaataaacaggattttttaatagctttttccatatttctggtgaatagtacgtacacatacatatgttttctctggtatatagtagtacgtatttatgcgtaccagggtttacgattccgagatgaccttccactctgagctttggcggtatgacggttttcgtgaaatccgatagaaaaccggtaggtttcaaacaaattttgtaaaccaaaatttgaatactaattccctgagtttatcgatatgctcgcgaaaacctgtcggctttagcgatattccgagcgaaatcaagtgcacaaccacatcgcctctctattatattatctaggctaagtactaagtgggcctactatatggaatttggcacaggaaagtgtttttcttttttaaaccgttattcttttcttttctactgtaaagttcaagaaatacacggaatataccatttcttttggaaaatttatacccaatggattttgttttttttttattttttatcaattcaaattcgaatttgaatgaaacccttcaaaattacagacggtttctactttcgagccacctcgaaatcttggttttcgtcggatctgttaaccctgatgcgtacatgcgagattatttttcctagtttttttccggttagtagtacatacgtttttttttctctcatagcgcacgggagattagatgggaggaccaatcatctttttgttcgttttttcggtgagtggtaaagtacttacgtacgtacgtactaactattcaggacagacttttttattcattcccaggttacgtgtgatctaacctaatgttttaacttatctaaacgaatgtaatggattaaaataatgagtttattgattaaattgaaaaccaagggttatatataattttcttttctattgtaatttggaaggttttctctaatttattaaagcgacggatgacagaataagagagtttgtaggattgctatgtagtcgtttgatatttttcctagtgaaactttattaagtttgatcaagtttatagaaaaatttaacatctaaaatataaaattagttttattaaatctaacattgaatatagtttgatgatatgtttgttttgtattgagaatagtagtatatttttctataaatttggttaaacttgaagaagtttgaccagaaaaaagatcaaacgacttataatatgatatggaaaaagtagtgatttaggagcgtttgtgacaaaataatagatggatttttttggttctctctctggtgaatagttgtacatatctattatcttattaaagtaataaaaaaggagcctccacgttcgctctcacggcttaaaaattctcatattaatcgaagaaaaataaaaacatagtccatatagaaatacaatttagaaatagctgaaattcgaaattaaaaaaaataatgaatattgtaagaggagactagagtacatatagaaatataattaaaaaataaaagaaattcggaattaaaaataaggaatagtagaagaaaagcatagagtccatataggaatttagaatgtactaaaaggaataaaattaataaaattaaaattagagcttagagtccatatagaaatacaatttacaaacaactaaaattcaaaataaaaaaaatagcaagaagagactagagtccatataggaatacaatttagaagaaactaaaattcgaaattaaaaaaataaagaatattgaaagatgagtttagagtttacatagaaatacaattagaaataatgagaattcagaattagaaataaataatattgaagagaagcctagagtctatatagaaatacaatttacaaataatgaaagttcgaaaaaaaagaaatattggaaga

SEQ ID NO: 20274 - DNA, 970 bp, Oryza sativa
accttttttctgcttggagtaattaatcatgtttttaatgcattcatattgtttggattctcagacctgctgattctgcccttgtactctggccttccgcggggagatcaagtaagtgatcatcagtagttttgtagtgtgaaatctgttgtgtttactgcttagctattcttctctggcattttaggacctcatttttactccaacttcaaaaggtaaaaggaaggttgtgatatcaacaaacattgctgagacgtcattaactctagaggtaatgcatatgtatatgtatgctaacaaattccatggtggttgttactaactgctctcaatgtcgtgcagggcgtggtgtatgttgttgatagtgggttttccaagcagaagtgttacaatccggtgctttctatttatactcaattatatggtccactgttcttctagatatactacacttctacaatttggctaccctagatatatctatactcttgttccttttcatagaacctttttagtaaacttttttctaatctttcttgtatatttcttggtttagtccttttcctgtctataacttgcatccttttggcctagatttctgatatcgagagtttagttgtcgcaccaatatccaaggcatccgcaagacaaagagcaggccgagctggaagggtgcgaccaggaaagtgctttaggtctgttggacagttttctcattgaagtttgtgtttttattgatagttcccttatagtgatttgtatctatcctcttctagcggcaattatatttggtcagttatgctggtgttgtgtttttattattatattataaaatgttccatgattctatttacctgagtctgtgttttctggatgacttgctgaatactttgagctattattttatctactattttctttgtatgtttcaatccttcatcttgaatattttatgaataaatctgcattc

SEQ ID NO: 20275 - DNA, 8740 bp, Oryza sativa
tgaagagtcccatgatgacacagacgagcagtatgatgagcacctccgatgagaagtcccatgtcaggttcctgatgtagatgagcgccaagaacacgcccaagcacagcgtgttgttcatggtcacaccaccatatacctgcaaacaaagaatcaaacgcttagaatcagtaacatttttgtgtagatttagaaactagaaacggtttaggaagaataactgcttctataatgtacctcagagaaagtaagggaactggtccgtagcttcttcctgctagcgaagatgatggcagacacagcctcgctggagttggtcgccagcgggagggcgatgaacgaaatgaagaaggatgggatgtgcgaggcgttggagaagttgtggacagcatcaacaagcgggtctgcgaatgcagcagcaatggcactgccgagaagcaggagtcccacggctttggtgatgcaccagccagggttctcaacgctctcaactgtctcgtcagatctgtccaccagaaggtcgtgttcctgccttgttctctgcagaattcagacattttttcagcacttaaatctctagacgtctgagtcacattcctatatctgaatcttttcgtgtatcgcctgtctaagttatgctacttgatatagattttcagaaactaaagcactagaggaaggaaaatatataccgcatggtaatcagtgatgaacttattggaataggcaccactggtagggacgctgcgcttggcctcattaagccatctcttcatccccgagacaaactctgcctcctcgacgatatcattgcctgacgtgtcaaagtcatccatgatcttgtcaacagcgtcattcttgtcaaagtcaacctcctcaaagttgataccaatgataagtgcatgaagctcagcacgggacagggtttggctctcatccatgtcaatcttgtggaacaacctgcgtgtgaggatatacaaggttcatgtcaagttcacgagctttctgttggcatatcaagagaatcaaaatgtctaagcacccacttttttatgacatcttcattgggtgtgccatcctcattaagcagccgcccgagcgcttccatttgggcatgcctgaggattccggagatcacatgcttgtgttttgcgtatgcaagcttcctcttctgaatccatggctggaaaacctgatgcaaaacgcagaacctaacagtcaaaatctagagacaagagtttccaatctatgccatcgtttcaggaggctcaagtgtccttaaacataattgtgcttacctgataaaggcaataggcaagcacaagcgagaatgatacgataagtgccagcaagacagctaggcgctgtccgtggtgggtcttcaacattttggggaattgagcaatgataaagggaataacagaaatccccatgatccgagctgcatagctggtttggacatcagttgaaataccagtgcctgcaaaagaaaatttgtgcatcttacattcaatatatacagaaccagtaggtcaaagcagtgtaaaggtaaggttaacatagtggtggcttgtggtttttaacatgttaaccagaacctccaaattgaatgcatccttacaaagaagcagacaaagatcagtgtttgtaatttaaactccattctactttaggatttagatgtaacaggatcaacaattatcagaaagactacattaataacaatgttaaatacaagaaggcaatttaccagtcaagctgaagcccttgttgttctgtaaatcaactgcaacgccatttggaccaatgtcacacttgccaacaacaacacaggttccccacagaagggtgagaagaaagacggtcgaaccagcaagcaaccccattccaatcaggacctgactttgtgcggtctctctactcccggacagaccagacactgttaatgtgacagaacaaagagatcagaactctaattggatatagttggatattcagagcagtaaaaggtgagtagcttcatgattgtagcatatgtaccaggagaaatctgttttgagcaatatggatatgcaaaatgtcaaaatctgcatcataccataatacaagatcggtggtcaaaatcagagaactggtttttataggagtaaatattctttttattaatggcacagaagaacattgatgtttagacttaagagtggcagagccagaaacgctaaaaaaaatggttgaagagggccaacagtgctagttttttcaaagtatgccaaagctacagtaaatttagtgtgaaattagaatccatgggggaggacacacgcctgtctccgccctaggtaagactggtaaggtggaaaacaaatactaatagagcaaaatttctagaataatgagttgatcaaatgtagcattatcatataaaaaaggtgtaccagcatccacatttaagtctataggcaagtcctacatcggtagaatacatatttcatttcagatctcattgcgatcaatgaaccatgtgcagccatgctatcatagtaaagtgtagccaaatcagtattgtgttctttttaatgaatgagtacctgaaaatgagcagatagctacaaatttcactaatattagagcaatattgcctattatctatggagaattagaatctttatggcacacgaaaggatttaacgaagagggtttcctcttataaaagtttatgaatcttagagagtagttaaaaaaaacgttaatcactatttcctatgtcgcaaaataagtttatttttcactcatcccacatgtaccaacacaaaataaaaaagactaggatactcccactatatcaaatcccaacataattattacttgtactattttatttttttgctcgctctggtctgcattgcacggtttttcttttctcaaatcaaattccggcagagctcctgccgtcagtttcctcaaaaaaaaaacataattattacctactttatctacttacatttatttcctatttttacaaactccgatgcaatgatttcttaaagataaatttatattgggatagacgggaggagccaaaaatgaacttattgtacaacggaaggagtacttcagtactactacgtcacaaatgtttaccgtgatagttcaagcatgtgattagtatgatctgctattttcacgtgacaagatcggcaacggtcttgaaagaaagacggaaccgaaaaagcataatttctggaaagctaaactccaacggtccaaccactctatccagttgcacaacatgttgcctttcaatgtgttcagttaaactacaataatttggttgcatacaattttacaaatatataatttggaactttggatgtaaaattctatgagtaaaatatcaaatctatgccctattaatttcctctgaggacaaaccatcgtatttgctacgtacaagaatagtacaagataatgcaacacagtaaaagtgcatatcaaagcaagtcgatcacttgatcacatccactaatcagataggtgcaacgcacaaagaaatattccatacaaaaagggtcaattatgcaagaacgtaataatgaaaagtaaacagaaaaggggaaaggtcaaaatgacaggacaagcactggtggaactttatcatgctagcttatctgacacatttcagagaaaaagcagagctcagtagaactaattcctcgaataagcaggaggttaatcaaaaggcatatatactttgctagagcttatactctgtttttcttttcttttgaaatagtagaacatactctggttcagtcacaagactaacagaaactttagatctgaagcaaaccaagaacagacaaatctctaaatttacggatatgagttacttttttacccttcataaacacgcaagattttaccagtgctaattccaagaaaaactttgcatcctcgaatgttaaaaaattcaaaagtttcactataaaatccaaaagtcttactgctagagtgagtgagaagaaagcctgaataagtcctaaacctcaaccagagagtaggcaaccgatcgaatacttgtcggttcatcaaagaacagaagaggctaacgaaggaaacaaaccgaaatacgagctcaccgaggacgaggagcgcgtcggggagggcgccgaggatggggaggaggaggccgccgacgaggccgggccccatgatctcgagcagcagctcactgccggccgacaggaaggtggccgccttgtacatgaggaacccatacgcgagcaccaggaacaggttcccgagcacggtggtggtgcaggggaggaacccgtacgactgctcgcacttctcctccggggcggcggccggcggcgaggaggcggaggcggagttggaggtggtgaggcgtatcacggctgacacggggttggagaggagggaggtggcggacgccgaggccggcgagccgtcggagatgaggcgtccgtacgcggcggcggccaggaggaagaggaggagcgggacgagcgggaaggagcggcggcgagtcgccattgcgggaggcggccggaggcgaggggcttctcgggtagggatgggtttggtgcgcgtagctttatatagtgcgatctgtgcgatatttgatttatgtatttctttccttaattaatttagtaggagtactactagtttataatatagtaatatttttttgtgtgtgtgtggatcaacggcaaggagaggctgtctggctgaagagccggatccaatgatcatatgtacgccttggttaaagtggttcgttatacattccttacctagcgatctgtacgctttaacctttccaactagagtaaattccctttgtactcctgaaaactcacttaattccttttatatctctgaaatttacccgatcccttctatacccctgaaattttaatttgattccttgtatgccctcaccgttacattttccatcatttcactgttacgtttggttgcaaatgtcatttttacccttgatgctttaggtttaaatataagcttcaaaaacaattgaaaattttatttgagtgcacagtatgtgtattttataaaactaatgggactaaataattagtgcagaaaattttgacataaattttgaaaataaaataaatgtaataaattaaattttttatttgaaattttaataggacaatggatttttttatcaggagcattcataaaaaaaatgttgtgaacatgggtagtcctatctttatatgaatgcccctcatttttatgacttcttttaaaaaaataaatacgtatttttctatttcattatctaaaaatattttttgggataaataatacatcgcacaacaaactcataactataatagtctcatgcgagaagcttttatatttttaataatgtaattcatgaatttctttcttcatccaagggtataatagtcatttttatagaaaatacacggtcaactgacgggaagggtatgcaagggatcaaaatcaaattttaggggtacacaaggaagtaagcaaaattcaagggtatagaagggattaggtaaaatttcaggggtatataagggattttctcttccaagtaaccacactcaaacaatcaaactatgacatgttatacatacgcgtataaaaactatggaaggtgcgaaaccatattttggcctattgtgtgcagaaattaccatgagcttaaacattgaaaaattgtgaacaaggcaaatctataatttgaggtttcacaaaagaaaaaaaactagaattttaaaataatgctttggtgcgagcacctgatactacgagagaggaatgtgtggatctttttctctttcgccctcaatctcatcaatccctttctgcatggacgactaggaattcgtgggtggctagtagcttggagttgtggtaggggagagcacctatgcccctattgtagagttatggcgaccaatcacgtataacggtgattagctcgacgttaattcttttcttaagctagtattgagagtcaccagtttcgtggtggcgggttttttctttttttcctgattgtagcatttcagggttgtaattttatttttttaatgctacattaaaatgaaatctcacacctatcttgtgtggttcgtttcaaagagaaaaaaaaatacacgcatcatgtcagccatttctccgctatcttttctctctcttcacctctgatcccttctctcttctctctccagtcttcatccctattctggcaaggttgctcatgcggctacaacacataactataacgacggtggcaataactactagtgacgagcttgaggtggctattgcagctatgatgacgagcttctcacaaagtagtgcctatgacaatgatgagcaatggcggcagtcgcaagttggggcatgcggatgccccgatctggtacttgtgaagcttggggctaccggattcgatggtagtatcacttagggatgctcgatccgacatcagtgaaactcttgagacgctagactagtggtgatggagcttgggaggttcctcctttgtaatacgtgcctagcaataattccctgcaggctgaatggataaaaaaaaagccattcattatccaagcaatataaggcaatcaaacacacccttaatacttttatgatgagcacaggaacttagaatatatgttcaagaaatttgttcctcagctctccggaggatagatcctgaatttcgttttaagagtccatttggctcaataatgtgcataaacgatgcaaaaattatggctcggccgcatacgtggccataactggcaaagagattagctttctaaatcaaactgtgggacccgctgatttattttgatgtttgtttgagatctttggatggaccgtggaggatccagagttcacactgctgccacatataattttttagaatcagatcctaatttctcattcccaaataaaccgaaagttcagctctttgagctcagaaattgatatatcgtcttgctcttctcttttcttgcgaggatagctttggcatttggtcatttaagtcctactatccttagcttcgttgctatataaaagcacagtggtacatgatcgtgactcggtgatgccaacaggcaacaagttatacgacaataacatggcgattttcaatgctttttttttctttctgaagaccgtgtcaccgtgtgtaaagcctgaccccgctggatgtttgacaaaacaagtgcttatagatctgcttatgcactgcattagcaactggatgcagactgcttgtataagctacgaattgcttttataaaaaataaaaaactaggatggtcatgcaacccaccaacaattggtcgagatggacaaataaaaaacaaaggcaaatcgctcttgcaagtgcaaatttttaaacggaggcaactaaaatctactcctatatttcaattaagactctgttcttccctcttctttctcaactcatatctctctcttttctttttttttgttacgtacgcttttcaaactgataaacaatacgatttttttgcaaagttttctatagaaaagttgcttccgaaaatcatattaatctatttttcaagtttttaggctacacttaattaatcacgtgttaataagcaacaccgttttctatgggagtacttttcaggtcactcatgttccagctgattggcgctgcatgtgtccgcacagtaggcaccttgtttctataattaataatttggagtgatctgatcctgaggaatagatctaccactctcatccaacagatcagcaggttcatcagttattttattattattattattaaacttattttttagatcttaacttgtgccgttagtccaggacaatccagtgctccatccatccatccatgtgctatttcaaatctatttacaaataggcgagttatgtatgccatcttagcaaaacacaagtaaattcccaatcccgttggttattcttttcaaaaaatggattgttgttttttttcattatattttttttgaacaattaaaataaaactccctctaaaacatatgttgtttaaaacagttgaattgacctgcgcttagtagaatttgtgtgccaaaaacgacaattaatattcaccggaggaagtaactcgtctatgtaccaactaaagatattcacaaccatatttatgaaaatcaagctttaaatcccaataggtagacttaaggctttgttcgctactcttggttcccaactctcctatctcgttttccgtgcgcacgtttttcaaaccgttaaatggtgcgttttttaaaaaaattatatatgaaagttgtttaaaaaaatcatattgatctattttttaaaaaaaaatagctaatacttaattaatcacgcgctaatggaccactccatttttcgtgcgcattgtttgggttgggaaacagacctaacgaacgcagccacctacaaccccctaccacactttcggcatttccccggattaaaagagaagggcgaagcttagtaccaggatccaataaccctggtgtcctctatatgaaaccccttattacaagaaaagataaaatcatgagaattcacaagtagtgtatggtgagcacggttcaattcctcgtctacgcccccaaagagtttgttagtgcaaaagggttttctaaggctggcatttggttgc

SEQ ID NO: 20276 - DNA, 2697 bp, Oryza sativa
ggcggcggcgatccatcgatcccctcctcgctcccgcgcgcgggcgcgttgacgtaaccacctcgtcctcatcatcatcctctcccgcctcgccggctctcccatctcctataaattccgatgataataccatctcctgatcagttcaattttgtcataatcggctgcttcttcgcttcaattctgtgttggtagcaggcgacgctcggtgtcttagttcatggctcggagggatcagctggtctctttcctctgcttcttcctgatcgtctctgccgtcgccggcggcttgtgcgtctcggccaccgtgctcccgatgcgggtggggaagcagtacgtcgtcggcggccgtagcgggtggaggacgccgccgccggctagcgtcgacttgtacgccaagtgggccgccggcatccgcttctacgtcgccgactccattggtaaggcccccaagctagctataaaacaattcgaacatcgaagaatttgttcttgattcaattcatccatcgatttcatgctgcaaatcgaagagttcgtgtacaagaacgattccgtggtgaaggtggacaagttcgggtactaccactgcaacgcgacggcggcggcggccaacgacggcagcgtgctcttcctcctcgacgcccccggcttcgcctacttctccagcgccgacgccgatcactgcaagaagggccagcgcctcatgatcaacgtcgactccgccccgtcgccggcgcccgccccggcggcgtcgcccatcgcgaaacctcctgccgccgtgactgcggtcacgccaccgccgccgccaacggcgccgttaggctctgcttccccgagccctgcgccctagaagccgcatctggaagcgcctaaacctccgcttagggggggacatgctgctcacgcattgctcctggcctcgatggccatgatgggcttgattcttgcagagtggtagtaacaacagagtttgcattgagctaggccatcagggtgttagttaattaggatggttaattacttcggtgcagtatggaacgtactggctggagcttaattaccgtcgctgaactgaataatttcgatgtgaattagacgattagttgttgatttgtcgctttagaatcgaagaagaaattaagatctctccattttcatgcaaatttctgatttgtgggaagagcttgttgtttcggttcattatacacaccacgtgtcatcaacatctgcaccgtgtgtagggtgaaaacgggcatctcctaggaaacgaagctcgatcgaccggtaattgattatatatatttattatttaaactacttagtgtcgacattaatatgatgcacaaaaaattagaaaaaacaaaatttataaatagataaaaaacgatatggtcggaaactgtactccatatacgaaaaaggcgttttggtcgatcaggaattttcgtgaccgctttcaccctactgtgcggtatgaaaatgccttacccgcatgcagtctatgctagtggtaccaactgatgactaaactaggtcccgatcttttcataggtattgataattctcgatttggaggaaacttgacacatacgatccgacttccgatcaacacttcaaaccctgcaagcgcagcaccacgtctattctagttatcaaccgtgtcaaaacccggttgacctcaccgagaagactaatgactgcatgtgaatcgaagaatacaagcaagaataaagtatagcaactcaattgcatataaataattaagaactcgaatttagggttccacaaaccaaacaagcggcaaaactgcaatggcagaaataatctaagcaaaacccaattctaaattatgacggctactaaataaatataatttaggacgtcgtagggttgctctaggatgcacgctcccttgggcttagcccacgacacaattgcaaagtccaagacccaaatcaaattcgaactggacgaggtacgtggcttgatttgtagattcctgacaagttggtgggaatcttgaagtgtgaccaaaaaccatctgaaagtagactccataagttttctaataaatactcatgggcccggagattccttctagatcagtggctagttccgtttgaagttgacgttgtcaggagtcccgaatccaaatctaaaacatgtagaaatttatctcttatcttatatggaccaaaagtgacgtgatgaggtagaagtggacttggagaaggtgttgatttggtcccaaattaactttttgatcatccatgcattccttatgattggtctcttttccttcacccatataagtacctctctaaacaaaaatatacgaaactcattgtgtagcaatgtttgttcaaatatataacaagtacatctactatagaccatatgtacccttagttgataaatacataaggtagccatgatcatatttgagctagttgtatcctcgtcaacttggacatgggcttgaatcaaaggtagaaacaactggaatggtgcacatataaaaagaacgcacaaatgtctatgttttctttaataatggaattaaatctggcctttgctttaatgaaaatacaaccaattattatagtattctcttaaaaaaagcaaacactcaagaaaaaaataacttaaataataaagccaacacataaggagtaaataattattgaaatctat

SEQ ID NO: 20277 - DNA, 3214 bp, Oryza sativa
caccttaggaaaccttatagtacaataaagaaactttacataaccaatcgtatcaaatttggactccttccaaattagactccgcatcccatacgcacacaatacctccatcgtatgccatatggaatctccatcaaccacgtgcatcaactctagcctaagtatcccgcatgatctctgaccaccacagacgtcgtcttatccccaagccgactcccggtccatcaccgcaaatactctcccgaggcatcgagttacctacacatgaaataaacaaagaaaccatattccgagaccaagttatctccaacttgactcattagtagcaaacaacagtattacatatgtatagtatccatctagaagtcataatcatgaaataatcacggatatccaaataaacaacccgaaaccgaaaccgacacagcgtcggccggtcagaccgcgggctgcgccggtctgaccgcgcattacacgccggtctgaccggctaccagagcccggtctgaccggtcacataaaatgacagcacctgtaattcacctgtaaatccaatcatctccaaaaccacttcgtgaataaattccaattaacaaaaccaataatctccaatgcccaattattcatcacagaataataatcaaaaacacctttaattttacagtagataggtaagttttgtcaggcactgatacggacggaagaccatgataaggaaagcagtatctacccagtcaaatacatcagcacacatagacacactgctatggttcagcgtggtccagacagtaatgatgctgaaagggagatttgattcacccatgattccttcgttgaagattgatgaactggtaacaacaaaattgaaatcgagatcttcctgcacagtggcttgactggcttcatcctccagaaccttcagaacgtacagttgacatcgaaggccttctgttgctatgaagctgaaggcaccacattgcgagatgcatcatgtgcattacatcttaagaatgaagctgcatgtcatccatcctgtggtcaatcatatctaaaagcttgtcatttctggcgctatcttgcaacaagctcatcaggtgaagggcttcctctggctgcgagtgacactactacaaaagtgatttttctgtacgaggccccatcatttttccatgtggaccgtaactagtggcgtctgcaaaaatcgagggtcattttcccatacggctgcttaagtgacccgtatggaaaaatcgattttcccatacgggcctcttaagagggccgcatgtaaaaatgagctcatttttgcatgcggctcacttaagcgcctgcatggaaaaatttttccatgcgggccacttaagaagccgtatgcgaaaataaaatttgaaaaatttaaaactagtgtatctcacccatattaactccaaattggatgatttttttcctaaatgtttctaaaatcatgctctatcatgttattgtgttcttactggtattattttggctattttttcttgtgactttgttttatcaattaaaaatttgaatttcaaaacttcaaataatattttgaagtagtaaatgatttcaactgaaaaagtcatcaataacaaggttgtataactcatcaagatctataacttctattttggttattttttcatccgacaaagtgatttgtaagattgttcacaaaatacacatctcttatataaatataaggggcgaccatctttttcatcaaagatccatctgtccagcaatccatttggcatgtactcataaaccagaagcctgtggttcttctcagcgcagaatccgatcattcgaaccaggttgacgtgatgaatgctgccgatagtctgaacctctgtaagaaactcctctttacgccgaccaacactgtccaaacgtttcactgcgatgttttcatcttctatcttcccttcaaatactgtcccagatgcgccttcaccaatcttgctggagaaatccccagtgactactttcaactcctcaaaactaaactttcttggcattccaggcagatgttcaatattttctccatccactcgttctctgcgggttctcatcctgatgagcagagcaatggagaaaagcaaagaaacagttccaattattatacccactagaattctagtcccgaacgtctttttcataggacgaactctttctgcaaaagtgatattgttcaacttgataaatgccctggagttgtagaggcttggtgctgtagtctggagtttgtgcaacgagaatagctgtgactgaaggaaacatgtgccgtttgtgtcgttcatcctgagcttgaaataagcagccttgcaagaacaattcgctacgcagcctgaaagacaatctgatcgcgtcaccttgtcacgcatgattgctccagagccgttgtaattgaagtacgtcacatttggaagctccaccatttcaatacctcgtacatcccggcaagaaatcggcgtcgccagcttacatccgagacctggccgatctctgtagattggagaggaatgaatctctgatgggcaactgcaattcccggcaccagagcagatgccatagctgccacaagccatcgggtactcgcagtcgccgccggcgatgtacttctgtagcacctcgtacatgatcacccacgacgatgaattccacccgtagagcctcatgtgtccatcagactcaacacggatatactgaactgaatgcgccacgggcagcgagatcaggatttccgacgaggaagaaggcgaccgtccaaacgcagagatgctgaccggagcgtccatggtgtttgcaagcgtgtccatggtgtcactgaccggagctgtgaagtagagctgggaaggatcgtgtccaacgaagccggacatggcgttgttcccgacggagacgtagagcgagccctcggagaagtcggccgccgaggcgttcgccgtcagcctcatccccgggcggaggtactgccctgggagaagcacatccgccgggtggtcgaacgattgccagacgggggagccactgtcgtcgaagagcactaggttgccggagtcggagaggcgcacgccggtgacggcatggccggccgaggtgttggtcgaccagacgaacgcgccgaccgcgtcgcggaggaccaggtcgccggcgtcgctgagctggagcgtggcgttgtcgcggaccg

SEQ ID NO: 20278 - DNA, 1128 bp, Oryza sativa
agaagcaggccaagttcgcctacaccacgcagcaggtcaagtcctgcatcctcctcggcctcacctccaaggccgccgccatcgagcaggccgccttgttcaagaaggccaacctcgcctgccactacacctagctacccatacctcgccgccggccggccatctctccggccatctctctctcttagctagttggtagctagtgtcgtcatggtgttgatgatgaataagtccttgcatggatgcgtcgtggcaaaccatgcgtatattattcaagaattgtgtgagtgttcagatctgacctcagctgtggcttgtgtgcgtttgcagttaaattgatgaggtgcacggcgccacgacgacgtctcgtcgtcggtgcttagttgcatgctttgtttgcttttcttagtttcttggcgatgtacttattaagagaataagatgagtttgatttggttagtgatgaactggtctctgcttttacctaagctaacttgcacttgtttcttccctggttgcttggtttctttatgacgagatggatgcaattaattctgtgtacatcttatttcaatttgatattttactcttctgtgaatttacagttggtttttgcattcaacggaaaaaaaacaacagagtttcaaagatcttgtagacatacaagtttatatgttgaattgatttacttaattgatggcagaaaagggttgctgtagattatctttaagaaaaaggtacagtaattattactactgtaatttacagtagtcaacacggcgagctgtgttgtcttgcggccgtatatgagctaggcacattattaccttactgctaatactccctccgccactaaatatttgacaccgttaacttttttaaacatgtttgattgtttattttattaaaaaaatttaaataattattaattattttcctatcatttaattcattgttaaatatacttttatgtatatatatagttttatatatttcataaaagtgtttcaataagatgaaccatcaaacatattaaaaaaagtcaacaacgttaaatattcgagggagtacattattagtcgtcgcctaagaacatgagagcagagactataagcacgtcaaattaat

SEQ ID NO: 20279 - DNA, 4462 bp, Oryza sativa
ctgatgtctttttaaaaaattaaattatactcgatgatcaatctagcgtctaaaattaatccacaaaggctcgataatttcaatgtgaagatatcgcgtatcacaggaagatgccaagtgatcaggacactgatggatatggagtacttcctgtgtaaaaaaaaacgaatttaggactgtatgtgatatatttttttattgtaataggatatatcaaatctactactatattgatttttattgttattgggacagaaggtgtatatatcctaggctggcctagaaaatataagtgtcgtacaaggtgtaattgttgagatctgaaagcatataggagtatatagcatgtagcttaagcccaactgttcggtctgaacacacattatattagatctctagctagatatcatggaaagtctaaaggcgtagcaattatgctccatcaagtcaaaacaagtgtcaatcgactgcatataaattattgtgattataactgctagctacactgcaacagtgatagtacttgatacacatatagccagtacaagcttgctagttggtagtggctatttactctgatttagttttattatgacatcgtcaaactaagcagggccaaacatatattatggcaacattcaaacagtgcaaggtactgttttatctattttttctattaactttttttgacaaccacagctacagaaatacaaatagatgctgactgggaacctagtgctggtttttctaaccgacacataggcgtcaattatgggagaaataaaaagtgccggttttggaactggcatctttaaggttatgttaacgccaaaatttagtaagattgtttagtggattcggttaaggaatcgtgaagacgtggcatgacggcgtaattctatatattaattaggcatgatttagtagtttccttttatctttagaaaagtgtgtttagtgtccgataagaactttatatttttccctttaatctttaggaaaatttatttcttgtttaagaatgactcgtatctacccatgggtataagtttgtgcacccggggtcattgtaaactatctccgatcaataaaaatactctcggcgtatcgccaccatctttttcgaggtttttacttatcatccggtgaaacttggcacctgacacggggctgcatcagctttcgatcttcggtgaaggggtaagtcctactgtttgccggcccagacagttgtatcggctacattggtgttgttcaaggcttcatcgcttcgatctcttgcatcgctctggtttggttagtatatttgcctatctatttatcatatatcttagttaatctagtttgatagctcgattaactgtataggctgggatgtgctttagggtttttgccggtatcggctaaattgctttgccagattaggttagctaagactttatacttcttagcatactttgcaatgcatcattactagtcgtgcttagaatcaaaaggctaacatatctttgattataataagggtttcatcagggtttcagctgatgagttatctggatgttgcatcggcttacaaggattgcatacaagttggttttagctgatcaaaacaaaggtttcattgtttatctgacatcgaaccttcagtcgatgtatgctttaatcatcggatcatttattctatcatattattataagctggttggtttctgttgaattatgttatattacattatcatcagctgattgtctttatattattatttactcaagtgtcaaaatatacattggatatatagccgattgctcaaaaccctaccgacatcggctggaactactccatcggcttgtcaacggatcggctatttgatctgttgtttacatatcttctcagttgcaggattaaatagattggcacgcctgcatctcatcaaattttggacttgcaatggagctaagaaaatctcccaggccgttgtgttcgttgacttagtttgcgccaacgcgccaacacagttccaacaccatcgtctgagcatggaatttttgtcaacaggttccaagaataaaaaaagtggtccgatgcttcaagcaactcttaatcacccatgagatcccatccaagtacacaaacatccatgaacaaaatcaacgagaagtcgccgccactgccagatccgctcgccggagaagtgccatcgcctgatccgcatacgggagcctctgccactgacggatctgcccgccgttgccattgccattgttgtagccacccgcaccgtcagagaggggaggaggggctgcagctctgaagaggggagaggagggaggtactggagccggagggatggcgtcggagaggaggcaggaggggcgggcgagagagagggatgcgatggaggtgggcgagagagcgggaggtgaaggggtgggcgagtggataaggatgaccatgggctctctccctttgcactacaaaggagagacaaaaaaaatcctggctaggatttgatttttacttaattggtacttaggtgtcaattcttttttaaaaaaccggtaccaatattattggtgccggtttttctctataactgacacatatagttgcttaaaggtgtcggttttaaatgaatcgatacctatgagccattccctatttgggattatgtagtagtgaacctacatttttttaaacccggccttatttttataacccgattacactgttgtattcgctgcaattaaatatttataaaaatatctcacatgattatattctgattaaagaaatatatgttgtaaattacttttatcatatatatttagattctatttaattacttcttaaaaggtaattaaattcaataaagcctagctataactaatttacactatgataaaagtaacttggcacaataaaaataagttatcacaacattaaaaataaatctgttgatacaagaatcgagaatgctcgggtggcggccaattatttttttgtggggccaaaatgatactgtcctgggtggtctgtgcccttaagaaaattatggattgtagttgttggggtaaaaacatgcgtatatataaaaaataaatcaaatcaacacaattataactaactaaaaactagaactatattcacaactttatgaatgtataaaaagtaatttaatcaaatctaaatataatatacatatatatgataaagtaatttacatgataaaattaattcgcaaaacacatatttatttcattagaatataattatataagatctttaaggatttagttgcaacaaacattatggtataatcaaaatgtggtgtgtatatatatatatatataggataaataaattttatttgaagactaagtatagtgttaagaatatttttttttattaatgccttcatactcccacgtggaaaagggatgcgtattattttcgttatttattgaaatagtagctgtttaaaactaattattggatatgctctgtgtagttatgtccttgactccttgtacgttctacatatgtccaaccaaaccatgcaaagaaaacttaagtgttgtcaatttggtacgctcgatcaagacaaaattagctatcgaacaccgtagttttataagacattctgatgacttaattaacatatgacacactttgtggcaatttgctaaaacaccaccgctgaaaaacccttcttcactcccgattcgtaaccccctttaatctatgtacgtatccgggaccccaaatctgagactccatctctagtcctttttttcttttttaattgtttgttgctgtttgcatattgatttctaaccaaactccacgataaaatcatcagcattcacataaacattacaaaatcatccacagtcacaaaaatcatccacatccacagtcacaattcacatcacaaatttccagatccaaagacatcacaaatcaacaaattcacataaaactaatctaacacttaaatcacaaatcaaccgccaccctcaaccaccgcgttgtcaccgtcgccgtgtggggccaccgctgcccgctcccgcgcggggccgccgccgcttgctctctgcaaaacagccgctcactctctgcaaaatagaggttaatagagaaaaagaaaaggataagagggaggaaaaagagagtggagagaggaggaaagggaggaggaagtgtttgcgcgcgaggaggagaaaatacgagcaagggattatataatatgcgttgaattttagttccagttggtaataacaactgggactaaagatagtaaggggccggacgatttctaaaccgagactaaaaatgatctttagtccataaaagtgcgtgcggctctttaaccggaaaaaaatgatttttaatcccgaatcctattgaaattgggactaatgtggttttaggctgacccagcaaagatctgttctccagtaa

SEQ ID NO: 20280 - DNA, 4612 bp, Oryza sativa
ccgccgtcccgctcagctgccggccaccgctctccccctctatcgcctcgcctgctcgagagaacccgaagagagaagataaaagaaaataaacagagagaaatgtgggacccacaccattttctcacttacacgtggacctcacataataattttaattacttttgccaactaggatgctacgtcagcgaaacccggcctatatactgtcttgggaccttttatgcacggttttacatagttcagaaatacacatttctgattttgtggttaacggaccttaaaaaaatctcggtgtaaagttgagggacagccgctgaacttattcctcctatttatagcccacaaagcattggcccagacagccaccaaatagtgaggcccagaagagagcggcccattcgacacggtcaggcccacgttgaagcccaacataaagtgggagtgtaaagctcacacaagagcggcccaatgggttcctcacgatgaggacacatgtaaatctcgtccaagaagagaaagttcccagtaaaagccggcaactagccgacacctaatggcagcagaaaagtccatttttacacccatgaacttttagatcaagtttcagtctcatcccttaaccacgaaaccggagatgtaacattctccaactatgaaaaccagagtgtgcacggtctctaacagcagcccaatttgaaaccgaaccaacaaacagcctggttaacacgtctagccatgaaaagctaggccccatacactagcttgattgttctgaatggattaatagatggtagattatatttgattttgtgatgataatcgatgtaaaagcgaaagagagttaactattacccgtataagttatattggcattattccatcttcaagtttaactttatatatacaaatacaaaacataataacagttataacacaaaacatatatcatatacaaatatactactccctctgttttagattataagtcgttttgactttggtaaaagtcaaattacttttagtttgaccaagtttatagaaaaacagtaacattttcaacccaacacaaatatattataaaagtatattcaattataaatttaatgaaactaatttagtgttataagtattatactatatttatccacaaacttgtttaaacttaaagtagattgactttaactaaagtcaaaacgacttataataatatgaaacggaaagagtattttatagtggatgaaactaatttagtcgtctagatcttagtacgtttcatcataaactaaaataacttacaatataaggaggatgaagtacacagttgagaagctatttaaatctaaacaaagtattacaagcaatttaatttaggtatagactacagttttgcgaaaattgaatcaaggccttcgagcaatataatcggtgaaaccgacgacgaggtgctgggccaacaaatatacaaaatattattgtgcatgtgtttgtctttaaaaaaaagttgagtactaaaaaccagtgcaatttgaaggagtggaaacagctataacagccagcgagagaaatgtatatcaacagaaaaaaaatattataatgtaaaaaggaaagacaatatcaaagtaaaaaatatagagtaattaaattgtatttatggtataacaactcgtggctgtgatttagtacaataatttgagaagtgaatattcaagtccaataacttgacaagtaggcacgtacattttagtataggaagttgacaatttatagtattttggtgtaataaataggtatatgttgttttggttaacaagtaccgggtgagttttatcacaatgtcaatatgtcatcatatagcaatcatgtggatatatataatcttgaatttaatccataagaattacactgctcattctatttacaccttagatttaatctataagatttacattgctcgattaatttgcatcattagtttggattttttttcaccttcctatatctcaaccaaaatataaaattttcaacgtagttaaatttatttgactttcaattactagaatgacaaaaattatgtatacttatacaaatctatgttatattgataaaataagttctaaaaactaaatgtgtcgacgtttgatgtcgcaattccggtatttgcatagtatggggatcgttggtaccaggatatatgcgagacatatgtaaaagagacggagacgaggatttttatacaggttcggacccctgaattgtcaggtaataaccctactcctgttggccgaagccggtcgttgctcttattcatcataatcacaccggtacaatatttggggtagcctatctaactgttgtcgacttggcggccataaaaccatcccgtaatcgacaacagagtagttttcctccttgaatccatgttcggcgagatcagagacatcgctagatccctcctaacggttgtcgtaggaactgtatggggactaactaggcttatctccgatgtcgatatccggcggcttgtcttggcgtatgttggcttatatgttgatcttgtgtcttgatctattgttctatgtcccctctcctctttgggggtcttgtatgtatacccataggtgtccccttgtccaagtagaactagggaaaccaatatggatacaatccgagtagtacttatcgcttccatatagaactctattcatcattccttatgcggaagtcctcctatatccgacagttgtttccatataagacatggtatgtggtgggtcttgccgagatttagtcaactactattaggtatgtggtatctataaccctgacaaaatgaatacagaaaaaaatgcttgaaataattaagttgttacaacgcttcaagttattgtagcaaaatcatacccaccttgtaagttgttgtaactatatgctcacttcttaagtccttgtactagcaaataacttggaatgcccctttgatccatcggttcaacaaggtttttctcaatgttgtgtgtgcttggaacattgatcacacctcagtctttgcatgcttttctcccatatttggcatacgaaggtgcggtccttgaacagatgatgtgttatttcgaggttgctagcaaaagtaattattgggccattgctagatttgcagccggtctgccgtctatatcttattttgtagttggagctattcaaaattttgcattataaaagtacccatgctttccatattagttttgtggccactggatctatcctcccattgaattgtgctatgtatgctgactttgcactatactttgcattgttcttccatcaccatctaatggtgtcatcaaccctttctgctaggattgttgacgaggacatcactagctcaaatatgaccatgtctaccttttgtattcatcaacaaaaggtgcttgcttgttatgtaggatttagtgttatatatttgaacaaagttactgcaccatgagttatgtgtcttcttgtttgtagaaatacttgcatgggtgaagaaaagtggagcaggcatacatagcacttggatgatcaatgaagtttattggggaccaaccggttgcctttcccaagtctattcacatgttaccgcgtcacttttgatccatagaagacaagaggtgaagttccccatgttttagattcaaattcgggccttttgacaagatccatttcaaacgaacatagcccttgatctagaaggattctcgggacccatgagtacttgctagaaagcttatggagtctaatttcatatggttttggtcccacgtcaaaatttctcaattgtcaggaatatgtaaaacaagccacgtacctcattcagtaattttattgtcgggtacgtgtaatgccccgattttcgttcgggattaaaaatcaataaataaatcatttctagaatttatattaaatggtaaagcaatttaatcaagtgaaatattgaggaaataaaaaatttcctttaaaaaatcatggccggaaatatttttgtaatactctttgtgtcctaatattctctctagattttttccgtgaattttcggagctcgagaagtaattttaacatcacaaagttcatttaatcaattaaattaattgaaaaaaaaattaaattctcctcctttcccttgggccaactccggcccaagtttccttccgctcgggccggcctccctcctctctcctcccttgcctctctcggccccggcctctatccgggccgcccgtgtgtccgcacacgtggccgcctcgtgcgcactacatggtgcacccactcatgcctccgtggacttggtccacggtgggccgaacccccttagtcaccgacaggtggggcccgcttgttggcgccaccctttttcccctcggtgacgtcataaatcaatattaattgcgcaataattcgagtttaattccggaaattcatttaaatggctcaaaagttctaaaattcatatctaattcatacgaacttcgaattgggccattcaacttgccaaattcatccaaaattgagctctacatgcttgtttactttttatgtacttttacttggtttttattagtgttttccggg

SEQ ID NO: 20281 - DNA, 3579 bp, Oryza sativa
aataagacaaatggtcaaacatgtgctaaaaagtcaacggtgtcaaacattttaaaacggagggagtatatcattggggtcttcataaacccaaaaaatgcactagtagtatttgtggaacggaagaacacaatcgatgcctggaatctcttcttttggtaattggtcaatggtattttcgtacggtgtagtgtagcgtgcttgactttctttttaaggccaaacatatattgttcaggctggcatatataaaaagtgatgagaaattctagcttctctttcttcctgtcaaagtgtaacgatggaataattccggcatgcatgttaagatggttagaactcaaaatggacaaaaacaaaatgagctctacaattatatattcagataacttcaaattcatctcaagtttggctcagacaatatataatcgttctcttcccaaacaaaacggggcctttaaacgacacgagttgagttcgaagaagctggaggccggagatacgtacgattccgtctgtctcgtggctagctcatggcatgcgggcatgcaagcatacagtggacgcatcactgctctctcttttgcgccacctccctcgtgatctgttccccctatctgttcatatgtctctcactctctctgctgttgccagatgaagctgatggcaatgcaaatgcaacttgatcagagaaaaaaaagaagaggagctatgcatgaaagacaccttgagagagagagtgcaatgatggaaaaggaaagagcatcgggatgttgtccaaccgggcatgggggttgggttggatgggatccgaaggagcacactagcgggccatggaccatcgtggtcggaccgtgaaagtgatcgatggcccggttaattcactcactctgcaattaagccgtgctcgtaccatttgtactacgtacctagctgcaagctcgttgttcatatgaacaggttccatgaacttgctttaacttaccaagcagtactgtaaaccgtctagtggtcgaaggcctgcctttttttgctttggctcccatgatgatggatggttgatttgtatatatagccatgcttgaggtacatggaatgtggatcgacttgcacgtattgaattactaatcactccggtagtccggtctaaaacacaattcattttatatatcgatctataacacgagttaataactttcacaataaattaaaaatcatttaaaatataggttttatagctaggtatatcaaaatgatatattcaaatatgtgctggtacaagagttttcataatatcacacttatatatagcataacttaaatttataagaaccagctggtagtcaaagttggctacccacacaaaatatatttctcactccggttgcttccttggtgaaccagaaccttgaatggccatgaaggtaacttgcatctgggtgtgatgctatgaagtgtctccatataatgaagattaaatatagtccagcaatcaattaattggagcagggagtaaaaaaatatgtatatatacatgacaagtcaaacttttgaaacctaattttgagcaccaaaatattttaaatatttgatataaaaatcacaagtctacatttttgtatcaaaaagtaatgtatatcacaatattttatatttcttttgagctttagtaggagtatattataagaaaaaagtatgtagttgttcgaagttgcatgttgaaaattaatttggtgtgtctgaggcagtatgtttcataaagcagggaattagcggccgccaagtccattaattaaaaataatgtatatcagtagtcgttggatcatgaaaactcaggaagaatttagaaggcacctatatatgctcactagctagcttgtcatgttttgtttgtcagcatgcacccttgaaacttgacaaatggacattaatctctaggctggctacacacgtagcctttggctaaatcaactttatcttgtgcaatagtataacagactatggtatagtagatggcttcaggttaatccttcgttgacttgttttcttaatttttggggataattgcttcagcttgtctgaaatctctgaatgggcaagttagtcgtacgtgcacgtacgaccgatgcttttcaatcgtgtttgatcacggagacagtatagcttgtggcacagagtttaaaatgtacactaaaatatatttttggttgagctcccaaatctacactaaactagtactcctagctaaacctatctccgtatagctcaccgttgccaaacaaaaaagcttcagcataaacataccaccacactacaaccttcaggccacttcccttttcttaccttttcccccttaactgatataaaaaaaatcatagcataaaaaaactcacaagagaaattaacctcactgcaagaaagagatattccccaggaaaaaagatagagaggccttgcttagatccaaaaaattttagccaaaaacatcatatcaaatatttggacacatgcatcaaacattaaatgtgggaaaaaatcaattgcacagtttgcatataaattacgagacgaatcttttgagcctaattacgccataatttgacaatgtgatgctacaataaatatttgttaatgacagattaattaaacttaacaaatttgtcttgcagtttatagacggaatatgtaatttgttttgttattagctcatcatcaatgcggtgcttcagcccgtgcccctagcgacggccatccgcttttccgtcggcgtcatccctctgcgagagagcgcgtccctcagttgggacacgcgccccccacctccttttcgcccaggtgccgatggaagaaacccgttgcgtgggtacgggtgcttgaggcgacgccccccgagcgaggatttcctcttccacccctctcccctctcctcgagctcctcggcgacgacctggggacgaaggaagagagaggcgtggcacggtggcggcccttctccggcgacgggagagatacgcggcggtgagagggcgaaaggcaccgctcacctgcgcctcagcttcctccgccggcgccgccaccatctcctccccgatctggccggggggagaggggggggccagattcgcccacgaaggcggggtcgacgacggcggtggggcagggaggtcgtcaacggcggcacggtggggagatcggtgacggcggcgggacggagtcggcggctgcgaggagccggcgcgggaacggggcgaggtgcaccaggctcgctcgccaagtcctggcgcgaggcggagaggagagctcgcgtggagtcctgcgacggcgacggcaaggagaggagagacgagaagcggaggggaggaggcgagtacgatggagacgagagaagcgaagccagtttggtagatactagagtaaatgagagggagagagagggaggaggaggaggataagagagggttagtataataaaataccttcgtggccttttaaggttagggacacttgttgggccgctagaggtatccttcattgtaggggtagttgtccggcatagagtgtcttttatttagatgccc

SEQ ID NO: 20282 - DNA, 3005 bp, Oryza sativa
gtcgttacgtgctgccgcatctcggaatggttttgttttttttttttgtttttttttctttttgggttgggttgggttgggtagttcaccaacgcaggcgccgtgtccgctgcgaaccagaattcgggatcagatttgtttcggttcaagcgtgtgcccgaacgggatttgtgttttttttttgggggttagtggaatcacggaactgggggtggtggatcgctggatcagtagatggaactcactgctcgggacttcgacaattgcagcgggggatccaaaatagatagtgacatatttgtcggttcttggtgaaatcgatccgtcaaactagcttcctcttcttgggtattgtatatctgatatccagagtggttttgttcacctttcagatctctgcatattactatactactagtactagttagtgtggaaagccctgagttgactgaagatcacttcatcttagccctgttacacttggttgcagtaataacctgacagttgaaggtgcacactagcaacttaccaaccgaatgttggacgtcctttgtttttggcttctgattattatatgtattggtttagaagtcgcttacactgaaatttccatgtcatatgtgctctttacttactctattgttgcttcaagaaaggggaattgtgaggtgcatttaatattcatgctgacctcaagtgtggtcttagcaaccaatttctgttactacctttattttttcccatttcactgtgtcgaagtgtacaatgtatctgggatattgtgttttagttttgctaggccttgtttgtgctgttagactttctttcgcccattttgaaggcatgccagagatttttttttcccttctaaaattgaatatttcgttctctcattcgtgccaaaggcaaagagcatgttcttttctacaaactgctagtaaatagtaattgcttctatgctctcactagacctttagatccaatggttgttacttcagattatagaggtactagtctcatgatattcttaagtggagactaatctgtgaccaatcccttcttcctgattgaaacgcctgaaccctggcaattagaacttgacctgttctactagtcattgttacctcccattatctgaaagacttaactctttgtatcaaatgcaagtctttctctagtttgtaacaacatggatggaaaccactctctgaaatgctaacatgttattcattcctactttagatcagcgtttgtaatgcttctgttcatatcagaaagcaatccccagatgctgtgtgccatgcatgaatttgttgaaatatagagctctgtgttgtcagaacagtctaggagatgtggtgagccctgtgggcagtgtagtactaagactgagagttggttatttacttatttgtattcagtatggtccctcttgagacagtttgattgggtttattagcgactatgagcacatagctatagtcccagttatattttggttgtagtcgcagcatgtaattggtagtcttgacaaggataggtgttttatccacgagcatctcctgttctctatctttgcatcagtacataattcccctcaaagtagctttcaaaattccagaggtgtagcatggaagcacttctggttgacactatactatccaactactaattatttgtaccatatgtaagggtttactaattgactatatattgtctattatactgatataatagaattgaacagctcataacctgcaattgtcttttgccttttttagctgccgtaaacatgcttcatcattcgaatagccggcaccaaaggaacagaggatcaagagtcaaaacattactccaggctaccttacttctaggtgttgttgtctggcttatgtaccaggtgaaacattcctatgataagaaaaatgagtacttggaagatgctgagaaccagcttgcccatgatgatagaagcatgttccaggggaggaaagaaaggggaggtagttatggtgatggcattctggaaaagggtggggagaaccctgatgtagtaagcaaaccagacgaagagaacattggagaaactgtgtttgagaaagacaatactgactctcatgatgatgatataagaaacactgacagatcaaaagctggtgaagggcatggcagtagtgcagatgggaatacagaagctaatagtaatgatgaggatggaacgaccaatcactcagaaggagagaagagtgacgctgagtccaattcatctgacgctgagagtaaaggtgaagaccattcaactggagatgatatgccccaaagcaatactgtcctagaggaaagcagtgcagagacgaacagaatgccccatgaagaagttgcacatggtgatgaatctactaatgaagatcagtccaatgtgaaaagtgacggatctaatgaaaaggaagctgagaaaaaagaggcagtggattctcaacatgcttctgaatctctgtccgatgatgcgaagggtggaacagatgatgagcattccagtggaactcttcctgatgaaacaggtaatctaccatcagggcagaatgagaactcacaaagtgatgcgacttccaccacatctgatgcttctagcgaggctgttcacattgagactggatctgagaatgaagatgcagcaaaatcatctgggactgcatctggtgatgatgacaagggctcagccaatgaggcatctgattcaaacgaaacaaaatctgatgaaggcaatgtggcagcagaagtttctaatgaccaggctgcaaacacggaggcagggaactcccaagaagcgtctgctgcaaagctgcaaatggctcttcagaagagaccaagcctgtggagaaccagaatgatgggaatacagagtcgtctaacaatggtgagcaggtggatatcaagatggaaaccagtgcttccaccaatgccgagcagaaggaatctcaagtcggcgatggcagctctgggtc

SEQ ID NO: 20283 - DNA, 7556 bp, Oryza sativa
aaattttatgcagcagaaggaatttggactactcgcagcctgaagaaagctgccatctcatcagcatgttgcaggagaaggccaaaaataaccagttgatggaccttatcgatccatgtttctttgatatggaattacatatggatgatgttttatgaatgatgaatttagcaatgtggtgcttgcaagtcgataacaatagaaggccttccatgtccatggtggtcaaaatcctggaaggtaccatggatgttgaaactgaacttgattttgacctggtaaacatagacccgatggtagtagcacatcgagcagctcaaaggaacagtattactttgcaggtagactctgtcctttcagggccaagatgaaatacaaggagctcaaatatattcttcaaagatatcaagctcaagattgaaaacacgtactcctgttttcctatactatggcatttagataaacaaagatgtagacatgtagtgatgtactatagtgataatgattttttttctgttctccaatgcagcagctttatatacttgtgatgacaaacatttgcagttgcaaactgtatggtatctgttgctaggaactggaagatcccagagttctctctttagataatgttcccagacatatatagtcatagataacttccaatgtctgataatttatattaagtgtgactctggaaccatctctttataccttcttgccttcttggttcactgaggtattcgagctgatctcctcataattgtgaatactgaaaagtaacttgttgcggcgctgcaaggatgctatacagcaaatttcttgagtaactccacctgtaggaatttaccaatatatctatttcttgattgtttgtttaagtcatgaaactcttataatctactggtaaaagccatgagtggactggttgtcgtcttgccaactagtcagcatgcatatgctccagcctccaggagtccaggttgtcacattattgaatgaaatacaagtcattttcagctgattgaataatatatatagtgttaaaatcgagagatccctagaaaatgatcaatagaagtatacgttattatagctctacatgcatttgaaatggctagttcgacctgtctgaaattcctgtgctaccggtgccccctgatataggggatcgctaatgggcgggcgatcgttgtgggcgatcacccccgttccctccctgtcgggtcccagaactaacaacttggatccgacataaattaatatatcaatccctggatcagtaaatatcgatacatacaatataactggttcttcattgcatacgttaaagttttacaatactaagggttttacaataatatgtactcatctaattgatcagctaaaattaatatacagcggaagtttttatacattctgactagggaggtataacctttagggattctctaaattatcggggtcatcgtagtaatagtcataagggtcctcctcttgacctagatctgaaaaaggggttataagagtaaggatgagtattcataatactcagcaagttatcatgaaaatatattatgcattggcatatagtagggttctttgcaaaaagcagaaataaacaatctggaagagttatagcaagaatttataaacgtatagactttatatttctaaccagggtaccatatgagtcccggtactcaattccatgagtacggctattcgaatagtttcaaagatattccactgcagcagatgtacgttttacccgcagttcacgacttgttgataatcatcggctttagtcatggcctagtattaattcattaacaattgtggcacctgttccatgaacttatatcctcatatgccctgaacatattgttaacagcagcaagaggagttctggcgttcccgaggtatttaaggggaaatgatcgtatgacaccacgtcatctcgatcaaggcttataaatataccatatagtttatactcgagtatcacaaaccatttacctgtacatggtaatggttaaggttgcccttcgcggctatagttgcctcctgcgcgaggacttaaaaataagaaccactatacataggtgccatattgctaattaacataataactatgtctgtccccattctagaaactgcggtcaaactcgttcgttcgacataagttcctggtaaaacttatatcgatcgagacactactagccacccggaaatcaaccaaatcttacgtactgtcctaatctaagtataaggtattttaaccatattgtaggcaaagtaagcaatactaaattatctgggtttctatggttgatttatgcatataaaatagaatattgaatagaaggctataaatgaataatttgtaaaatataggcttaaatgaccaaaaggtatatggtaacttgccttgctcgatgtcctgagattgattgatattatctattgagtcagatgaatcctcaagacctagggttagacatataaaattcaatttcaaaaggaattcaaattaaattcaaaaataagaaaaataaagaaaataaaataaaatgtaaaaatagcaaaaaggattcaaaagatagagaatgattttagaagaatattggtccaagtttcactggaattggatttatattttaaaagatatgggcttctaaagtttgaaaatcaattaaatgttaaatgttactgtgtgtgggtcccacctgtcagtctctctctctctcttctcttcttcaacctccggccgatccccaaatgcagccggcggcgctagggtttgggattgtggcggtgctaaagggggaaaggggttgtggccgaggaggggagggagctaggattctccggcgacgacgagcggcggcggaggggttaatttggtatgtggacggcctagcggctagggcggcggtgacatggttaggccgtgaaggcgattgggatgatgtgagttagacatgctaggggaggggttctagagcatctatggagtgcttagatggattccaacagcttgccgacctttggcaaggcgcggagaatacttgctgacgagcgcctccattggcggcggccgtgctcacgtcggtagcccagagggtggcatgctagtgcaaaccgattgcaaaaatggactctaggtagtatgtctatggttgaaacggaagaactcaccgagatcggttgaaacgacggattgcggccggaaaaacttcgcggtggcgaagaacagagcaacgcgggggcggcggtgctcggcttggtgcggcgaggtaaaactcggcggtactagaacatggttgatataaggtgttctaagggatatttagggcggaggatggatggaggggtgtggtgtcgatcgcgcataaggtgttcgatcgacgggagaaagtgattgatgagatggattggtgaagcagagcttcggggttgtggggctatggttgttgatgatcgataatggacaaggaagggattgaggtcctatttatagggctagaaggagtagatgagctcgagcaccgtcatcgccatggatgagctcaaggattggatatggctggggcgacaaaggctgtgagacggcgggcaagatcaatttgagtgatgggaggccacgtttgaatacttaccagcgaaggattggcttgactgcgtgtgaaatcggctagcggcgtgttggcgccaatccgggcgcgacgcgcggtggcggcgagggtgaaaacggccgactcgggggtggatggtttgaattgtgagaggggaaaccaccatctaactttaatctaaccgtgcggcaagaattggcgcgattcaccacgggtagaagcgaaatcgcactcggcggcggcttggacgggagcgcacggcgtcgagcggcgattccttgcggcggaggtcgtcccggctttgttgtcgtcaagattggtgcggtggcggcggtctgagggcgtcggacgggcgacggcgtgccaaggcgatcgggcacgcgcaagcggccccgaggctgacgcgcggcgactcggtgcgcggcgaagtcggacgccagggcggcgcgtgcaaggggaggagaaggccaactaaaccacggtttttgagtgggatgtggtccccaaggatccagcatagactttgcaaaggattggatagggattgggctgagttagtcgagctaggcattctgccgaataccttgagggcaatgaacagtgttttcaggaatttttgaatatgtccctaggaaagaatgaatttaatatatgaatttggaagggttttactagggtttggagtgtagcaaatactcactaatattaaggtaaactaaggaaataatctaaagtttaaaatttgagagaatttgctgaaattcactaaggtttggaataaaaggaataattacggtaaattagtagggttctaaggaagtaatacttgaaccaattaagaatcaaatagatttttaaagcacactaatttaatcaaaagccagcatgatgcagtcaaattttagtttaaaatttgaggatgttacactcccctaaggccctaacacgttcctcttcccttcttctcttcctactacaccataaattaaaaaaaagtaaaaaaaacacaagttagaaaaaaaataaaaatagaaaaaaaaaatctaatactcttatttatgtgcatagactctatacttatgtatagactttgttgtcgagtgacaaccacgtcacgtcgaagaacgtgggattgggtctggtgttttgaacagtaaatggtattgacttaataaaatgtttgggatccccctatcacatggcactaggggctatttatagccctagtacaagctgttactctctagggtttattgtttacaggagattttacatgaataccctcatgacggtgacatctacaggggtaaccaatgtctattgagttatgggcctgctaacagcttcctcggcctgccccaagcaagtggcgaacaaccttctcggaccgatcccgagcgaagctgcatcccgctctaccgaaaggggatgccttcatacttcgccatgagcttcgccatgtactttgtcttcatgcatcgccatgggcttcgccttcatccagacttggcttccggtcattttatagatccctgatggtttcggcgggttcgggcgaaggccctcatgacatgcctccaacaaactttatatcgtaaactttgcacgtataaactttatgtgtgtgtgtgtgtgtgtatatatatatatatatatatatatatatatatatatattatttgaatcgggtatataaacttttgacttataaactttagctgtataaatttactaaaataggaaagtaatgcggtgccaaaaaagtaaaccacgtgaagaggggcctgatcgcgtggggcgaacaatcgcccattaggattttcgcctgatatagggataggcaaaccacaaatttcgaaccttgcactgcacccgaatgctggctgaaaaaggaaagaagatggagaagaaagggaggccgtgtgggcctgagggagaaaaaggaagggaggtggcccgagtgaaacagtgtctctttttattttccatggatttgtttgaggggtatttggaagatttgatatttgaactcacaaagttctcaggatttgaaacagtaacttcataggctagtattttgatggttttgaattggatttgaaaggaatttgagatgggttggggggggaggaaatatgggaaaggacgatgcaaaacggatttgaattaattcacaaggtagggattcataaaatggattttgggttgatgagatagaacccgaatggtagggtgtcgattttgaattcttagaagaagggcttccggggaagaggttgaattccaaaattcaaatttcaagagttgattttgaattgggatttttgaaaaaaaaattataattaaggtttttattaaaatagttttcaacggtccgaaaaattggggcgttgcatgcatggagctagacgcgtttccgattgtttcaaacgaccgcaccggacggtacatgatttggttgggttcgcacattgtagatcatttcagatgacgcactagactttacaatgcagcaccggacttagtgcacgatgtacataatttgaaatcagggtgcacgcgctcactctaatttggacgtaaaaacggcaaacaaatgcacacagtccatgaaaacactaaacactggacaaaatgtctcctctttttatcgtgcttacatgtaggggcaagataactatggctgcgccggtgcatgcatggcctccttgaaggccctggagccgcgaatcctggcgtcctacccactacgggagagaggacgaatggtgagctacacgcctttggcatggtgcccttcttcatcccggaacgtgagcaggagatacatctgtgtttccgtctgcttcgtcctccgtcggctactcaagtatgcacgcatttccaggaggaattagaagcttctacttctactcgcagcaacgatgacgatgacgaggactcgactcagggtgtgtttagttccacgctaaaattgaagtttgaagaaagtgacggaaaagttggaagtttttgtgtgtaggaaagttcgatgtgacagaaaaattgaaagtttgaagaaaaaagttggaatctaaacagtgcctcagatatttgggaggtgttgggtctggggatttgtcacgaccgacctgctgctgatggagaaccagatccctttctttgtcatccagaagctgttcgagtagcttcggatgaatagtgataataaggccattcacagtgtgtcctaaaattttaccagatttcacatgccacatggaccaagaaccatactagctacatactccacaatgcatattacttatagtgggtcttacctatctctctcctctcacttttctcccttcccctctctcctctcacttttcccaccaccaccagtccctcatgggcggaggaagcgaagtggcaccgatggtgagcgtcgcggcggcagcggcgccgggcagggctccacgcctccaactctcctcgtcgcaccgcactcacccccgcccctgcagttccagcagcccgagcagcatcggcggtggtcgccgccacggctgcaacggaggcggcgggagaggagaggtggcggcgctgcccaagtggagacggcgccaggcgggcggaagatacggacgatggcggcgccgagcggaacccgtagacgacggcgccgccacacagagccgcggatgacggcgccgccgatctgcggaactcgggaggctcttctccctctccgtcgccgacagtccgagcggcgacgacgacatcgggcggtcttagcggcaacaacggcggctatggatcgagctcgccggctccgaatcgacgtcggtcgtccccttctcttctcctctgccgcatctcccctcctcctcctccacttgtgcaggagcaagggacagcggggcagctgcgtgaagctgg

SEQ ID NO: 20284 - DNA, 5633 bp, Oryza sativa
tacaggaggaagtacttgatgttgttcgtcgggataggcgacgacatgaaatttctaggacttctcgcagtttctctcgggtggttccggtcgtcaatcaacctgtgcgacaacctgggggagctggtgtgtaaaatctgaggactcaaaggctgtccctgttgatgacaagtttgctactcttcgagcgtatcgtcgagctaagggtctctgccatacttgtggtgagcggtggagtcgcgagcatcgttgtggacccaccgttcaacttcatgttgtggaggaattgctgcaacttttttctgtagatgaacctgtgtctgatgaacctgctgctgaatctttgcaaactgaacctgaagaaattggtgagcaggagggtgctctgttgactatttctcgtgaagctgttctgggcacagagtcacccaagtcagtacggttgcagagtttgattcagcaccatgaagtactcatgcttgttgactcgagtagcacacacaactttatcagtgttcaatggctgatcggttagctggttgtcgtcgttctgttaagccactgacggtacgtattgctgatgggggtctgttgcaatgtggggaagaaatgcttgattgtcaatagtggactcaaggggagtctttctgtgcaaatcttaagattcttcctcttggttgttatgaagtaattttggggatggattggttggaacgtcacagtcctatgcatattgattggaagaggaaacaattgcaatttgagctaaataatcgcactgtgcgattgcaaggggtgttaccagatgtgacttcttgtcctcctgtgtatgttaatcagctgaagggacttattcatcgtcatgctattgttcactcagttgaattgtgtgttgttgaatcccagggagtagagcaagctatgccagctgcagttgctaacttattgtaggaatttgcatctgtgtttgatgagccgaccggattgcctccttctcgagtgtttgatcatagtatccctttgttgtcaggagctcagctagtgaatcttcgtccttatcgctataatccggcacagaaggatgagattgagcgccaagtggttgacatgctttgccaaggtgtgattcagagtagctccagtccattttcttctccagtgctgttggtgcaaaagaaggacggaacttggcgtttttgtatcgattaccgatatttaaacgttattactgttaagaatcgttaccccttgccaatcattgatgaattgttggatgagttggcgggggcctgttggtttacgagcttggatttacgagccggttatcactagatcggttatcaccagatcaggatgaaacccgaggatgagcataagacgacttttaagacacatcaaggacactatgaatttcgagtgatgtcctatggactgactggtgcaccagcaacattccaagggttgatgaacattatatttgctccatttttgcgcaaaggggtgttagtcttcatcgacgacattttggtgtatagtcgcaacttggaggaccatgtgaaactgcttcgggctgttctggaaatgttgacaaagcaccagctaaaggtgaaacgttctaaatgtgcttttgctcagtcctctttgacatatttgggccgaccatgtgattagtgctcatggggtgacaactgatactaagaacattcagtcagtgcgcaattggccagttccccagaatgtgaaagaagttcgtgggtttttgggcttggcggggtactaccgtaaatttgtcaagcactttggtattatgagccggccattgactgatttgctcaaaaaacatgtggtattccattggacttccgagacacaggcagcctttgaggcccttaagacagcccttactactgctcctgttttggcattgccggatttcttgaaatagtttgaaattgaaactgatgcttcggctttcggtgtgggcgctgtcttgatgcaggagaatcatcctcttgccttccttagtaagtccttgggaccacgaaatcgtaggttgtcgacatatgagaaggagtgcttggctattcttcttgcggttgatcattggcgctcttaccttcaaggttctgagttcattatttgcacagaccagcggagtttgattcatttgggtgtccaaaaactcactacaccttggcaacagaaggcacttactaaacttatgggttcgcgttatcgtttggtttataagaaggggactaataatcgtgcaaccgatgctctctcccggcgcgctgctgacaattctgcagagttgtgttcagtctctgtttgtgttccgatgtggcttgaggaagtacaagctggttatgcttctgatgcccatgcctctcatcttattactcagctcacattgaaaaaggatgtagtacctcatttttcctttgatgctggtattttgcgctataaagggcgagtgtggattggcaataactttgccctacagtctcgtattcttcagtccttacatgctagtgcccctggtggtcactcaggagttcaagtgacttactctcgcatcaaaaatctttttgcttggactggtttgcggcgtattgtcaaagagtttgttgatgagtgtgctgtttgtaagcaggccaaggctgaatgggtacgttatcctgggttgcttcaaccgttgcctgtgccagagcatgcttggcaaatggtctctctcgacttcattgaaggattgccgcactcgtcgggatttgattgcattatggtagtggtggacaagttttcaaaatatgcccattttgtggctttggctcatcccttctcggcgtttgatgtggctcaagcttatctcaccaatatctataagctccatggctttcctcaatcactgatttctgatcgtgatcgcatctttacaagcacactctagacttctctgtttaaattggcggacacccagcttcggatgagttcggcttatcacccacagaccgacggccaaaccgagtgggttaatcagtgcttggaaacctttttgaggtgttttgtccatgcctgtcctaagaagtggtatcaatggctggcgcttgcgaagttttggtacaatacttctctttactcagctctggggacaacaccctttgaggtactttatgggcatcctcctcggcactttggtattgtggatattgcagcttgtgctgttccagatttgcaagcatggttctaggaccgtggggtggtccttactctgttgtgtcaacatctgcatcgcgctcaacaacgtatgaaggttcaagcggataagaagcggtccgagcgccaatttgctgtgagcgattgggtgtttttgaaggctcaaccttatgttcaatcattgtgtttttgaagattgggatcgcctgaaggagcgtgtcacgaccggaattgacccaacgggcgttccttacgtgcgtgtattattccttgtcccaggaggcaaggtacaccaaaagttgatacatttcagagtttatcaagcggaagcgtaaatagttaattcattacatgggcagcgaaggcccagcacacacaaagacaaacgagaaacagcggaagactagggcgacgaccacaggcgcttgacagcaggcacgagctagacaccaaagccttcatcttccagggactcctcttctgggtttggaaaaattgagcaagactgagtacaaccaccgtactcaacaagacacacccacaagtgcaggataaatgtaaaggagtacaaggggggttatgatataaagggttagggtttgcagtaacagcattaaaagacacttagttgctcaaagctattttgtaaacacgtttccagagctatacaatattattaatcaaggccgtgaacccacacgagcctgccttaacccaaggcctctgatgattcagaccgaactagcaacccgaccctgggtcccagctcgtcccaagccaacccaggccaaccattccacattttagttgataagcaggttttaagaattaaaacactaacttgggtacattgctcggcttgcccataaccgagggcgcggctattcgaatagattatactctgatcagaggtgtacatctttacccacaagacacatcttcctcacgtgtagccacgtgtcacataccaccacggtatacggacggaagacatgacatagtttccaacccatcctagccatagacaagagtaccgacccaaccccacctacggccggaacctccgggacaggtaggcaggactgagcccctagcagcaggacaccggccctgtgccatgacatctcgactaccgggccgcagctcgtgtagccttcatttgtcctagagatgtccatcgacccccgacttcgtccatctccatccgtgtacttttgtttataaccagactgagccacaaactaagccttacccactagacatgtggaagtacggtagtgctttgcaacaaaggcccgaagaccggtccttatatggccgaggtgctactatcaaaaccatgcaccccgagcccagcctaaaaccattttggagattttgaatagagggtgaggtgtgaatccaattccacaataatcaaaccattccatagtgtccaggtgatatgaatctcccaaagtctagagttgtaaaaccacctaatgttacctaattaattagcgaagcatctacctaaaattatactagtggtaccatgagtagagtgtctactagttggggttttgtttattctagggtgaacaaggaaataataacaataaaaataataaggtcataacaaaggtaaataggcatggctagataaaacagtgataacgcgggaatttaaataaagcgataatgcaataatttaaatcaaaataattttataaactgggatttaatatgttcaaggatgatgtgacttgccttgctcgctttcccaaacgtcggcttcaacttccacgaagagcggatcttccgaagctgcggcgtctacacgaccaacgaaaaaaagaaaaggcttttactctaataaactccatataacaagcaggaacaaagcacaaaaatgggttcttgacttattaaggaaaaattagagacttgaacggtccaattccgagttcaaatggccaagttatggccatttgaagtttatatgctctttaaatgaatatttgcgaatttcttcatttaaattttaattaaaaaaaaggtttattgcgtcagccgaggggaggggcgcgcggaccgggtccacgggagtggggcccacgcggcagccccacggtccacggtggaccgggcgcacccgggctcacaccggccggcgccgttggtcccacgcgtcagccgcacccgagggcgcgggcggctgacagccgggccccacgcggcagccgctcggtgcgcccgaaggcggccacgccggcgcagcgacgggaggcggcgcgcccgcgcccctatggtcgccggcggcggccataggcacggcggagcggcggccgagagaggggagggaaagggggaaacgaagcggcggtccacggctcaccccgggtcgacggcgacgacggaaacggcgaccggagcgg

SEQ ID NO: 20285 - DNA, 9845 bp, Oryza sativa
  unsure (1)..(9845): unsure at all n locations
gataattaagtaggtatgtttaaccaaaatgttgcatgcttggtgtgattgatttaaaattcatacatcacaaatccggtttcttttgtgctggtccaaaattcagaaatatcaagtaggagtatatgattgtaacttttgttgttatatttggaaaaaaaattgcagtacaactacaaagtagatctaattaagccagttactcgcaaggtgcatttctattgatattgaaatagtgcaaaattgttctacaaaactgctgtctgtaaaatttcaactacaggttcaattcgtctcaatgactccaaaataaaattcttgcaaacagtaggatcgaagaaaaataaaataaaaacttgctagacacaacaaatcttattctctcccttcttttcacacttgatgtcaaataagttggacgtaaaatcttacagaattatttttctcctcaaactagcttggttcatatttttaaaaaagaacatgatttatagcaccgttcaacataaatatggtatttagttgtattccccccttataccatactaagttcgaattaataatctgaacatgaataaaaacagtagaaatatatactatgttgcatctctgcatatggtatagcacatacaccggcggatccaccgcccagcgacccgatcgagcagtcacccgggcttatcggtggaagatccttttgaaattctatgcaatttaacaaattgaaattgaacattataagcaaatgttagctataattaagtatgtccaaggctttaaaattttactgagcacatatcatatataaattaaattaatgcagggcgggagatcgtaacatacgaaagcccaagccccaccatgggcatccaccgcatcgtgatggtgttgtatcagcagcttgggcgcggcacggtgttcgcgccgcaggtgcgtcagaacttcaacctgcgcagcttcgcgcgccgtttcaacctcggcaagccggtggccgccatgtacttcaactgccagcgcccgacaggcacaggtgggaggaggccaacctgatctgatcaatatcgatcgatcttcgatcttctagctcttgtacatgttgagtgttgaccaatataatggccactcatgcatatatatatatatatatatatatatatatatatatatgcagtgtgtctagccagctgcatgcaactttgtctacgtgcttatataattaaacaaatgcatatatagccggccgtatcataaagttcctagctataaaagctatagaataaatgtcgccccacttggtcagttggtgtacatgacggctcctaagtgtgctatcatgaatatgctaataatagcagtttagtatatcatccccgcaaaaaaaaaaagtttagtatatcaagtgtacgtagagatgtgacattttgtcacacattggaaaataaactatattgtaataatatgcgtggtcgtttaatattcaatattttctgagtagatttcatataaccctagatattatggtgttaaacacaattatagtggtttgcagtggcggaccgagaaattttcaaagactagggttaaggtatgaatcaactaatgaagtgttggttttctacaaaatttacatagtgatttaacacaacttaacaaaatttccttccattccaaattgatctatatatttcataggtacaccaagacaaaaaaaaagctaatagctctctcatactatatttactctagcaacaaactcgatgcatgcaccatccctactatttcctagccaatagcaaatcaagatattacatgcgggttataaatacttgtgtgcatggatgcatgcatcaatgtccattactccaatgcacaaataacgaatagacttaatgaatgaacacaaatatgatgatcatttagaaataacctaaaaaaactatatgatgatcattttggaacggagggagtaagattttagaggcatgtctagggctcaagccctagctgccctagtcctgcctccgcccctggtagtttggcacgtgacacataaccccgagtatttggtatcgatgcaaaactatgatgttaactaattcaacataataatgtagcacaatgaaaaataataaccttatatggctacaacatttagacgatacattaaacgaactcataaatttcaaatataagtttaaaattcataataagtgtactacatcaaagacaaattagttaacggtaaaaactgtagaatcataatatatgtggttctatgcaacacatcaaaaccctcatggttttgtgcaaacatgaaccaaaatatgtagggtttagtgaaatttactcatattttcataacctaattagcttttaacttaagagaactatctgaaatgtgtttagtcattgctattagatacagattaaaatcctaaatacatatataattactctatccgtcccaaaatataatactacttatgtcccataataattgtatttctaggatttgtatttgtcccaaaatagttgtcacaatagagtactaatggtcccattgatcacttctcgttcaaatttcttcatattatagcctcaactactctctcactctttacctatacacccttgaagaagggacatcatagttttccttcacaaaccttaatatatgctaaacactctagaattacaattattttgggccgggtgtagtaacttttagaggtaggcattggtaagaagaaagcttaaataaaataataaatggttgtgattagctgagatgatgtagctgagaaattaaatgggtatagcagtccaattaatactcatcctcactactccattctgtgtttgacccatggagtgaaagaggagatttctctctctgcacgcacgcttcccaaactgttaaacggtgtatatttttgaaaaaaaatctatagaaaagttgtttaaaaaatcatattaatctatttttaaagtttaaaataattaatacttaattaatcatatgctaattactcacctcgttttgcatatttttccaatcttctcatttctctttctctcaaccccaataaccaatgtctgtgacgactactacccaacaaaatttcatggaaaaaatgtgagctgtatatgccagtatgttgaataaattcagctgttcattacaactgattctatacaaaataaatttagaactattacagatataaaaaatatacttgaataattgcttggacaattacattctttggaaacaatattttctctagttattcatggtaaaggcataatgccctgtttccagaaaaaaattacaatctagtattgtttcaattataatattttagtaattggtagttttaataatttattgtacactatatgcactttacttcaactatgttcatgttagtttttcttgcacatgccttcatcatttatgtttgaaggagtgttttttttaaaaaaaaaaaactccgtacccctattctcaaaatcttgtgttcgccactggaaaaaaaataaattccttcaaatatatatgcactttatttgggacacagctttgccacagtggtatatagaaacatactggaataattcatcttcatcagcagctgactttatctagttttgcttgagtacccaactgtctgttatggtctaatatatgcagtgatctggggtgatcactaaacaaatactccccccgtcccagaatataaaaagttttaggttggacacggttattaagaaagcaggtagaagtaagtggtggagggttatgattagatgagcagtggaggtaggtaggaaaagagaatggtagagtgttgtgattagttgagaagagaatgttggcggagaagctgttatattttgggacaaattctgagagctaaaagttgttatattttgggacggatggagtagtacttatgaagacaccttggtctcacagatgtttttaccatttttcatgaaatatctgaaatgcaaaaaaaaagtggtttcattcaaggattatatatatacatgaaatggagaaatattatcattaataaatctaaggctgagtttgaatataaatgtgttgagaacttctttccctgcaaatgcaaaattaagcgaattattagcgcatgattaattaagtattagctaaaaacttaaaaaatagattaatatgatttttttaaaaaaacatatttcctatagatttttttttaaaaaaaaatacaccatttagtagttcaggccacgtgcgtgtgaaaaactaggaactctgtggctaaagagcacttttgacaccaacgggcaccggtggtttgcgacagtactacatgtacaaaagcgtggctttcatcttttgcttgttgagttaccttacacagcttaaatttgaattttgaaataaagttggttttttattgtagtttatttgtctagccttggattttaattaaatgctaataattaatatagatataaaagttttacaatagattaccttttttactttcgtctatattttttttaagtcttatttgctataactacaaatgacaaaagaaactccgtagttagttaacttgttagcaaagtggattggctaatgttggggcaatgaaacatatgtgtctaatcccaatgttgggacaccaatatttacaaacatagtcagcaatccaacaattttggcagaaaccaaacaaccccaaaaaactagggcttctattctagagctagtgtcatattggtaccaaccaatacatgtcagtacgagacatggtacctcatcaataccagactagtggtatcatacccaggcgagggggaagagtagaaaggatggagaaggttactggcgtcggttcttccacctggcaactacgacgatgagctcaggcagcgacagatccggtggcattgggattggcatgtgttgtatccaatgactgggagcttaggcgcttcaaatccaccatggatgggcaatggagaggggcgatgagaaggctacagctacatcggggttgtgtggtgtctcaggtggaggcggagtcaacagcaatgtagctcgccggtcagccaagcatcccagaacaaacaaagaaacctaggagtcgagcccaatccatgagctgaggaatgataccataccatatgttaagggatgtagccggatgcgccgcactcgaagtggatgagaggacaccgccggtgtggaagagaatagaggccatctggccttgttttccgacagtgctaccgccatggcccataccgtcatagagaattgaatgggaagagaggaatcgtaaccgtcggctagggcctcacgttgcggcactcctagagtgcagcgtgggtggtagctctatcgcgactgtcgccaccacccgtgcattcacttggtgaattatttggaatcataccgtactgatgctagggtacggaatcccgtctccgagcattcctattaacaattggtgtagcaagcattatgtataatgggcaagtggggagtggatctcatggaaaacatcatcgctttggtattgcccatgacaccatactccgttataattaccaccagggaaggtgtcgaatggcaagcaaattacgtctgttagacaagttccgcatgattttgcatgcgcagattgttttctatccaggccggtgtgttgttcgttgctgctggttgtgttgttgtgtccaattcaggagctgcccaaaaagcatcattcctttttgtgtggaggcctctttcccttgatgcaatcttctgtttgattattgctgcatcttgggactgtgcggaaaaggaccagtgcttgaagcacaaaactttaagtgcgatttttgtgtcattttccctgaatcgattaaatttattccaaactgatatggcaaaagtagtaagtatcacatttgagatttgctaaccatttgtttgttctaaggcttaaaagtactgtacgatagcatattgtgcgattaattaagtattttattagtactcaagatgatattacactacaattatcagcttgtcagcacttctcgatgaattgatcaccgcaagctctcactctgtcagctcaaactcatgacaaaagtaatgcagcgtactccctctgtcaaaaaaaaaatcaacttataagagggtgtaattcctcttattacaacaatccctttataagatgaggggtcacgtcttcttatagattaagttttttttttatggaaagagtacgtggttaggggccacggcccagactatacaccatgatcggttagtggcgaatgccatatcctaaacgctccgatcgtggcacacaacatgcatgaactggatgtgcgtatatatggtgtgctctagtggcgccgacaggctctcaacagaaagaagcagaaacctaccggaaaaagaaacaaatgtgcaatgcaagtgtttggctgggcagagtttttccgagggattagagtgtttggacggatgaagctatcgagtgttttgtttgattagagaacatggaaattttgatatgacgggatgacgaattgagggaggaacccctactttttaatagctaggtaggagtgagagttggacaggaattctccctctatgttacctaaacaaatctcggccatccatttttacttaagatctaccgtctagctaaactccctatcaattcctaccacattcgccaaacaagagattgaaattaaaaatcaaatttttacactaatattgctactaatttactcgtttaaattcctaatatcctctttccctaagttgctaaacatgccaagtttagcacatcttaggccccgttcgttgctttaaaaaaatttccgcacacgcaaaacgagaaagctcactagaatatgattaattaactattatatatatatatatatatataaagcgtaccatttaacaatttgataagcgtgctaaaggagaatgaggaagttgaagaaaagaactaagcctaaggccatccccaaccctccatgtcatttagtatgtgtttgatttggggacaaagtgggatgggttagactcatccctatttttaggatgagatgatcccatctatctgtttggcataagggatgggatgatcctacttttgaaggaatggcccacatgtcagcgagagaaaaaagtgggttggatttgtccgccggtttttgagggaccatgccaacccggatcttaagggaatattccttgtcagggaccatcctatcccacctatctccaaaccaaacacactataaaaaataggttcaacccaacccgacccatcccaagttcccaaacctttaaccaaatgcatgcagtatccatagcattaaatacattgccacataagaaaaaaaactaatgtgacaggagaattaatgaggagagagataaaaagatgaaggaaccatttctcatgcaagaaaccatctctacataagtaccaagaatgaaaacaagggaatatatgagaatttaatttgaagacatcatcaattgaatatatagtttctatgcatagtgcctatatgacatggcaaatatgaaaactacttgataggtatttaaaattgatgaagatgaagattaagttgacgcacatgattagttaacttttaattattataaacttgagaaatggatatatttgatattttaaagatatagaaagttttcatacgaagatattgtttagtactttgaaaaagagtaaattacattggtggtacacaaacttgtcaggtgggtacaatctagtgcataaacttgtaaaatgtttgtgatggtgtatgaacttgtctggtgcgtgcaaaacaaggccaaaaggacacaacaaggctaatctcatcgatttaagtgctgattaggatgcgatgtaaacatgcaagtgagaagacgccatatagacatatatatatatatgtgtgtgtgtgtgtgtgtgtgttcaataaaaggtaaaataaggcatgattgttgtcaaagaaaaacataaagaacctgagtaatgatgcaagggtggaaacaaaaagaatgttaatgtaagaaccgagtttataaatatagcatatctcatgcccatctcatatgtgcatatcacgtcctaatctacatccaacttggtaaaattagccacgctatgttattttggtattggttcacagccactaggcaagtctgtacaccaaaacaagcattttacaagtttatgcacttgattacactcatctgacaagttcgtgtaccgccaatgcaatttactctttganaaacgtgataacggaaaccgagataaaatatgtatcttaatgagaaaagaacatgggccctgtgctaatagcttagataattctgaaaactcaattccctctcctgatttgtactatgcaattccttgtgttgctgattgattagcaaacaccgagagaatcatgcaaaggttttgaagccccagcaagcaaagttgcgagcttctgaattgaaaggtcagtgtagaagtagcagtctagcactgggttcaatgtttttcctcagaaaacctttggagaatgttgtcattggccttcttttttttggttcatatgagttatgtgtgtgattctgatcttgagcgcgacacgaaacaacacaaatctgatgatgtttacgtctgaagctgcaaattgcccacgaggacatgcacggagaataatgaggtaagaaaaatgttcttcttgaccactgggtagccacaccccatgtcacttcacgtctgtcgaagcgtccatcccagccttctgtgtgtctggattgcgaaactgtaggctctattatcagaaaaaggattcactgcaaacatatcacattttgcctcatttttttctctgaaatttgnttcaaccagttctcttcatgtctncgcttaaattttttcaatgaagtgtttttgtttcattttttccctgtaaattttctttcattttcattaatttccttcagttttttacatttattagagggaagggaggaaatgcaaggcgtaagagagcacgattataatggacaaaaaataagcccatgccaaattcttaatgggctgatgtgagcctaacaaatataagattaaataggctatcaacgaatttttttatttatttatttgtaaatatttaggaatatgctttggttttcaaaaattacagaaatatacccgtaacgtcctttatatgagcgctttttcttgttttggaaaaaaaaaagccctctacgaggactagagggacttaaatgcaaaatttgctttatagcttatattaaaatattatttagtaatttcaaatttttttttggagttggataaaatcaaactttatattaaaattttcaagctcgataagatccttatagttaacaacttatttatttaagatcgtttagaagttcgaatatttgttacatacaaaagttgcataactcaatcactattacaaaaacggacatacatgttggcactatcgggctagaaatgctaaaacttgtacttatagtgcttttccccccaaaacacgcatccacgggacatcatcggctaaaaccgtcacctttatagagagataggtgtcggttctaaattaaaaacccaacacctataatattagtgtcggttcatttagaagaactgacatctataatatattataggtttcggtcttttaagaaccgacaaatatatttatattataggtggttttataaaaaaaaaacggatacttattaagaaaacccgcgggagccaactgaa

SEQ ID NO: 20286 - DNA, 537 bp, Oryza sativa
agataatcttcaatctggttttccaatcaagtggatcagcttggtgattctgaaaaatccatttatccaaagatccattaggcatgtactcatagacaagaagcctatgagttttttcaacacaaaatccgattagcctcaccaggtgtatgtggttaatgcttccaattgtctgaacctctgctaagaattctcttttcccctgacctatgctatccaatctcttgacagcaacatgcttatcaccgatctgtccttcaaaaacagaaccaaatccccctgccccaatctttcttgagaaatctcctgttgctgatttcaaatccacaaaagaaaatcttgtgggtagccctggaagctgatcaataaaatattcatcttctaatggttcgtctctctttcttctcagaactataagcactgcaacaataactgaagtaacaaaactcaaagaaccagcaaccaaaacgattgctcttttctctttagataataaggatttgtgggtagagtcctgaattttgagaaaagcagaag

SEQ ID NO: 20287 - DNA, 841 bp, Oryza sativa
atgaggctgtaggcccaagctccggctgccgcaccggcgaacggtcccaagatgtacacccacagcgccgtgtacttgctccccaccaacgccggcccaatgctcctcgccgggttcatcgacgcccccgacaccggcctgcgcgcccacgtcatccatgtcaaatagacccccaaagttagtgtgacgacatcatttgcgggtgtgtgagtgtgagtgtgcgtgtgcgatggtgcgagcccatacccagcaaacagcacattgagcatgatggttccacccacagccactccagccatatgacccacctgtaaaaacagagtcagatgaccgataagtcaaaactgataagtattcgtgacgtggatggctgccatttaccgcttggtcatcggtggcgacagccatgatgacgaacatgaggtagaaggtgatgacgaactcgatgacgagcgactgcgcgtgggcgccgcccggcagcgtggccggcacgggcgcgtgccggccgccgaacatgagccgcagcaccacgctcgccgccgtggcggcggccgtctgcgccagcgcgtacgcgggcgcgcgcctccacgggaagcggccggcgacggcgaagccgagggtgacggccgggttgaggtgcgcgccggagacgtggccgacggcgtacaccatcgcatgaccgccgcgccccacgccacggccacccccgggaacgtcaccgcgcccttcttctcctccaccgtgatggcgcccagccccgcgaacatcacgaagaacgtggccaagaactcggcgagcagctgcacgcagcgtcgtcgtcgatcgacgaccaaattaacca

SEQ ID NO: 20288 - DNA, 7800 bp, Oryza sativa
  unsure (1)..(7800): unsure at all n locations
ttatgcggcaaaaccgaagacgctgaacaaatgggtatctagctcacacacgtaaacatattagaagaaagtagtacagttttagttacacaacgcaatagaccagacaggctgttgccggggtacaaggaacaaatgggtatctcgtggatgtcaagaagaagatcgaacatgtggactgaaattatataagagcagatcgtcctcactcctcagagtgtcagccctcagctctgtcttgcccttaatttcattctttcttcggattcaccgagagtggttgatgaaagccaaaccaggtgaattactgaaattaaagattcgagagatacgaactggggattggacaaaattgaaacgacaactcccacgaatatatgttccaataatgacaaggtcggggaaatgtattagaggatggatacaaaattaacctgatgccgtcttttggtgagggggggacacatgtcagcaactctgcatgtacatgttcttgtttcttcagagaacggcagagacagacgacaactagtgcgtcatacatggatggattttttttttcagatggaaaattgggattttacacaaattaaccatttattattggcgcatgcaacacctataactcgattcgttagcaaattgcttagtgggttcggcccaattgatctggtgaaattcagctcagcttgacgatttgcagtttcattacaaagcccaaagctaggctcaccaaatcaggaccagtctgaaacaatagaagaggtatgtgcaaggaccctcggcttcggttcggcttcggcttctttaaaatttgcagtcaacaggatcagatgattaaacttacaacacaaaaatagaacaatagatagacgcaattgtgatatgcctctcatttctcatctgatagctcaaattgatnggatnnagatggatnnaatttgaannaaataaattgtgatagctattcgagggataaacaaattaattaacttctacaaagttgaaaagttgctttatcaaagtattccaagaaaactttatatagaattgtgttcataaaatgcaatgtttaggagcttgggaatcatgcgaacaaaaaatccaaaatctaaaattagaaaagaacagggccttagactatggtgctaagttttaatttcttcgaattcattaagacctctttttgaatgcatgatttgaagaactgcatgaacaggaaaaaaataatgagaaattagggtggcacaccaacttgatcctaagtaatgtcaaaagcacacaaattacttgaatcgcgttgtttggatgcttcacaggaaaatactacatgaatttggagagggaatggcagaaaggaaatgttccatgtggttaaatctaatggtagaattcctctaaatttcctatgtatttggttattctataggaatttcaaagggtcaattccttttgttctaaaggagtacatataggaaaattttccaaaagattcaaccctacaagtgctccattggtcaaaggaaaaaatgaggaattttttagaactgaagtcctttaaaaataaatcctacatggtcatttggaacagaggaatgacctttcgaaattcctgtgaaataaatgtaggtattttgaaggaaatttagcaacatatctaatattttattttcttgtctcttaaaattctatgtgtttctcatagcgttaccaaaccatttttccttcttcttcttcttttttttttgcaaatttatgtgggttcactttctgtatcattcaatgagacgtgataacacatcttatttttgtgtgttttcctattccatgtgggctgagtgcgttgactggtcaaggtgtgtgtctatgttaaaaagagtgcatatacctctaatcttagttatacatgtgctatgatgtatccaactgatgaatatgatgtgtgtgagagtgtggatgtatgagtccagcagcgtgtgctcagaaaaaaaagtacatttaaatttgaattctctgacatcattcgaaatttcacttggaatttacttttgtcccacattgatacctcgaaatttcacggttttcattaacacgtaaaccctgattgcaatgttgtacaatgtgcagttttagttcgttttaactacaattgttgttgttatatgtggttttactttagtttcatctaagttctaaaacattttgcgtgtagttttatattgggtgaatagctaatttagtccctcaagtttcacaaaaggctcaatttagtccttcaggtttcattttgtccacataggtcctctaagtatttgttttggcttaaaatcatccttggcccacttaatatgccatatggatatttctagttaacaattctattagaaaatgtctcttttgcccttaatatgtacacaactatacactagaaaaaaaaacaaaaataaataaacaacattgcatatgtacttcccattatttcaacatgtgcacataaaaaacttgagcctaatggctatcgtatacacttgcaagtacataatttatttttgttttatataaattactatgcattatctataaaaaagaattcatattttttctctaatatatgtgaatgagggggtataagtgtcatttatcaagagaattgtttgttatgtaggttcaaggataagtttgaattaaaatagaaacttgaaggactaatatggacagattgaaacattaaagacaaagttaatccttgcgtgaaactaggaggaccactttgactattcacctttttatatttatgtatgacttataattttgttcttgtattgttgtaaatgtgtgtatgttagaatagtctattattaattcaatcatcacgtagtagatgaaccattggattttcatccaacggaaaaaaaattatagcaacccatagaaaaacaaaactacttgggctgagtaggtttgcttctttttctgtaagataactcagagttccaaaccaacttctaaaaagataaacactcttactaatcaactagcacagtgcccgtgcattgcaacggaacactcaaatttcatgagatgattgtttttgtgatatgagcatttcttcaaaaaatgatgtttctaaacaaaaataataaaaagtcatagttacaactcatccaaaaagaaaccaatccaaatctaaatgccggaactaccttttatgaaagatcagtaaagctaggaaagaaaattactataaccacttcaattgaaagtaggatattcagcatgaattgtttcgtggttgatgccacgccatcagcaaaagccatgaagcaaaatcatcatgctaactcaaacaactcgattagctcaaatcccgagataaatacttgaaagatgaaataaaaaaatataactctattagctcaaatcctgagataaataataaaaatcaaatggaaaaggtagtttcttaatcttggtaacatgaaaattagatagctaagtcggtttattcagtatttttgtaagaaaaaaggggtttattataacgagattgattagctgcagaaaaaaaacaatctatgaaggagtgattgattataagtaaaataatacgggaaaattgtcaagtgaagagctctaacattcgcggacaaagcacaaaacagaccttgaaggttagtgaattgcagggccttgcgaggggtggcaaaaaaataagcgaaaaaaaatgttggtgcgtcggtcattagtttctaattaacctgcggtctgtggtttaggaaattttggtttatatcgtctaggaacgtaaaagactgaaataccagacggtcatgtgcagaaaaagatcaaagtgaaaggaatgaggccgagatagaaagtactgagactgaagaattctgttttaggtattgaaagatcgaattttaagcaattaatttagttagtagccatggttaatcgattgggaaaaaatctctctctttttgcttgctaggagaacattataatttatttgttgaagcgaagtcaacatcgaactattatgagtaggatgtaactaattgtccagcaaattacaaccaccaagcagcagcaggtggcccaaccaaattgcacaaaccagtctaccgaaatctctactattataagaattaaaaatatttatgcctaaaattttcgtatgtcgcatgcatccgatacgaagaagatcagcgtccgtgtttagttcccgtctaatcatccgattggcttgtgcatccgattagtgctgacctgcgcactaattaattatccgtcatcgagcgtgcatcggtttccctaccccgttatatcgttggatcgagcactccaattcagcctaatcaaatattaatttgaggaggtgtggagcgatctggctagaagaaaatcaaaaaggaaaaataaataagatggaagttttgggctggtttgaagttttgggctggtttgattaggtccgttactgatcaagatttgactagatattgcttacagggttgacggatttcttttccgtgacaacacatcctaccgtgcacatcagcacatatgggcgaggtcacagttgatttgaacaaataaatcttaactacttagaaaatttgtaacttttcattcatcacatcaatttttcgtccataagtccaatgaaacgatggcctccattcccacatgcgcgagtaacacatcgcctaaggagaataaagcacaaattcaaaaatagatacaaaatcgaataggacaatctaaagaaagagaaaaagaatagaaaaataataaaagctgcacagatcttatcttaatctttgtcaccaccggatctgcccgtgggaagccgccatcaccatcagatccgcttgttggaagccgtcatcgtcgctggatccgcgccgatgccgccaacactggatccgcccgcaacaagccgccgacattgctgtcgccaccggatccgcccgttgaagccgcgagaggacgttgtcgctcatgatgggggagggccccacctccaccacccgtgctgagtgagggcgctgccaccgttgcacgtggtgggggagtgcaccgccgctcgcgtgggaaagaaggggaatgcatcttgggttaggtttttaacatacaatgttttatctaaatcacaagcgatcctaaccattcgatcgaatccggcgactctcagggcacctacgccgacttgggccatggcctgccatatgggcctaatgcatttaacaagccagccacggtgtgaaagagagatacgggccatccttctaatcatgggcctaattatgttttatttattttcagtggatttaaactattttttcattagtaaacttaatttaagcactactttaagccattaaaaattgctgaaatttgatatagtttttcattcttcatactaaattacttctagctaaatggagtcgacaaaaatgtaattacttatttgtatgatatagaattaggtatagatttaattcattgtttatttacaggagtgtcctatataattcccatgaaactataaaataactataatcattatcataacattagtttttccgttgtaacgcacggacatcttttctagtaaaaaaagagtgaagtacacgggcgatccttaaactcgtacggatgtgacatctatattcctaaactctcaaaataaatttttgggtccccaaacttgttatgagtgtcatataggtccaaacaagctccaacccgctcagtaaaatgatgtggcatgccacggtgacgcttacgtatcagtgggatccacatgtcaatcatatagaagaaaaatttaaaaatagagagagagaggagaaatgatgtttttaattttgaaaaaataaatgaaaaaagagaggagaaaaaatatgttcttaattttttggcaaattttgctacaggacacttcgattttgtggttttagctataggacaccgtccgaactcactcttggggaaaacactccataaacgaggtaatttgccaaacgacactgcgttgattagaataataattttcggttgaagattagagagaaatcacgtgaaatgtcaaaaatgcccttggacccacacatcagttctcctatctctcttctcttctcttctcttctctctctatcttcactccataacgccgccgcgctatgctacccgtcgtcttcgtcatcgtccagccctcccttggcgggagtggagagggcatggaggtggaaggcggggtggttgtggtggcgaagaggcaccgggcggcatcgattgccaaggctcgagctcgtcgcggtggaggagatggcgaggacggcgggagtagcagaggacagcggggaggagagccgcgccttcatcaccaactgcggccactcccgcagcggaggacagcaatgacggcgggagcggccgccgcggtgttcacggcgggggacggcgacgacgtagcagccggagccctcgcgcacgacggcggcggcgaggtcgatcccctcctcgagtgggacgcggtgcgcacgtagcagcctacccaggcggtgacgatggctagcagcttgcggacgtcggcggagggctggacgatgacgaagacgccgacgtaggtcggctcgagcagcgcgtactcgagctcgacgccggtggggtccttggcataggtgaagggtaggcatagacgaggaaaagcgagccggtgcgggcgtggaatcgaggatggggcagagcaatgggaggaggtccttgtggaagtaggccgacgatggcgggtacgacgtggcgagcacaccgaggttgtgtgtggtggtgatgaccacctgcttgtcgagtccgagctgcgcgagtgcttcgtggaggcactacatcgccgggagcagcgaccacgacagcgacgagttgctagcgccgggagccccggctggatgacggaccgaacccacgatgcagcgccgcagggagttgacactgcggcaaggcattcgtcggggacaccgacgacgagctccaccccagtgttggccgggtcggcgtcgtagagccagactcgaccgaccttgagcgacgacagcatcgacgacatggccattcgccgaggcaggttgttgccgacacggtcgtagttgatgcccgagagctgacatggaaggaggaagatagagagagaaaagaagagagatatgagagctgacatgtgggcctaagggtatttttgacatttcacgtgatttttctcttctcttcaaccggaaattattattttaatcggcacggtgtccatgggcaaattaccacgtttatggagtgttttcccccaaaagtgagttcgagcggtgtcccacgactaaaaccacgaagtcgaagtgtcctgtagcaaaatttgcctaattttttctatatgtggctaacatatgggttctattgacatgtacacgccaccatggcatgccacgtcaacacacagagtgggttggaacccgtttggacctttatgatacccgagacaagttgagggatccaaaaattattttgagagtttagaatctaattgacacgtccacccaaatttagagaccgctcgtacgctttactcttagaggaaaaaaaaagaggaaacaggaaatggggaaaaaaaatcccgtagatctcgtcatctacaccacgctattcgtatcgctcgcgtcgctgctcccctctatctaccaccacgccgttcgccgctgcctcatccccacccctaccggtgagctcgggggcgtctaatccggcagc

SEQ ID NO: 20289 - DNA, 4028 bp, Oryza sativa
aagcatgatttgcgtatgcttgggaatgcctaactaataatcaatgcgtggaagctccttgaaatagcagcactgggatatacttcatcaatctctaatagcaacacttggatatatttcatcaatctctctgtttctttcccgaaaaactatttttatattttttgttaattaatgtcgctgtggacttagctgactgcttcttgttataatttatcatgacaaatcagggaacccacacatttgagcaagggccaaaggttcatcttgctgaaaataacgtggtaggcagtgctggtgttggtgatgtctatgaatacagcagggaaatgaccaccatgcaggagttagtagaaaacacttactatgattgtgctcttcgtgatcaaactggcatgtgggtacctccatcggttccaccgatgacaaagcatgaccacgaggagtggcaaaagggctttggtgctaatggtgggtacttcgctgaagaagatttgtgggatatagatgaagaaaacaaggagatgacaatgtgggatgtgcttgctgcgatggtttctgcgggaaaagataaagtattgtctgttgtatcatatgatttcggaaggcaaggcatgtctctgatttcacatttgcttcttgaagaggcttgtaaggataaggctgatacacttgaagatgctagtgttggtctcgaacatgcactccttgaggcagaaccaacagtctggctgcctgacagtgctgctccttcttgcatgctttgtggagctcgttttcatccaataatttgctcccgccatcattgtcgtttctgtggtggactattctgtggtggttgctcaaagggtagaagcttgatgcctccaaaattcagcacttcagaacctcaaagggtttgtgatgtttgtggagtacgtcttgagtgtattcagccttatttgatgaataagatcagccgtgcttgtcagattccaacaaatgatttgacagacctgagcaccttgaggtcgtggttaaacttaccatgggcacgcacgatggaatatgagatatacaaggctgtaaattctatatatggatattttaaggtatggccatcctataattctaatacctgtccgtgttataacttggttgctttgcattcctctaatttttgtctggaactctgtattctcatgtatatcgccccaaaatgtatgttgttatgcttgtttgctttctgacaaatatgtctgcttaactaaaaattgttgactgtctatttttatcaagttcatgactatcaaattggtactaggaaccaactgaacatgcctaaaattccaattcttctgcgcagctgaactttacacaacacaaccgaaatcgcgtttgctataactctagccagctttagtccaccacatacttcatattcaaaaccattgcagcaaggttgataatccaagttcttaatttcctatcaaacctatactcagccaaaccatttttctttcaaagccttttcattagtcattatgttccttttaccattccaggccatggtgagagcttacatgattgttctattctatccacaatgtaaaaaattctggtgtcatgctaacaattattttcacaaaccagcatcacatgaagttttaatttgaacatttattagtgtgagcatttattctggatttcagatgattttgtaggtttaaatcccagcatatcctttgtagttcctgaggaagaaaataagtggtgtggtctgtatagcattttctagaagacccttttgaaattcaaatgaatccattccttttgcctttgacaatgttgagattgcactatggaaatttcaccttctcttttccagctacactaaggctgggttcgtttccaagttttcccaactcacctctctctttttccgtgcgcacgcttttcaaactgataaacggtgtgttttttgcaaaaattctgtacgaaagttgctttaaaaaatcatattactccatttttcaaaaaaaaaagattaatacttaattaatcgtgcgctaatgagttgctccgttttgcgtgcgcgagggattagttcccatccccaagtgccgaacacagccactaaatgctgctatgaagcattgttagctattcagtgttgaccacttcatatattcaattacaacctgttcttaaatttgtgagaccatgataaagttttaagacttttgtccagcttcttgttcgatcagtcattttggaatcagttagaacactaatcgcattttgtgtgcttcaatgcaattttaagttggaagtttgaaaccggagaagtcaatccctgattcgattcttagacaagcaaaaggacttgctataattactgtggtaaatgttggaatgatggtcacatacaaaattggtactggattggttgttgctcgaagggcggatggttcctggtcacctccttctgccatctctacttatggtgttggatatggagttcaggtcattgcaacggctcaagtgttcttgtttcaccaaagacatatgttgaacatatttatttatttatttatttattggccttgcaggctggaggtgagttagccgactacatcattgtcctgaggaatactgatgccatcagaactttcagtggaaatgcacacctgtcagttggggctggcattagtgcttctgctggtcatcttgggcgagtggcagaggctgatttccgtgctggtgatggtggttatgcagcctgttacacatacagttgcagcaaaggtatgattcaaacaactagcagctgaacaaaactgaacttcctttccattttaccattgtccgtgttggcctacagaagtactcttcctttcttcctgatttattcaccagcgcacaaacctgcacatgattaagtttccttgaataccagatagttcagggagtagatgcttggttctttgagtttttaatgaactaaactaatctgggagtgcgacgcattattgattgtgagctccttcacattttactttcttacatgtagttaaaagaaaggtaacttataattgttgataccactaggctggttgcttctgagcagctcttatcttttacctggtgctttttagccaaacagagatgggcagcactgcttggacttgctgtcaagaactagtttttgctacacactataaagtcaaatactgcacacatttgaattttgtgattattgtttagtccttaatttcttcttgccagtcatttttgttcaacataccaacgttgcttaaagacttttaaatatctgtatgatggtttgttgtttagaataacataataaataaaaggagttctggagaactttaaccacgtggccatttccagtagccacttactaattatagcttacaacaaacattcagacaacaagaatctgcatacttgtaattccgtgcagttcaatgaagtgagatcatgatggtttggaattgtagctagccacttcaaagtactacattcagataatttaataaaggataagtccattttacccccctcaactatagcgtttgtctgaaatacaccccttaacttcaaaaccgggtataatacacccctcaattcttaaaaccattgaaatcacacccccccctcctgtcctgaaatatggtggtttcgccaatgtgtggcgctgacgtgtcaatctatgtcagcaaaatatattagaaaataataatgtcccacatgtcagactgattcttcatcttcccttctctctctctcttcccaagccagcagccaccgggttggtcagctcgagcgctgatgccgatgaacgcagcagacagcgcaaagaggagagccacgccgcctggagctccccgacgccgaccttgaagcctcgtcgagctccaccatggaagcagatcgagcgatggcgagctcgccatgcatgcggtgtggttgcgctactgccactggtgctgggtgtagcccgagtccgggtggaagaagaccgt

SEQ ID NO: 20290 - DNA, 1141 bp, Oryza sativa
tgctcttgctggaccttctcgacgcaccagcggcaatggagtttctgtccttgcatggtgtaccggcggcggcggccgcccggagcatcaccgatccatgcaaaccgtccatagtgaaaccgttccaccgtcaagcgtgcatcaccgacggagacaagctgctcgcggcgcgcttcgtcatcttgctgttcgatcaatcaatcaactccagcggtatgcgattgcacagcaaaacgcatcgaaaattaaatgggagcatgcaatttcgatcgatcaattaaatgacgcgatcatcactggcggcaacgagctgctcgccggctacgtgatttgcagatccggagattcccattgattaattgcagaaactaggatagaaaccactcgcggggggggggggggtgtaaactgcgtggtattgaaagttcagggatgtaaaatacccggttttaaactttaagggtgtattttagacgaagtgaagagttgagggggggggggtcaaatggacttatccctttaataaatcaatacatcatactcaggtgcctggggagtaaattattagatataacataaatttaatttgtttatttgaatatttttgtacggagagaagtgagagaaatggctttgcagctttctgactgtgttgcttaataatcaaatctgactaaaagaaatgtaatggttttgaatcaaattaatagcattaaattcatgcgaattcttctgcaaacagtgattgctagaacagctgaggatcatcttcaatgtttcagcatatataaataatataattcagttttattttgaaaatgaaaactggaatgttatgaaatgcatgctgaaattttatatcctgctgggagcttcccccgacggtattctatgtcctagctatagatatgcacatgtatgctcaactcaatttctatctgtaatctctgttccattatttcccttcaccattttctattcttcttctctggcaggggcatttgtgggctgtgcactcaatggaagtgttgtatcaactcgacattcggcgaatgcccaattttatggtggtccaataaaggcatcagaaatccttcttggttcagtgagcaggccagctgctgccgctaccctctacaga

SEQ ID NO: 20291 - DNA, 15780 bp, Oryza sativa
tctcttttttttgaacgaaccggcactaagcgtgccaatttcaagctttcatcagcttggagaacgagaactccatggttgacggttgcattgtgttttcttttgtatgtttttttgggtaggtttggatgagaaatgcgacgataggtcggagctcttggattcttcccctgccgtccgcaagagcttttcaggcacgtagtttgctgcgtgaacattgcatggttttctgatcattttggagaattcgtatgcaaacacattattacgctgaatacatgatgcagttaagttgatgaatttgtttttcttggtttcagatcggcattgcgccacaaaaattgagagcttgactctaagctgcttggattcaccccacaggcagttcgatacccgggaataccggtaattatttaaactgaatgttattttttttgaagagaaaaggaagttgtgatgaatttggaccctacctgacaattttgcagggtgttcgtaggcacatggaatgtggctgggaagcctcctaacagcagccttaacctggaggattttctacagatagaaggattacctgatatatatgtcttggggtacaaaaatacttcccattttttaatactctgcatcagttcatcatctgacgttgcattcttgagatagaaaaaaacatataaatttgctctatgtttgtgcatggacatgatgagttgaagataactttgcattcttagccgtaatgcagcatgctaacatgaatgccatctctgaagaaattgctgatcaattctgagacgttgcacaggtttcaggagatcgttcctctgaacgcaggcaacgtgctggtcatcgaggacaacgagccagcggccaagtggctgggcctcatataccaagctctgaacaagccccaggaccagtcctccggcgacgagctgtctccgccggagacctccgacagccggcagggcggcggcagcggcagccgcgactccatacccaagtcgtcgagcggcggcatgctcttcttccagaagccgtcgctgaagatgctgagcaagaactaccgcgtggacagcgcgctggtgaagacgtgcacctgcctgaccgacccgtccaccatgcagcgccgggcgcgggagatgcgggagttcctctaccgcatcgaggcgtcgccgccgccgtcgttggcgtcggcggcggcggcggccgacgaagacgggggcccggacgccggcggcgagctggcgaggagcagcgtgaactactgcctgatcgcgagcaagcagatggtgggcatcttcctgtccgtgtgggtgcggcgggagctcgtgcagtacatcggccacctcagggtggactccgtcggcagaggcatcatgggccgcctcggcaacaaggtgctcgacgcggtcttgctttgcctctgctcgctgtttggttcattggattcatggcgccgccatggctggctctcctgcttgcagggttgcatcgcgatgagcatgacgctgcaccagaccagcgtctgcttcgtctgcagccacctcgcctccggcgagaaggaaggcgacgaggtgaggaggaactccgacgtcgccgagatcatcaagagcacgcagttcccgcggatctgcaaggtgcctggccagcgtatccccgacaagatccttgaccatgagtaagccattgccgataaaagatcatgcatttgctcaaggctgcaatgcacaaacattttcacaaactctgcattgtcaaaatgtactactaactaatgatgaactcatctgcaaatccagccgggtcatatggctaggagacctgaattaccgagtcgcgctaagctacgacgagacgaagacgttgatgggggagaatgactgggatacattacttgagaaagaccaggtatgagctagtatatgaagtatgaatgaacaatgctgccgtgtaaacctgcattttttcagatatgctacagtgatatgacacagtaagcacctgcttagtttggtaaaatgttactgacaagatggcattcctgagcagttgatgatcgagagacaggcagggagagtgttcaaagggtggaaagagggcaagatctacttcgcaccgacgtacaaatacaagcagaactctgactcatacgcaggggagacggccaaatcgaagaagaaacgaagaacacctgcatggtaggagaacaagctgcatgctctgaagattcagacatgctagcactgacacttgttgagaagaaactgaaatttctgacggatccatccgtgtaaaatgcaggtgtgaccggatactgtggcacggccagggaatcgagcagctgcagtacatcagaggggagtccaggttctcggatcacaggcctgtttgcagcgtgtttgtgatcgaagccgatgtagataatggaagcatgatcagaaagggctactcaactctggattccaggatccatttcgagtctccgataccacaaagacacagcttctacgatgatttctgacttgtgattagtggttttgtctatactactatacttgtagcttaattacaaaaagcaggaatgtgtctacttttgtagtgggtgggctgcatttttcaagcctagcacttgtcttacactaactggagtaaatggtggcttctgaccaaaatacgtctgaacaacggacaactggctgagcggaagtgctttgtgtcttactaaatttttgatgcgatgtcttagtaaatcacatcatactttccttttatattgcgatgatgttcaaagaaagcagtaaacagttttctattgcaatgatgttcaaagaaagcagaaaacatttctccgattcgaaaaaaaaaaggattgcaagatatagcaggcagtaagtgaataaaccctcgagagaaatgacaggaggaaactgagtgcaacaaagtgtcgtgctgttatttatcatctggcagatattgttgcgaaagggttctcaaatgaggtcacgaaggttgggatggtggtgccgactacaaaacaagtcaggcaacacattcctgctgtgtgttaaagcgtttctagttaacatttggtgttcatctcttggtgagagctgagaattcactgtgttggagttcatatcaacagttggcttgcatttttcatggtggtattcatggatcagacgatgaacagacacttcaatctgccggggttatacctttaccttcgcctggcaagcttgtcagctcaactccgtttgatgaagtcactgcggctttcccattttcagattcagtctctttttcttctctcttgtcagatacagccactgtttcttccctcttcccagatacagagtctatttctgccctctcagattcactctctgtttcttccctgttttcagattcagtatctgtttcttccctcttttcagatgcagtctcttcactcttcaaacctgaactaccttcttgtgccatgtccttgttcaccatcacatatggctctgaagcaagagcagaattttcaggactccagaacaatggcatcttgatgtcatcttctctcatccttgcagcataatcatttatgttaaaagtagcctggtttttgccaccaaatgcagattctaattcttccatgttaaaaaggtcttccatgatcttgttagtctcaggcctatctgggtatacaaatttgaccttgttgaaagtctttggctcaagaatggggcttgcgatctgcatttagataaaacatgatgttaatttagttttatatgctacaatagttagttgcctacgggtgtgacagcaagaatgtatgtgctgtgctccatcattataagaaagttccaccttgaagtgtataccttacgttgtactccattacattatatttgacaatactaaccactgtgattttatctttgacaaatatttttttataattacaatgttttgattaatgcaagtagtgtagttatatttagcatgcaaagtactttgacaatacaacatatttttagatatttataatattttttttaaaaaaaagacgagtggtcaaaattaatactacaagaatagtgtctggtgtcaagtataaaaaacgaagggagggaataagtctacaatgcaaacaagagaacaatgcatgatcagacaattaaatggaacacattatccctaaatttctgattgaatataaatactagtacgatgatcaaagctgtgtaaaaccataccttccagaaagactcaaaaaacttaggagcattgtaaagaattgcaacacccaatctttcaggatagtgaccttgtaggacatctgctgtcaactttgtcacatgaagtgatatgttagataatgagaatccagcaaaatcaatgagccaaaccatctgactctggtcatgcggaagattcagaattgcattctccatacagtataccaaatatctgatctgccccttggccttcttggtattctggaaaacaagataacaaaattggatgactaatcacagtttttatgcacgcgtaaactataaattttttttacaagggaaaaggagcatcaataaacctgaactccaggtctcatgacaagaatactccgtccactcttgtcaaagtaatcagttcggtagatttttccagttgcagcttcgtttgctatctcatcctatattgaaattcaaatagtgcaaatgtttcacatagctctagaatggtacaaggagaatcactcgtatgtggatgtggataacatgacctgttattacttctctggagcaataaaaggtttcttaagtaaagaggtgaggacagcttacccaacggatctcatctggcttatactctgaacgccatttcaaggttttcttcaccttttcgtggccttcttcacttcccagttcctcgctaccaggtacctcgcaatcgaagcatctgagcaatatagcgcagcttttcctgatagttgtcctagggcagctcctaaaactttttccaacccccaatatttccttaatgagaagaattcaaaaatgagaaacaacaccaactgatctaacaacacaatagggttaaggaaaaaattgctccacggacaactcataagtaaagaaagggtcaaggggatgatgactaagaaagattgagttgcatttaaatcttatctgatgttttagaaccaaacaaacaaaaacctgaacctttgtgatactggctcaccttggatagccgctgctcaaacagtgccgcttcttttccatcaccattgttcacaccgcttgcggagctcatagtgtccttttgttactacctaccatagagcatagaacatacaagagctcataagaacatcaatctgaattacaccaaggacgataaccacatcaacattatgcattatgcatgaaaagcaaaaatatcataatgcacaagtgttgaccagtgttggctttgctgttatgcagtgaaatatgttctattagcagaaacaaaatcagtagttcctttttctaaaactgcttactgtcttcagctagtgtggcactatggcagcgttgcaatctaacaagccatttagaacagacagcacagaatggctaggaaatggtccatcataaatgcaacgatgttaacattaaccaccaactcgcatttcaacgatatccagttatcttccacgtgatcctggcacaacacaggagcgcacgagacccccaaatatccaatccggtgaacaaaacgaacaacgaggggacccgaacgcctaatttcagcgcagcaagtagcgtcagctcacaaagtacaagtccacaacccttacccagaatcatcgaagctcccgaaagaacccaaccaatctcgcccaaaatcgcactgatggaacagaaccaataaccacagaaccccaactcttgcttcgcgcgacgccaagcacatgccgcaagaaccaagaaacctagccacgttcttgagatggcacccaggaaatgccagaacacaccatgattctcccacaaactccagaacggcgtagcaagaaatgcaagattccacctttcgttggctcgaagccaataaatgcaaccacgcaaaaccaaaatacccccatacacatatccaccaatcggaagatctcccgcggatgcaacaaaacgctcggggacagcaacaaaacccccctcaaaagaacaaagcaaactttctccgttgaaagaaacggatgcttccagtcaatctcctccacccaacagaagccgcgacgacgcaacaaggtaaagctagttcttagcgctcacctcggcgagacgggacgcgcgcgcgcggtgagctcgactgcccgagcccccgattccggagtcgtcgggcttcttcgggttctcagcccaggcgtcttcctcagttcctcctccgtttgctttggaagccggggaagaaccgaagaagggaaaggtaagaagagactggtctgatcgaatctgacggctcagatttctttgactctatcgcgtggacgtatccgacggtggtagggctcgtggtacgggcccacactacgggaacaccgggtaatggagaggggaaaaatacatgtaagattttttgtccggtagatatgagctgtttgtgaagctggctttgggttcgttggcgctgtgatcgtgagtgctggatatgataggataggattggattgtttaaatgatgatttaatcgtatttaattgctgaaaaggttctttgaggtgtgtactccatctatcgcttggagaatctctatgctattatttccagcataactggatatttgggtgtttttttgccattgatcaatgatcagcagctccatcggatgttgcttttctaaaacttgtgcatcaggagacgttggtgtcactcagtatatcaacccttttttgcgacatccttgtaacattttctttggttggaggatgcaaggagttgattcagtacggggctctggtaggcagtagcgtcctgtttgaagttttaaggctacctttttttttttggtgattttgtccatagccgtccctcttgaacgttgaaaattttccaaagtacagtgctggttaggttggagaagtattattggggcaacacagtttgagttggccatgcatgacgctagctgtcacaaaactgttaatttgggggcgtgactcacgtttgtctgaagaacgtgattggattctccagagttgtattttctaaacatgggttttgaccctatctggagctctggaagtaccgggactccgggagcagcatttcattgtggcagcaccgcggtagtggtacgtgtacgtctctccgctgaaaatgggctggaagattcatttctgggccgaatcgacgaagatcttggttgatcaacccagtccgcacgtgtctccgcaacattttggcccaactcacgcagcgaaacaggctgaaaggccgaaaccccggagtcccgcgccccgtcgcttggtgggccgaggcgggaggaaagagttgctatccgatcctacacggattctacggaggcccagaaatcccaccgtttctccgtgctcggcccgcaaaaaacgctcatgccgcccccttcttgccgatcgtgcatcctcgcggcggtgccctcatctgctccgcgattctgcgtgctgccccactacgattcgccagccgcggcggcggtgccgggtgcgtcggtcggtcgctagctgacccagtgagcggtgatcgatcgtcgagatctgtacgcgcccgtcgcgatcgatccagggacggctgagttctgacttgtagtaacaatctgtctcgttcgttcttccacaggtccggtatccgaacaaaggtcaatactagtaaatctttgcaattgtgggatagaatagaagttctttttgcaagataaaacagaatattactaattgcaattatctcctttcgttgttactgatcagcttaagcatgaactttgcttctctgcccttttttgtgaacgttacttacttgtacacctccatacgtgcacaatatcacactcagtacaatcaggtagcatatatatgacgtcaacggtgcctcaatctttcttaaataatcattctcttgttcacataagttagattctttttttttctttttgagaaaagaagatagatggttacacttgctgagcaacttaaatcctcagccccctgaacgaagcagcagatttcccaagcaagcaaatgaaatgcaaccatgcgctggcttggaatagctcgatcagtacccaaccccaactcaatgaactggacccagctcgatcaaggcgtgaagctcatctcgaactcatcatcgccaaccatcatgaaatgcgacccatgatcaatcaccttcttgccgtcctccgtcgctctgctgaagtgcttgcatgggctcacctcgaactccacatggacagtctgcatcgacttgaggtgcaggctctggaagccgatcagctggctcgccggcctgccgccgtccgccgcgccgttcggccagcgcaggaagagcagcacggggtgcctgccgtccatggggccatggttctgcaccctgacgagcgccgggaacttgagcttgtcacacgtctcggggccaatctcttcgacgtcatagctcaccgtgcctgcagctgctgtcgccatcgccttcaggccatcgatgctgctcaaagacggcagcttcgtgccgtttgcgacgaagtggtgagagtacttcgagtagctgaggccgtagccgaacttgtagacggtgttgcctcggtagaacctgtacgttcgtccgggatatcccgtggatggatcggcacgcatccgcatatctgtcatgggcacgctcgtgaactcctttggataccaggtcactggcagccttccacctgatgaacataggtcacatgtaacacagttcagtatttgaacgtactcatctactgatgagaagatcaaaaagtgaatgaaattttaccagggttgtgctctccaaagaggacctgagcaatcgcaatccctccagcctcgccagggtaaccagcccacaggatggccccaatcttgggattatacttagcaaaggtcacatccactggaccaccacacagtagcaccaagatcaccggcttctttgccgcgttagcgaccgtgttgatgaggttctcctgcattcctgggagcgacagttccagcctatcaacctcttccctctcctgatcttggtctaatcccatgaacagcacaacgtagtccactgaacttgccaattgcgccgcttcaccaattgatgacacattgcaggcagccgagttgcacccagctaggaacctggtgtccttcacatagccttgcagcacttggagaggagtcaccgatatgcaaggagggccgaagtaattcccaagcaatctcgtggcgtcatttgcgttgtgcccaatgacagcaatggatgagacttgtgatttggacagggggagagcattggcgtcgttcttcagtaggacaacgccatgttgtgctgcttcaagggcaaggttttggtgctcctgcgtgcacacctggtctgggccaatgttaccgtagcggttgtactttggattgccgttgaagagccccagcctcatcctgacagcgaagaggttgtggagggctctgttgatgtcttgttctgtgatcttcccttgctggattgcagatagaccatgttcctgcacgtagctgccgcagttcacgtccattcctggaagtgtgttgttacagaaggtaagaaacacttcttaaaaaaataatatggagtatatcggatcgttgcattaatgttagaagcaatttgcatttgttgttttattgttttaacttttttgttgatttggacctactatctactgtcttttgctactcattgttgttgacttgaacccttgccatgtaacaccagaatgactacttacatgctgagttagttttctttttgaaccttttatatactgtcttttgctattcattgtcgttgttgacttgaacccttgctatgtaacactagcacaactacttacaagcagaggtgatcttccttttttattgacagatggattcctgatgatatcatgatgttcagtgtcatgccatgaattatttcttagtggactcactgaaatacctttgtttagagaacagatcattaatctcactcaagtacctaaatcagcaaaacgggaaagctgtatgcctgtatgggtagtgggatccaaatcaacttttggttgcagttcagtgacctaacctaacctccctatatctttgcattattcccggagggctccatgtgaggaaaacaaacacttgaaagttgcaaaatagtactacttccgtcccgacacttgtctagatttgtcgccaattttttttttgtttttacagaggaagtaacatatttgagatactacaatatattgtggaattaccccatctctgacaaagagtaataggacaattgggtgattctgaccagtaaatatatagtggacaagtattactaggtgtgatgtgcaaattcataccagccttgaggacatctgcaactgcatcttccgctgtcttggcatatccttggacatcatggatgatggacacagcatcacaatctgaggtgatatatctgtcaacagaggaaaacttgcaaggatcagttgctgggcattgtcacatacacactgaacaaaaacttcatgtctaggccaaagaaaaaactgatagctccagtcattctggcttacccgtaaaacctccaatctccccttgcagttttggagaggaggttgtaatcggcacaagttggcacgccattgacgcggttgtaggagcacatgatgccgctggccccgccgtcctcgacgcagcttctgaacggagggttgtacgtgtcggccaggtcctgcgccgtcacctgaccaaaaaaaatcgcatcactcagagcctcgtcaatggcagggtcacccaattagccagaccatttgctgacagaacaacgtgtcgtgacgggtcaccaccttggcgtcgaaggcgtagcgggtgacgcccttccagttctcgaggtcgtaggcggtgaagtgcttgcagcaggcggaggcctcgaggtcggtggagttgatggcgccggcgagggcgtagccctggacgccgcggacgaacacggcggcgtacttgccggtcaccgtggggtcctcgccgggggtctcctgcccgcggccccacctcgggtccctgaacacgttgatgtttggcgcccagaacgtgagcccttccgcctgcccgttgttgtacaccgccctcgcctccgtgccgatcacctgcgttgcgtgcccccaattgcacagcacccaaaccagaatcagtttacagaggaattcaggtacggttttctctgctcttgtttcgtgttactactctgcatgttgttgcggtttgctgcgttgtttagtagtatctgctttacgacttgttaccgtctcaaaaggttgcggtgaatctcattacgtgcttttgacaaaaacaaccccaaaagttgcatgcatgtaccgaacacgttcttacctactcctataggtccgtaggtgtacaaaagttcatagggccgacgggtgatggattaccaacaagctgcctaaaatgtgtggattattggactcagtatgtaccagtagcaccctgaatatattactgacattctgggcataaattaggcgcaaagactcctctgtttcttttaacccctcaaaggtaaaattgagaaagagactacaaatcgtaattcccagttacacttattacacttaagtcccttccagtactgaacagtaactaaccactggtgttagcgtgaatttgcaccaacacggtaaaaaagtaaaagtgaggaaacgatcgaggccgtgcatgcgctgagcacgtacgtgcgtacctggccgatacggtaccagaggtgcgggttgaatgacgcggcggtgaggatgacctgcgggaagctggtggcggcgcggagcgggccgtcgaggtggatgccgcggccggcgttggagacgccgtggagcgcctccgaccaccacttgtacgccgggacgccgagccggtcgacggccggcgactggtccccgagctgcgagatcttctcctccagcgtcagcctcgacacgaggtcgtccgcgcgctgctcgatgggcagcctcgggttgcagaacgccgcgctggacggcgcgccgcaggagaagggcgggcccgacgccacggcgaccgccgccgccgcggcggccagtgccagcagcagcaggagcggcgccggcgcgtggaggagagcgcgcgcgcggcgtcccatggcttcgtgtgcgggtgtcacgtactgcgctccggagcgaatgtgtgtgtaagtgcgtgccaggggtatatatgaagcaaagggcgcgaagcacatgggagtacgggctgctgacttgtggggctatgccgctattcacgtgcaattacaatcctgcccgtttcgtaattttgcattgacaaatatactcccaccgtccttaagtaacaaaccaggatggatctaatcaccataatatgtccatctcaaaaatatagttaccatgtacagttgtattggattagatataacttagtataacgaataattgccagaatatgtagaactagaatatgatcaatcatgtgctaggtttttatattttagaagagagagtagaatggatttaattctattctaggtcgttatgtccagatttatagttttaggatggatctagtcaaattctagattacagcatatcggaacgaatgctctccatggatcatagtgatgagaaagaaaagagcattgcctttgtatagggcaaattcactgtgttggaacttggaatcaagccttttgttaaacgacaatcttaaaaatccagccatttagccgaaagccagcgatggcaccgaacaagttcggagtgcaacaaacgaaaaacgatcgcatactcctcaagcgatcgatccagatctacgtaaagttgtcacaccacgacgcgtcgtgtggctgccactagctaacataactgctagcgagtagagcagtagcggaaatgctcatgcttacgcttatggaaaatgcttacggatgctgtaagatttagcagcaggaggcaagagcggtgtgaccaccgatgggcaaactcgtgacttcacaggtttgcctgcctgcctgtgctttgtgggtttggctggaccgacgcccaaggaaagcaagcgatagtgcgaactgggaagaggcgaggcgaggctggcgtccgcgcagtagaccgtggtagtggtggtggcgtcctccgccgtgcgattcccgcgatatcctcctcctttgccactccgtggcgcgcctgacgtaacgcaactgcttggacccgcagaaagtcagaaatcgttcgagtcgtgggaaaaatttctgaattatagctcggtgattttatggtatcggatttttgacgccgaggacagacgaagcgtcagccactggtcaaaggagaaagaacaacaagttcggacttcgaagtactctgatactattgcccttgcaacaatgctcgtggtctgatcgagaggaccagatcgctctgtgtgatcactgatcagtggagcctacggcctgaagagaatattgaccggaggttaagattacattttgtctttttggcactttgcagagaagtgactggtgcgtgcccatggtccggtttgtactcgtaccgcatattcataaattcctcgagtaaatttcacaaaactatatatactataactaaattatcacaaaactacagatttaactcggtatatcacaaaactacacatttaacatcaaactagctgggtggcccgctcacttgcgcggctagcacctaaacaaaatcatatattttttagtatggttttactttaaatttgttaaatagttatccctgtatttctaattatatagtttttaaaagtcacaccagctgctaccccttacttctgtcatatccttctttatttgcttgctcggtctaccactatttctattcattctccttgaaactttaaaaattggatctgttttttgagtttattatctcgttgggtttcgtttttataatttctggaagtctcgtcaaacgctgccattatactcctctacggcccgtccactgtcttttctctttattgtcattgggattttacaaatcgaacataattatcgttcgagttcattttttttttactttttataagtcccgccaaaccgtcagcggttttgccattgtactctttatgcctcacccgctgtctcctttttttattgtcattaagattttaaaatcgaacatgattatcattgtttttttttactttttagaagtttcgtatctttaaaaattggaccctgtagtttttaaaatttattgtcttgttgggttttatttttttataatttttagaagtcacgtcaaacgatgccactatactcctctacgacccatccgacacctactctttattgtcattgggattcgaaaaatcaaacataactatcgttggaattcttttttattttctagaaatcccgccaaccgtcggcggctctgcaactatactcctatacaccccggctgctgcttctcctttttattatcattgagattttaaaaatagaatataattatcaatggggtttattttttttactttctaaaagtcccggcaaccgccttacccgtttgcttcacggcctggcgatagttggtgggacttcttgaaagtaaaatatgaattccaatgatagttttgttcaattattaaaatgctaatgacaataaagattaagcggcggatgggtcaatgctaatgacaataaagattaagcggcggatgggtcacagaggagtatattggcagcatttgacgggatttctaaagattctatttggtgtattactaacagtttttatatgtcgaatcaaccgctaccactctactcttttataggcttgttatttaatttatctcaccgtgtgttttagatggtctcttttttaataatctttatttttatcaccaattttagttatttataaattgtattctattttaaatctttttccttttttctttttctaatttcagattttttttaaaaaaaaatatttaataccgtatagtgttcttttaatatttttatttttcgtttttgaatttcagttgtttcaaaattgtattcctacttgaactctcttttaatttttctaattttggatattattttatattttattctgaattttaattaatctcgtatggggttcttatatggattcttctttaaatattgctttttttttaattctgaattttagttgattttaaattgtattcctacttgaactcttattttatttttgctatttttggattttatttttatttttatttcaaatattaactaatctcgtattgggttattatatggactcttttatcaatattccttatttttaatttctaatttcagttatttttaaattatattcctacttggactctgttttatttcctaatttcgtattttattttatttttatttcgaatttcgattaatctcgtattgggtttttatatggacacttctttcaatattgctttatttt

SEQ ID NO: 20292 - DNA, 14989 bp, Oryza sativa
catataataacatatatgttttctcaatgtattattcaaatatattaaaatgacaatataattttaaatttctaaattgtatttctatatggactctgtttttatttttctccgattaatatgagaatttcgcgcaattacgcggctagcacccaaacaaaatcatatatttttttagtatgattttacttaaaatttattaaatagctatctagctatctcattgtcttaagattttgaaagaacaaaccttatcatcctcgtgtttctaattatatagttttcaaaagtcacaccagttgctaccccttatgttatctccttctttatttgcttgctcaatctatcaatatttctattcattcttcttggaacctttaaatttggattttatagtttttagagtttattgtcatgttgggtttcatttttataatttctagatgtcccgtcaaacgttgccattatactcctctacggcctgtccactgtctcttctctttgttgtcattgagattttaaaaatcgaacataattatcgtttgggttcatttttttactttctagaagtcccgccaaaccatcagcggctttgccatagtactcctctacagctcgcccgctgcctctgttattgaaattttaaaatcgaacatgattatcatttgcttttttttttactttttagaagtttcaaatctttaaaaattggacttgcagtttaattttttataatttttagaagtcccatcaaacgatgccactatgcccctctacagcccgtctgccgccaaatctttattgtcattgtgattctaaaaatcgaacataactatagttggaattcatttcttattttctagaagtcccgtcaaccgtcggcggctctgcaattatactcttatacaccccgcccgctgcttctactttttattgtcattgagattttaaaaattgaatatgattatcaatggggttttttttactttctagaagtcccggcaaccgctttccacgtttgcttcacggcctgcctgacgtccctccttataatcgtcattaggattctattttggtgatttattaacaatttttatatctcgtatcaaccactaccactctactcctctataggcatgttacttaatttatctcgtcatgtgttttagatggtcttttctttcaataatctttatttttatcacaaattttagttatttataaattgtattcctaattgaaatcttaattttctttttctaatttcagatttttttaaaaaaaatagttaatatcgtattgtgttattataatgtttttattttttattttcaatttcagttgtttcaaaattgtatttctgtttgaactctcttttaatttttctagttttagatattattttatttttattataaattttaattaatctcgtattgggttcttatatggattcttctttcaatattgcttatttttacttccgaatttcagctaattttaaattgtattcctacttgaactcttattttttattttcttttgccaattttggatttatttatttttattccgaattttaattaatctcgtattgggttcttatatggactcttcttttaatattccttatttttaatttcgaatttcagctatttttaaattgtattcctacttggactctcattttcttttctaattttggattttaatttatttttatttcattttttgattaatcttgtattgggttcttatatggaaatttatttcaatattccttatttttaattccgaatttcagctatttttaaattatatttctacttggactctcctttccttttctaattttggatttttattttattgttatttcgaattttgattaatctcgtattgggttcttatatggaaacttctttcaatattgcttatttttaattccgaatttcagctatttttaaatagtacttctacttggtcttctttttctttttcttttctttttctccgattaatgtgggaatttctaaccccccacagcgaacatggtgtctcctttcaaagctgttttaataatataatagatttatcacaaaactgcacatttaagatgaagtgtcacaaaactacatatttagtaactaaattatcataaaactacaggtttagaatcaattttatcacaaagtaacgatgtttatagctccaccataacaatgatgctagggatttaaactccaaaagttgtagtttttttataagttcaatattaaatatgcatttttatgatacttaatctaaaatctgtagttttgtgataaatttggtgctaaatctgtagttttataatacaactccttaaatctgtagttttgtgataatttgatcaaaatacctgtagttttgtgaaatttattcaaattactttgtcatcattgatatggctggtgagcctttctggcccgtcgacagacatagtagtgaagtggagtagtagcttgttgcatcactagaattctagaaatgccaaatggcgacagtgcttcgtggatataatttccagtgagcttggtggtgcatgcacttgtttcatcagagtgcctgacaggtcaacacaataatcttgatcgacatggtaccttatctagcaccggcaaacaggaagccgcgacatcattgtgttatatcgggcgtgatgtgtggaaatagacgggagagaggaggcaggtcagagcaagttgcacgggacgtcgctattacagcgagtaaaagacaggctcactctactcctagtttactactacaggactggcttgctaatctgtgttcaaactttcatcgttgaaactcaaaggacctgtttcggagacaggtcgagatcaagatctttacaattgaattggatgtgtgagcgttgaaggcgatcatggcagaaaagttgagacatataggtaggaaacggctttgtaagctgccgttcagaatgaaagaagtgatagagtcacacgagacaagtacatagacctttgctgctggttttactgcaaaattttttgatgggaaaattggaaccatgccattataattttgcaaaatttgagatatgtcatcctgacccacatgtcattgactcatgtaggtcctacttgtcattgagataccgatggcatatctcaaactttgcaaaattataatggcatggttccaggtaaacgtttcacctaatcacctacggagttttttttttcctttctgttctaaagaagtgtgctaggtagttacgattccatatcaacaaaagccggcattcccaggataatcgtggctaactgacgaagcagattgcaagtgcggtgtcggtgaggagctgagtacgtacctcaagctatcatgccacaggtatgatgaatttcacgttggaaagaaaatccagcaacgccatctgatcgtgttaggtggcaattaggtccagggctccaggttgacagagttcttgggatttccattcttctgaactttactgaactttttcattcacatactgacaggtaaggtaaactcaacatttgtccggtccgtagttcataccctactaccgctagtgcactgtgcaccaaacagatcgggcaattcagcgcttgttttcttgcaagcgtttggactaagcatgcatgttcctggatctagaaactgtacgcccacaactccacaaggccacaacatactccaaaaatgaggacagtgtacaactagctgcacatgcgatggtattgcagctaatcatatgagacgtggagaaaacactgcaagctccaggtcaccgtgaacgcacgcgcatgcactcgactctgtccataattgctggtgactgtagcggcgtagccatgtgtatcgtattcgagcttgagcacaaaagcggcattaatttttggccgacttttctcgctggagtgtagacctcgacatgtctggagttgtctccgggttcgtaggaactgtgctttgctcttagcctaatcagaacgggttggcgaggtcgaaagtccgaatatccttttgcagttttgcagtgttcgcatgatgctgattaattcatttaattggctagtaaccgagcaagaaatggaacgtgtaagaaattgaagttgctgaattcagctaggtagagtgtagattatgtggttttcagggccagagtcaaaagttggtacgaaagttgggacggtgcctctgagatcgtgattgtttaattagggttttgtaccattactaaatgctctcaacatagtgctcgcggaaactgcgaagtggcaggcagatctctccttttacaacccactatccaaaataaatataaataaataaaatcacgtttatttggcagatggcactcttgctcttcgacgtgatctgtggctgcggcaaggatacaatgattgagaggtaacacagtgcagttcatatcggtgctgttttatcttgaaacctgcagctccattgataattgctgtgaacaagcagccatttgggccaatctcgcacagaagtgtactggttaacttgacatgaacgccagagtacaagttgaggaggttgccatatgctttgggatggtcaagtttgttgcaaggtttcagtgcgccacgtcacagaaagcaaggatatgcttgcgcatacattaggccgttttgatcgcctatcttctcaataatatgagaaatgaataatgaattgcttagccttgacgcataaggaacgaaacggcatcaggaatagctttattttgcattttgcgtcatgctgtataagttacagactttgatgtgcataccattttaacagtctttggcttcatttaacatacggagcatgttcaaggtttatcgggtagaagtactacttcactgttggctgtcaaggatatcctgacgagacagaactggtaccggagtaatcagcgtcccaccagcaggtactgatcgctgaatccactgttcattgatatgatcaagatgtacagccgcaagatcgctatcgatcagaaatgtggcagctcacgttattggctgatagaatttgcaagattgtgttacaatcgcggcaccgacagtggtcttgcaaagttgcacaccttcccaccacccacgcaaaagattttaacaaccgtagagaatgttaaagatcagattgaaaatccttgacaatgcttgtggttacagcgatacaggcatcggccggctcacgcaagtcaaggatagtacacgtagtaacagcaaatctgcagagtacttactacatgttagccagtgtaagcaaacagacctgaacattgaggggcggcaagcaagaaaaaaaaagaagtcaaatcatcgttcttccaccattatgcttgggagcaggaaacaacatacagataccacatggcgcaagctaactgccagttacaactgaggagaatcatgtcgctaacttggagttccgaccttcccacacgatttttacaaacaaagatgctgaacactgcatataggtagtaccatcactataaccaaacttcctgactggcaataaccactaatcttcctagcaatcaaccaatctcaatgcacaacttgactcaaactggcccagctgatctgaagaatcccaggcaaaagcagtttaacagcacaaccatgaaagattcattttcccaacaacgaactgctagccgtctcgagatctgtcttgcagttctctctgaattcctttaacttcacaagagatgaatgctgaatgtaagaaattttttgaggttagcacataatcaaatattggcaatacagttcatcagtcaagtaagggaagttacattgacgtcaaacttagaaaaggtgtagaaaacatagtacatgattgatcataaaaccatacaacaatatgaatactggaactctgtcctatagcttgatgaacaatatagtacatgatggataccagaatcaatgaagttccgataacagaaaatcatgcaaggcactgaatgtaatattaatttatgatttgcaccaagtcaaatgctcatggtactccaagaccatagtcaccaaagtatttggagttacttttcatgaagacaccacagcaacaaaataaaatatttagtgctccatagaggaccaaagcccccctgccccaaacagacacaagcggaaaaaaaaaggtgctggtacacataaactagtttcacaacctttatttaattaaacaacgaattcacaaatgccttttacattatggataaaatcagaacagagcccttcgcacccaaagtatcacaacctccattgcacaggaacggagaaacctacagctagcccaaaaaggcccttgaattttttttgggttaattagatccatgctattataactttcacggttttgaaatatgccattacaatccaagtatttggaattataccattataacttcagggttatttgatatatatcactacttaccccttcaacccatattctaattttttggacgaaattacccctttcttcttcctccaatccttcctctcttgagcaagccgggatcagtggaggaggagctgagcaggtcctaagtgcatgtccacaagctccttgtccatggcgcattgcacaaccgagaagtttcctccagtatcagaaaagcagcacactgaatcctacaaatgttgctcctcttcatcgatggcagattggaaatttgatttccccaaactggctgtgtagctcggcacacagcctgcagccatggcgctccgtcgccactgccgcttgaagagagagagagagagcatgcacgtctcctccacatcatcgggttggcgaagacaggcccaaccccatcgccggctacaccacctccatgaccacgaccatggagatgtcagaggccaccacgaacgtgctctccgccacctactggatgctcagcgaccctgtgcagcaccagtgtcacaaaccgtcgctcgtcgagcacccagtgtcacagaccgtcactcggcagtgtggcagccccagccactgcggcgagcagggagagcaggagacaggttgaccgccgggggcctcgaactgctgtcgtcaatgctccgagctgtagctcgccagccaccagatccagaggatgaacagaagagagagagggagaggagatgaaggaagaaaataagggcaatttcatctataaaaaatacaatatgtgttgaaggggtaagtagtggtatttatcaaataaccctaaagttataatggtatagttccaaatagttaaattataatggcatatttcaaaaccatgaaaattataatggaacagatctaattaaccttttttttaatgacagaaggggccattgtcatattgaagatagcagcgcagtcaactaattccattttgcactccgggcatgttcacttcattgccaaaaaaaccttaccaccaaatattggtaaagtaaggtgggggtgcctccgtggctagtgtttgctttgataccttaccaaaatttgggagtagttttgagagtagaaagttctagaattaccaaaaattagtagggttatgttggcaatggtatgttcagttccttgccttactaaaccctccattttagtaaacagtaatgttttctgctgatcacatcatatatttttctaagggacctaataatgaattctaaaccattgagcatcacatggagtaatgagcaaatgatccttccaaatttactggcgcgtacaaacagctagtagatccatattaaatacactgtatcaaacacaacatttttgcaaataatctcaggtatgctttaaacattgatgccaagcaaatgcccgtacaacattgaatatgccaggaagttcgggggtgataaagaaacttacaagctgtgcgctctcacggataaggacattttctgtatgaaggaagagtgatctttgctgttgatatagctcaaactccatctctgcagcccgtttcaagttgtatctgcctgcattaacagaatattcatctccttggcttctcttgcccagcaatctagcgaactttatgctcttcttcaatgctaaaagggtaagttttcagagattgaatcaacattagtgagatgatcagtagtggcctacatcatctatatgtagaaaaggaaatgtgctgcatttgcaaagacataccagcaagccgtccccttgtgtcctgataatggagatcggtccacatgaatgcagctattttgtacaagaaaacagaggttaggtgtacattcacctagcatcatgatgacgtggaaaacatatcttgaaggaagaaataaatgcaaacatacccttaagacagaaagaacaagcacacgacttagtggtatcgtcattttccagttcactatttccagtgaatggtgatggacatcggaacatggcatgtcatcacaacctgttgtgaagtccagtgaagatagtggcttctgattccctgatgatccagccatctcctcttgagtaagacattcaccatcattagttgccgttttagtactatctctggtatatgccaagtattcactatccatgtcatcatcatcatcttcttcacagccaccttctgattccagcgaagactcctgctccttatcatgcaagccagatgagcctaatgacatggcacaactcctcatgtcatcggattccttggatagcaacacagctgcctcagcagccatgtgctgcatcttagtttcccgaaaaattgagggcctcattaaattctctttggcaatactatcaaaaaggggcaatgtgtttcgtgtcgctccaccacttgcttttgcagtttcatcaaactcttttcttggctcaacagccttttcaacccggacaatcttgattccacctgcacttttctccaaattcgatggggctgggcgcttgccaaggacatttgttaaatctccaaaggggcggcgaccactaccttgagcgttttcacccattgcaacttccaaattcactctggtcggctaagtggatagcaaaatcttcaccaccaaccttgtaaaacagaaatctgcggacataatcagaaacaaaagacactgtaagcgctgtattcagctgtcaacatagtttatatccaaaataaaggctaggttttctggatcattaaaacagttggatctggcctatagatgaggtgagcgaagttcatataattggacattacgagaaaattagagctcgtgcttgccatagtgtctattagatgtgaacttcaacgagatcgagacctctctgatacagaatcctcccaatctcgccaccgaccaagtcaaggatcaaaagcgaacaatgcaggtacgacataaatcaacctcaaactcctcatagactagagagaaaataggttaggtttcgccccttttacatcaccattccggatgtaaacagctgaagcctcaatccatggagaggatttagcgcaccatttcggatgtaaacagctgaagcctcaatccatggagaggatttcgctaaaagctgaatccaccagaaggctatcacaatgagccaacagggattccgtccgccgcgcaaactagaccgccagaaaccgatccggggggggaggaggaaatcccgcgggatcctacccacccctgcgccgccagaagcggcaagtgaagacggcggcgatgcgagaagggaggaggggggagggcggcgactggggagcacaaacctcgccgacgcgagacggccgcctttcccccggttcgccccgcgggagcggcggcgcgggcgagagaagcaggagaggagaggggagaaggaatggtggggttagtagtaggaggttttattccgagacgcggcccgcggtggagaggagcgaaaaaatggagcgggcgggcggcgggggcgaggggcgaggggcgagggatgggatcccccgcgcgcgcgctcgcgttcggaatttgggccgcgcgcgtcgcggtcggcgcgtgacggggcggggaggcgcgtggctccggcgcgcttttggagttcgtcgcacagtgacacgtggtgggtggacgattcggtgtgttggcgatgccgaggcgaacggcgttgaacaggcctggactagtcgattggcttctgggttgggccgttagtgggctaagaaatataggaggagtgagcattcggatagatgtcgtcctcctttcactggatagatagaagggtatatctaaacgaacttttgattagtttttctttcaaaagctttcaaatttttagtgtatttacgttgtaacttatatataacttagatataataattagtcaggaaaaacatgttagacatagtggccagcccatcaatcgcacttttgttgcacagattgagtttgaatctgaagcaccgcatgcataaataattttcctcacatgcatgtaagaatctcgagacaattcaatggacacaaatttaaaagttggtagaaaactaaaaccgtcggaagactttttgcaaatttgagataggatggcttagaggcagagcatatattataagaacctaagcgctagcctcaacatgttacatagggcttgtttggtttgctaccatgccaaaccataggcaaattttggtaataccaaatgttttggcaacttatgtgtcttattagtatattttggtagcaaaccaaacactagccaaactactattcaaaatgccaacaatttgatagagcacatttcagcatcaaaccaaaatggcccataagcttacgctatgatgggtagaagagagaaagtatgagagataaaagaagacacctcttatacaagagatagtcgacaaaagggaggaagatgaagattatattggacaaacaagtattgggctaatatattagagttaatataaaggtaatttatttgtaaatgattacctttatatccatgattagatgcacatgaacaagagagcaaacacccctattagtataaacccactactttaggctgtgtttagttccacgctaaaattggaagtttgaagaaattaaaacgatgtgatggaaaagttggaagtttgtgtgtgtaggaaattttgatgcgacaaaaaagttgaaagtttgaagaaaaaagttggaatctaaacagggccttactccaaatattacccatgtcagcaaaagtcattgtttaatcaatgcactgttatttaaattattatttttctccttgttccgtgcactctctcctgacacaagtggaattgctcaaacctgcattggagtgcaagtgcagccagcgcgtaaacaatcgtccgatgatatagggttgattttgtttgataccctaccataccctaccaaaccattggtagtgctaaatcttgagcacgttttagcactaccaattaccaatgttttggtagagttggactatatgggttgtattagctatggcaaatattggcatcgatccaaacatctagtataaagtactatttaatttgccaactttttggtatgacaagttttggcaccaaaccaaaacaacccatactctctcaccttctaactcaccactaaaactggtgtggcttattgtcctaggctgcgttcgttctagcttgtttccaactcctctcacttgttttcagcgtacacgctcttaaaaaagtttatatttgtaagttgcttaaaaaaatcatatgcgagaatatacgaaaagcctaggatcaatattcaaattgttgcaagttgcaagttgtttcaagttgcttaaaaaatatacgaaaagtaagttttctgggagatttggaaagaaaaaaacgcaagaattttcaggcaacttgcaaccaccccaacggccattctatccagaattaaggaggaagcaagactttggatcacggttggcgcaaagccgctagctgagttcctcctttggaagagtaggcttttctcggtctgggaggaccttaaacttacttttcgtatattttttaaccctctctatcaacatacgagttaatccttttgcctcttgttttttttttaaaaaaaaactgttgtggcaggtttatagttattgtatctactcttacagatttgcttttttacagtaatcttcttttatagtatcctgctgcaacgcatgatgcaaagttgcataccgcagacaacgattcatactctattcattcttaaaaaacttttgggaatgcaacaaatgcttggccgtgtttaattctttgcccaaaattttttttaagtatacggacacatatttaaagtattaaatatagactaatagcaaaacaaattacaaattccatctgtaaactgcgagacgaatttattaagcctaattaatccgtcattaacaaatatttactatagcatcacgttatcaaatcatagcacaattaggctcaaaagattcgtctcgcaatttacatgcaaacaacgcaattggttttttcgtccacatttaatatccatgcatgtgtccaaatatttgatgtgacgtttttggccaaaaatttttttggcatctaaacacaccactcttgttcaaatttatctgtacgagttgattattttctttttacagtttgattcatgaagtccgaaacagcaaacttgactagtcagctgttgatgcgaaaaaaaaacacacacacactggcctgggagatctgcttagctccagggcaggaccaaaggttgatgagatgcgggcgtgccagtcaatttgatcccgcaactgacaagatatacaaatagcataccaataagccagtcggctgtcaagccgatggagtaattacagtcgatgccgatatcagccgatagcggtagggttttgagctatcagctatgtgtttgatgtagaatctgatacttgatgtaaataatgatatatatacaatcggctgatgatgatgtaataaaataacaatataatcaagtagaaaccaatcggcttataatgatatgataggacaagcatggatctgaatgttaaagcgtacatcggctggaggttcgatgtcataaaattcacaagattagataaacaatgaaacctttgttgcaatcggctaaatccaacttatatgcaatccttgtaagccgatgcaacgtccagatacctcgtcggctaaaatgtcacgcccagaaatttagcccaaatttccagactattttgtgtattaaatccctgtccaggaccagtcagggtacacaaaacgacaagtaataaacagttccaaacgtaaataaagcgtaaaatacttacagaagaggcacttagtcctcacaccgaaacaaaagcagcagcagcggaaaaaggcaatcctagcggggcttcagctccactccacaggcaaaactcaactggggtctgagccttggtcctctaactccatcttcagctcagaagcactacacttctgaaaagggggaataatagcaagactgagtacaaccaccgtactcagcaagccacaccaacgatgcagacgtgcaaggggatacaaggaggggtttgtggctatttgcataaaggcagttgtaaaacatttcattgagcaaaacagtaaaactgtgagtaattaaagtaacattaaatctccactgatcaacgctacaccacgttgaacaggcccaaccaacccacctggactacagtgcattgggtcgatttaaaaagatgggactaatcacggtgaatctggtcgaccgcccataaccgcgggcacggctattcgaatagttttactctggccagaggtgtacaactgtacccacaagacacagccccacgacacgtttccgtgcgccgacatgccaccacgacataccggaaagaggccgtgacaggacccttcacataaccccctctagccaagcacaccacacctcaggtttcacccccatccccagcgggcaacgggcagtcccctctcgtgcctaggtgaatccggaagtgacagaggccgtcgcagggcccgccccgctccatcacgcccacccttgcctggatgcgtcgactagaggaaagctacactacaagcccagccgttgcccacgctggcttgtggtaagtacgataagttcttccagggcatcccgcgaaccggtccttaactgccatgggtgcgaccagcaaaaccatgcacccacagcccaccattcagtcgtattttaatcggataattacgaccatgaagcatggccagatgtctcgagcacgcagctcactctgataccaaaaaggtctaatattgtaattatcccatcaactgagctagtggtaattaagcatggctaagcatatagttctagctaatcacataagtaacatgagctagtcgatttattacccaaggttgacaaaggatagatatcaagtaaacgtggcacaagcgagcagataggtaaaccctgatcccgtgtaattagcaaaacatgcatgtttatttgtaaacagtaaaacatttgtaaattaggatcaaaatgctcaaggggaatgtgtgacttgccttgcttcttcacttggatcttctgaactcttatccttgcgaacgcgatcttccgaaacgacgggaactacacgctggcacgcaaaacgaggaaaaactctaataaaaaccaagaaaatagtacataaaaactaaacaaacatgtagagatcaattttagatgaattttgcaagttgaatggctcaattcggagttcgaatgaattagatatgaattttagaagttttgagccatttaaatgaatttctataattattcacgaattattgcgcaattattatttattttacaaaggaaatggacctcgctgacgtcatcaaaggggaggggcggggccggcaagcgggccccaccggtcagcggcacaagggcgccggtccaccgtggac

SEQ ID NO: 20293 - DNA, 2670 bp, Oryza sativa
ggcggagttttgtggaaatggagcggtggccggtgtgcggcaaagagcggcggagccgacggtgcaagcggcgcggccggcggctacagcgacggcggcgcgcagccggagcttgccggaaagcggcagagcgtgggagcaacgaggggagagcggtagggagtgtagcgggttcgggaaaattggggaaaagggggaggatggcacggggatcatttttataggctcggggaggagaaatcgtggccggacgtggcggatttgaagcggcaacggccggcgacgtgggtgacatcgtgggcgaagtggggctcgattcggcgccaaaaattggggaaaagcgggggaggaggtggaggagaggggtggttcccggtcccatgcgagagagggctcgaggaggccgggaatggtggcgacgtgggcggttttcggcggccatggcggcaacggcagttgccggcctgaggttggggatgacaggtgggcccatgggtcccacctgtcggccaaagaggagagggaggccggctggggacgcaaagtagacttcggggaggagagggccgagcggcgagctgggccgagggagagagagagcccgagaggaggagggggattgggccggggcggcccaaaaacaaagacggggaaaaaaaattatttgttttctttttattttaattgatgcaatgatctttgtgctattaaaactatctcttgagctccgaaaattcactagaaatttcagagagtattttagggcacaaagaatattgcgaaatattcccggccaaagatttttttaaaggaaatttttaatttcctctataatttcacttgattaaattgatttaacttttaatataatttctagaaatgcattattaattgatttttattcccgaacgaaaatcggggcgttacataaaacccctatgaaacccttgttggcagtcaaaaggcaagctagggattatggttataaacacgacttagtagatcaaacttaactgatgctacactaagtatgaaaagaaacacaatatctaggcaatcaagccgttgactggtttttaaggtggtaaatgccttagctaatctaatctaatatagttaaacaatttagccaataccggcagaaaccctaaagcgagagacaaccgatagggctaaattgagatactaagactagattaactaagacatatgataaataggcaggcaaatatatcatccaaaccagagcaatccaagagattgaatgtgctgatgcagccttgaacgacgccgacgtagatgatacaattgtccggggcggtggaacattggacttaccccttcgccggagatcggaaagcgatgcagcgccgcgtcaggtgccaagtcccgccggacgatgaaatagagtagaaaagataaaaggtggtgatgcgctgaattgtattgatcgtggagataaaatacaatggccctggtgtacatatttatacccatggggagatactagtccttgtaatccttgtagaacaagaaagaagctttcctaaagataaaaggaaaacataaagtccttataggatactaaacacactaaactaataaactattcctaattaatagataacttaccataccgcatcctacttgaactcggtcacttctggataagcttcctttaatagattaatttccttaaccgaatatagcaggaatccgactattggtgatgtgataattctcttaggggaataccaaatttcactgttaacatcagcgcaaaagatactaagggcccatttgaatcgtaagaatgaaaaaaactggggaatagaataaacatatgattctaataggaatgtaagtgtaaagcagatgattgcaaaacacagaaaaaacataagaatagtcgtttgattggaccacaggaaaaatacaggaatcggatgagagagatagactcaaaggatttttactaagaggttgaacctcatgctaactttcctcaaaacctacatgcattaagccataaatcctttaatcctttgcggaatcgctaattcgcgctgacgcgccagatacttatctcgctcgcccgcggcaggccaactgcgcatgcatgcatgcacctttgcatccacccatgcattacacacacatgcatgcaccttggtcccacacatgcatgtgccatggcgtacacccagcgcatgcattacacacgcatgcatgcatatataggatctttctttcttttttttcatcttattaggatgtagtgaaagttatccaaatttctattataagatatttttattagaaaatactttttataattcaaatttaaaatctcgagttgaaagttttcaaatctgagttaaaagtattcaaatctgagttgaaagtttccaaatctcgagttgaaagttttcaaatctgagttaaaagtattctaatctgagttgaaagtttccaaatatcgagttgaaagttttcaaattttattgtaaaatttaaattcaagtagaaaataattttaaaatttgagttgaaaggttttaaaatttgattttaaagtttaaatcttaagtcgaaagttttcgaatctaacttgaaagttttcgatttattagaaaaaataaaaagttctcttaggtactaattataatt

SEQ ID NO: 20294 - DNA, 7006 bp, Oryza sativa
ccacacacgctactctctctttattgccacgcccgcgcacgctgtttctgccgttgcacctcggatgggacacatgcctcgaccccccgccgctacgagttccgaggaggagatcaagaaggaggtggcggccgtggacgtcgtcgtcgccgcaccggacgacgatgtggccgccgatcgggaggaggaggaggaacagaagaagaggaagcggaggaaggagaagaagaagaggaggaggagggcgccgagcgaggaggaggaggccgcgctgaggtccgtgctccgctgggcgcgccgcggcgaagcgggcgatgaggaggcggacgggcagcgccccgctgcgaccgggaggcggcggccgcgcgtcgcggttgagctgcacgcgcactcgacgtgcagcgacggctcgctctcacccgcggcgctcgtccagcgcgcgcaccgcaatggggtaagcagtaagcacagcaccgaaatgcccgcgaacacgaacgatctcggtcacgcttgcactcgtcgtcaccgcaaatcgtcgcgtttcctaacgctaatgcccttgtgatcagcgcaggtgaaagtactcgcgctaactgaccacgacaccatggccggcgtccccgaggccatcgaatctgcgaagcagtgctccatcaggatcatacccggtgtcgagataagcgccatgtactcaccaaggtaaccaaaacatcgtactctctagtctctaccgccttgcacatacacagtcctgcatgtctgatcattgccgtcttgccgatgtcgttgatcttaatcagtgatggaataggagccgaggaacccgtccatattctcgcgtactacggtagtctgggccctgcaaaaccacaagaactcgataggtttctcggtagcatcagggatggccgctatacccgtgcgaaggggatgctgctgaagcttcggagcctcgacatgcccatggagctcgaagacgtgtgcaccattgcaggggatggagtggctccaggccggttgcacgtggctcgcgccatggtagaagctggatacgttgagaacattaggcaagcttttagcaggtacttgtatgacggtggacctgcttatgccacgtgagtatcctcctaatttgtccatgatcaatgtatgtctttgcaactatacttatcaggtgagtagtttgatttactcgtggtgtggacgtgtgttttttcttctgttcatttgcagtggcaatgaaccagcaggggagtctgtggtgcaattagtttgtagaaatgggggtgtggcagttttagctcatccatgggcactgaaaaatcctgtggctgtgataaaggatttgaaggctgctggcttgcatggcattgaggtttacagaagcgatggcaagctatcaggtatgaacaaagatgctcgtaaaaataaactcttttaatcactcgagtggaactttgattcgatggaataaccggggactgtatcttcgacaggattaagtgatctggcagatacatatggtcttctgaagattggtggttcagactaccatggacgagacgacaaggatgaacctgacgtaggaagtgttgatcttccggtcttggctgtttctggatttcttgatgcagctcaaccaatctggcacaatgctaccaaggaaattctggcaaatattactgaaagggcacctaatggctcaaagggactccaaaggactaactctgcaaaagatttatgtaacttgcgtcttctttcttcagacctggaggtaacagattctacggaggttgaggtcctccaaacagaactttcagatgttgtcctcagtaactgaggaccataagacacatattgaacaatgagcagaaatcaccatccctctagaccctctccagtcacattggctggtctggagcagttcaatctaaactgcaattcaatctgctcatattcttggagagaatacaaattgttgcatgtgacgccgttttatattattggctggctggattggaaaagtttcaaacggtaagagttgatcatttgcatattacgtaaaatcattttaggatatctgtaacatttcgtgcacttttttttcatcacttctccaaagtccaaatgctaacaaataaagttggaagtgttatatggacatgggtgcaagcgtatattatatcatctactccctccgtcccaaaaaaagacaaaccctgagtttccgtgtccaacgtttgaccgtccatcttatttgaaaaaaatatgaaaaaaattaaaaagataagtcacacataaagtattaatcatgttttatcatctaacaacaatgaaagtactaattataaaaaaatttcatataagatggacagtcaaacgttggacatggaaactcaggtttgtctttttttttgggacggagggagtacgcacttattttgcatatttgtagagctaagatcatttttcaattaatggttgtgtgtctaacggtataggctggagatataacccatttacttattatctcaaactaaaaaaagatcgttttctactaattgtctgcggatagtttgttttatcaatttccagcgttttatggaatatagagatctgagctttgagagcttccgagttcaaatttcagaaagaatattctgccgcttaagcgtgccatcttccgtttgtgccaattttgcagcccattctgatagattccatggaccggcctatgtaagcataacagcacgtgcatcaaataaggcttggccactgggccctgtgaaacgctcatgatgcgcacgatatatagatgaatgaattttatacattatagaaatgatagaaatgatagatgtatatgtttgaataatgtgaaaataatatgtaaataataattttacattaattgcatattgaattttaaaaatacaataaagttgtaaataatatgtcatgtttacatgatacttaaaataccctagataataaattgctagtgtatgatgatgtgatacacttgcacgtgatttaaaaaactctagataataattgctatttagtgatgatgtgacacacttgcatgtgaagctttagaaattagtgggcatcaactttatactaaaatactgtatgattttgtgtcgcgttagattgggttgtacttgtactagtcaaattcattacaacccaattcagttaacaaaagaatatgagcagcaactatatccagttaactgaattcgtttgctaactgaattggaaatgaatgtgtgtttattatataattttagtccaattatactgtcagtagaaaaaaatatacaatcaataattaagatgatagtataaatagatatgattgattaaactataaatgatttagattgatttactgatagtagagactagagagaacttgaaagcgtcgaaagcgcaagcacgaatttttactctagtatctaaatcacattaacctttttactcatttctaaacgtggcataaaatgtcagtagttcacattgcggcgtaaagcccctttcacccttttccccgtgaaaaataaaaaggaactgcatggcgatcttctggggcccaaccatggggaccgccggcgacgcgactgtcggtcataaaaggaggaatatatcccaaggagtaataatgctagagatcatcagttcatcacaatcacataaggataaactactactgtcatggcaggctaacacattatacctggtaatttcaggacataattctagagaagatgggtcgtgattgctgaaatattccagagagattgaaggatcccatcgcaattcacaattcacgggtacggttgaaacacttgaaacgtttctttcttgagctgtagatggacttcaagaacaggttcccggagtgatttgatcgatgctggcaaattaacaaatgtgtgattctttaagagtaagagagatttcaaatagccatttgtaaactttgtttcttctccgagaagaattctttgttagtttttgaaaacttcgcgagaataaatcttgcaagcaaggaagtagacttcttgcaaaaccagcatcattcatcttagcgtaatgaactttacaagatccgaagcttgtaaagtggagatgatgttctcccttttctgtgccatattcacatataatttgacgctgtagagatttgtgctccttttatttcttggaacagatgctcctttcagacatgcaaatctcaaaacaagtacacgtgattcatccgctaaggttttcaattccaggacattgcttttaatggatgttaatgcatttttcttttgtgggggacgtgtttgcagttcattttttaaaactacaaaaataaaaagacgctatctgcagactgatggaaaccatgtgcgccatctgtggtttgcagctgaaaagatgatacggtaccaatctcaccagcctctttggaaacacattggcaaacgcaccctaatgatggatctaactgccatcatgttgctaactgctcatggactgcagctttaacaaatcgcagagtcaaggaactgaaagcacaactgtagttgccatcgttacgaatagctcctttattttacgaaatgtggataatttgttatatatttgtctaaaacatactccctccttaaaaaacttcttgtgacgatgttaacataagcctataactagatacataactagaagttaatttttacgcaccgagaaagtattattattgttgaaaatatagtcatatatcgtcatattttaatccaaaatattaagacaataatcatgacatgaacaatgtggggtgatctagtgataaaataaaacataaataggagcatgcttaagatagaataagcatcatcatcatacatagaacgcaatagcattgtgactaacagaaatatcaaaaaccgaaataacaatagcattgtgactaacagaaatatcaaaaaccgaaataacagtagagggttataccctgtgaaagtctctccaatggattgtgaggcagaactacctccattggtgttatcgatcggtgcaccagctcccgggcagacatgggtgatgcagacgaacaatcgaaaacgaacagaggacgaggagcagtcgtgcagaagcactccccaaaaacccgcctacccggtacagatctcaggcgaaggtgtagttccggaggccctgctcgttccgatctcttgtgcgcgcaagcgatcagaaccggtgaagcagtagcagcacaggcagcggcgcgaggaggaggaagaaccagtgtttggaaagtaaccaacctcggcccggccggccagctcggctcggcgcgcgcgcgtggctttctgatccccacctcaaccggtaaacagggagcctccaataactccctatttaagttgagatactcctcttttaattcccagggtggtattattatccttaacatttattatggccccttgagatttaatagaaaaatcgggcctagcccatttattctaacaattattcactaaattatagctatggacaatctatttggatattgagataaattaaacattttgagaaacaaacttaatagatagtttgaatgatgtggccagaaaagagatgtatagacagtcccaaagacggaattgcttgagaaaccgttcttttgatagcatggagcaaataatcggtgaataggccgaaaataacatgtagtcagagcggtggctttgctgcacattgtataaagagggtctgctcgaaattaagttcacacacgcaaagtaagtctgatgaagattaaattcacacatacaaaagtgagaaaactattagcgcgtggttaataaaattttaattattataaaattgaacatggatttatttgatatttcagagtcaattatatatatgaagttataaaacatactccctccgggctaataatacttatcgttttagataagggtgaagtcaaactttagaatctttaatcatgaatcatttttaaaatatttatcttttaaatatggtgactacatgtataaattaatcttaaaaaatactttaataaaatcatatatttgttaacacttttatacatattatagtagaaaataatggtgaaaattattttttggagaccgtgctcatgtttaaaagataagtattatcaatccggagggagtatcgtttagtaatttgaaaaacgtgcaaacagaaataagatagaatctgtatcttaattgttctgttaatcggaaaagaacgggaactatccatgattgttttgctatgatccagtccagtctacctacaagtcacaaattaaacaccatgagactcgggctcgcaggacacaagagactatcaggaggtaagcgggcaggagcatgtgcctgcacgctgcacagtttctctgaagatctgaagcaggagtgcgtgcagttacttctactgttactagcctacccattatcagtattctgtcctcgggtagctgaagtattgaagagggcagacaggagctcatgctttcacgggcacaactacgactacaccactactgtccctttgggctcttcctgtatgggaggaagatggtggagcactagcgagtagcgtgccatggcgcagaagccgcgtttcaggactcgcatcttggaggtgccaagtcaaaaactagatgaactcgcatgatagtatggcactatcacccgaccaccaaccctgtaaaaacaataagaaatgccaatggagatagagatctactcctattatgtaaaacataattgttacgtgaagcatttcctattttggtagttacttcacaattaggaaaatgctatatgtactaatcttattttaataactcttactaacattgacatgtcatgttgttagcacacctgattttcttttaatgtccgtgtagttaaggcttgtttagtttcctaaaaacttttctcaaaaatatcacatcgaatat

SEQ ID NO: 20295 - DNA, 13852 bp, Oryza sativa
attgcaagacgaatcttttgagcctaattagtccatggttagccataagtgctataataatccacatgtactaatgacggattaattaggctcaaaaattcgtctcgtggtttccaggcgagttatgaaattagttttttcatttgtgtccgaaaaccccttccgacatccagtcaaacgtccaatataacatccaaaaattttcatttcaccaactaaacagggcctaaattaaatggccgtgattattgtttgtgacagtttttaagaatctttaagaatgcaatactgagagagagggaaaatactctctcgccacacacatctcacaaatttttgttgttttccatgccattttacggggaaacgattccaaactcttgattgaatattttccattttttgcatgtcgtttatatatttataaatatataaaaaatttaacaaaatagattaatacgtgaaagatcgttccacaaatatgtagggtaaaatttaacttctaagtaaaaaaataaatttaattgtacatatacattaactatagttttacttgttcttctcattgcaacttgtaaaagttgaatttattaatttgcatgtttgtgaagtgatatatcacatactattaatctatcatctcatttattttatttttataactatttcaataacttactaccgcatttgtttaatagatgatgccataaactttaggtttgaccattcgtcttattcataaaaaatacataattataatttattttatcgtgagtttttttatcactcaaattactcaggcatgatttacatatattatacgtttgaaaaaactttttgaacaatacgaatggtcacatatgtgtttaaaagttaatagcattatatattaaaaaacagaataaatataaacaattaggatatctcttcgatagtttaaaatccactcactttaagagaaaacgattctaaactccggagaaccattgattgcgtcggcgatcaccgccgatccacacacgtccacatcgtccatattgagtgcgtgatcaggccgccccgtatcgcgtcgcgtggagtagaagggagctttccattaggccccgcgtctttttgactcgggcgatgctaatcacgcacggttagccaacaattgcttggagcattgcccatttcttctcttgtgctgctctccctcatcacctcataccttattatagatggaacatgactgctcttttctcgtattcgaattatactatacttttcgtttggcatatgaacatcggaaggagttttgctcagataagataaccaaccattcgctgaacctgaaccctctagtcaaagagggatcgtagcacgtattttcagctacgtgaagcagaagcacgccaatagccgacagaaattcgcgtacgtgtaaagctggtagataacctgattggtgaggacgagagctcgccaactgcggcgcgctggtgtgcgtgcgtgaacaagatgggtgcggtgaaaaaaggcgtcgaggaaaacaccaaaaattgacgtgaatcgaatgattgggggcgcggcacgcgcatcagaattggattggattccaggggaggggaggagctcacctacacaaaaatgctcgccgtctcgtaccaccacccgtccaccacttgccgccatccaccacccaaaaaaaaaaattcctcctcttcacatccatccatccaatgatccaacgcaaccccaatatctgcctctaatcgacgcaattactgtactagtataggagttcttagttaggttaattttggaaggactagtgagtgtttttgtcgttgagctagctcatttcggagctccattgtccacaactttgtaaattggagagctcacacaggactaattaaacaagtatatcttaattaactagtgtctgatggagattagttttgcgtcgaaatgatgcagcagtttttttagtgcccgatgcctatcttctcgatcagcagcgctcctagattaattcgagggatatctttgattagtgagttcggtagtgggagacgctagcattcgttgtatatatctctatataggctgatgcaagtacagtacttgcagctacttctattttgcaattccatgatccagatgcttctggcagttcattagcccctcgtcttgaccttgcgtttccacacataaatacaacgctacagccagaaaaatgtcacatctcatcttggctacgcatggatcgattaatttacattgatgcacacataatcattactcagagcgaggttacttgatagccctgaattggtgaccaataattgttgttaagtactatatcaccttgctttcgatctcatccactaatccgtggcatggacgagaccactcgatcccgtggtgatcggtggtcgtagatcggtctgactattcgtgcgtaaacatcaagcgcaactttctttcgtgccaccgtaagccacccggaacgaacaatttttcgtcctcctcctcctgtcctgtcctgcagccgcgaggcgatcgacgatagatgacccgtgccgcgcgaacgagccgagcacaccgggcgtgcgcggaaatgctacggttttcttgccaaaaacgcggagatccccgtgcgatcgtcgcggcccaccacctcgcgcgcgcgcgtcgttgcgttttttttttgcttcgcggcctcgcgagacgctgacctcgcgcgggcgcggccgggaggatccatcgaaaacgaaggcgtcgcgttgcacgacgacgtacgcagcgcttgcccacgtggatcggcatcgatcgtttcgagatctccggctccaaatcggcggggcatctccccgtctcgtatgctctcgtattctcatcaccgatatgcgtgtcaacgtccagctccgtgcccacggttgtgttgctcgcgcgggcgctcaacttgcaccagatttttttgttcgccgggatcgatattagaaggcgctgcaacctgtcgtgcaggttgtgcttgtgtgcttatagtacccttcctatcggggcagattacttggccattctaattttcgacgatttgaagctggtctcgatcagctggtggataatcacaaatgcaggagatggattctaatagctcaaatggacatctacccatttattacatgtcaattagatagttatgaatttttttaaaaaaaattgataagatatatcaatatgtaatatatcactccacagatacacaagtttaaatttaacttctacaagttataacaaatttaattgtaaatatacatatagtaatttgagttttgtttgttatttttgttacaacttgtagaagttgaattttaacttgcatgtttgtggattgatatattacatatttatctattttgttcatatttttttatttttttcataactattttggatgacatgtaaataaacgagtagacatacacttaaactgttaaaatagtttccgcccacatgtggttttatatgtactgtgagaatgtatcgtacgtgtttgactcgtgtaggtttgatttgctagagaaatcgcacggtttggcaaaatcaaggcgtacacatatcgtactccacaatctctccggatgatataagtgtccccgaaattaaagctccgaataggtgtggcgttataatcttcggcaacatcttcccgtttgtgctttaatgtgcccaacacgcatttgcaccctagcttgctgctttttcagtgcataagcaacggattaattaattccctgcttctaacggccttctcttcagcttgcatcatcatgtaatttcagattgaacaggtgaaacattacaatcagcacacttgtatcacgaggattaaactcgaaagtccaaagacaaccacgtacagtacatacagacgcatgaatcagctcattgaaaggttgattgtaaccagcaaagtttgaaaaaactattcacctcgccattttttcctccttatgttgctatccaagaattgatgtttgtaaaattttcaccataagtttttgaccaaaatgcattattgaggggctccctactatacgatcacgtggctgtgttgaccgatggaaaacaatttgccaataataaaatcacggctgtacagcgcttgtaattagacctgcaaataatggcgatataattgaggaggcactagaaatcaataatgtcctttttcatgtctaaatcaatggtgcccgcttctccaataccaagaacagttcaagctcaaattgtttctaccaattcacaccactgtttttcttgtaacgcaacaatagcagttctggatttttttcccccaacccagcgaaagaaacaaggtgattttaaaataagaagaatatattcaagatatggtagtagaggcaaaccatcaaactacgcaaagtaaagctgaaagagaatgaatgaaagaataagaatccaacatatcttaatttacagagtaaatgccagtcattgaatacttttcaaaactgtaatggcctcagatggagaaggcttttagcccttggcgcaatccaaaaggcgaattcccctggacaaagggcagcaaaatttgaagtcaatccagcccaccatcagtccatcaaccaactacaggacgccacgtaagcaaaacacagtgtggcgacgtgcacacccctgtcctgagcacacgtggggcatcctcactggctgcaacttgttacccccgcgtgctacctgccgtggcctgacggcatgggcgaaagctacagcttatttgtactagtaattcacatttcaaaaaaaaaacccttttattttctttttgtatattttgtagagaaagattggcaatgaacagagaggaagagagatgcttgccttcggttgcgttgcgttgcttgcacggccaaagtggcgctatataaaggccatggtgtgaggcctcttcttcctcagagagacgcctcaaccccaccccaagaacaccaaagccacatcccatcccatcccagtccacggtgaggttgagcgatctgaaaaaaatcatcagcgacgagcagcaacaggtttgttctctgaacttctctgatctttttagaagcaggtaacacacaagaaaggtcctgtcccaagaaggtacttctttcgggtttattagatcgaaagaggagttcttgtgcgtacaggttctttctcatcccatcaacttctcctaggaggaacagagatccagagaaccttttttctcttctggattcttgccgatttttaggcttcctttgcttttctaaggccagaaagggttgttttgcaatacccttctagttcatcctctcaaatttttcttctttctattcaaaagctctttctttctttgcaccctttgtttctctacttttattgaggaacagggctgatttttcacttcttgcatccaaaaagcaccccttttttctttcctgtttttaagatttccatacccttgccatcttcatcttctacctccatccagtcctcatggccgcagcaatagacatgtacaagtataacactagcacacaccagatcgcatcctcggatcaggagctcatgaaagcgctcgaaccttttattaggagcgcttcttcttcctccgcttcctccccctgccaccactactactcttcttctccttccatgagccaagattcttacatgcccaccccatcttatcccacttcctctatcacaaccgccgccgccaccaccacctcgtctttctcgcagctacctccgctgtactcttcgcagtatcatgctgcttcacctgcggcgtcggcgacgaacgggccgatggggctgacccacctgggcccagcccagatccagcagatccaggcccagttcttggcccagcagcagcagcagagggccctggccggcgccttccttcggccgcgtggccagccgatgaagcagtccgggtcgccgccgcgcgcggggccgttcgcggcggtcgccggggcggcgcagtcgaagctctaccgcggagtgcggcagcgccactgggggaagtgggtggcggagatccgcctcccgaagaaccggacgcggctgtggctcggcaccttcgacaccggcgaggacgccgcgctcgcctacgacaaggccgccttccgcctccgcggcgacctcgcgcggctcaacttccccaccctccgccgcggcggcgcccacctcgccggcccgctccacgcctccgtcgacgccaagctcaccgccatctgccagtccctcgccacgagctcgtccaagaacacccccgccgagtcagcggcctccgcggcggagccggagtcccccaagtgctcggcgtcgacggaaggggaggactcggtgtccgccggctcccctcctccgcccacgccgctgtcgcccccggtgccggagatggagaagctggacttcacggaggcgccatgggacgagtcggagacattccacctgcgcaagtacccgtcctgggagatcgactgggactcaatcctctcataaacaagcagaagcagctactactagtctattactagtactagtagtagtcttcgtcaagctagagtcactcaactcaactagctgtgtaatcttctctgaattccgtggcttccatggctcggtggcattttagacgtcggccatggctgctgcgagtagcagtaactagtcagtactcagtagtagtaaggtcgttggtattacgtcgtcgtgcaagtgtcgttggtgtactcagtgatctgatctcctggttgagctgccggttgtttttttcacggcgcggccggtcgagaattaagctgtaatcccttgttacatgttggaaattcagtagcttatgtaactatatgtacctttctcacgtgcttgtctgatctatatgtgtgtagttgtgtactctcgagttgcctaatcagttgtcatgccttctgattgtgattattatgtctccgatgctactatgctagcctgcaattgcttaccatcagatactgagctgtgttaatccacatagaaaggttaagttttcattcatctttgaaaaagaattaaactttgatgagcttgtaaagtattcatggctgcgaaaaatagatgccctactaattcatacctctcccggctcttctctcaggctatcagctgttcagatattcagagcagttcagttttttttcactcctgcaacaaaatgatccggccgccatccaccgtgcatcaggcgtaaactgcacacaattgattggaggagccggagcctcagagatgagttcatcgttcgttggcatccaaattcccagctcacctcctgagctgtttcagttaggatgcacacgaaagcgctaacatcaccggggcgtcacaaaaatggcgttttgtttactacaacatggcaatttgcaacggatgcatccggaatctcgccgaaccccatgatgcaagcgcccgactagccgagcttatcctccgaaaacgacatgcgggtcaccccgggccggccagccctcatctcatcccatcggcgtctctactacggccttagccttacccttattcgcccccactacacgcatttctttattaataatccggccatccaagtcgatcgccggtgaaagctaagctaaggaagagcataaagaggccggccggagggaggtgatgagatgaggcatcatatcatgatcgtccattcccaaccaaccttaccctctcctctcctctctatgaacctattttcatccctttgttctcagtaatgcctaattgcacatcactttgcgagggataccagtaatggattaattaaacgggaatgctacgtggcagaaatttggggataaaattttagagatgttggatcattggaaccgcgccaagatttgtgcttgggcttcttctcccctgactccagcgagttctccctatttttcgacaccaatgacaccccccaattctgactggtgacctacagattagggtttggaattggagttgtcacatagatagacctttaatttaagctttatttggttagttccacacctacatctttccaatcacttaatcactttcttgtaggggattaacaaaaacaagccctagcaaaaaaaaaaaaaacctaaaaacctatacatactccaaacaaatctttttaaccgtttgaaactttgatgtaactatataagtagttaaaaaattctagatttactcagagcatatcacgttagcgtttctaaaagttttataagaaaaactctgcaagtgttaacttttccttcataaaagacagtagctttaaaagaaaagtcaaatcgctttaaattacctacacttatattataatcacactttacatttagaaatttacactgtaattagtttatattgttattttctaaatgcacataggattaaacataattattatctattcctacttgaaagagaagataagaaagatagaagcatactcatttttaagagagagaacaatgggaaaaagttattaaaatcaaataaaaatatggtgctatattttaagaaaaaaaataaaatccttttagcatcaacggctttgctttcataggggagcaactgcagcggccagcggccagaggccactcgtacatagctccagccaaatcctccctgtttataacaactaagcacacctgttaattactcagcacctttattctcccttgagcatcagaagaatgcggcaaggaacacgcaaaaaacgcacgatacgattctatctgattaggatcgacaataaatctcaattactagcgagactagttctaatgtaatattcttcttttggcgttgccgtttggtgtgtagagcaggaggaggagatgggacaagagttaagatatgggctggatttgatgagagggaaaaaagtggacgggcatatgatgcgttcatatcagcggaatctgtagctcgcagtagcagtagtagattactgctacctctgtttcaaaatatttagcaccgttgactttttagcacatgtttaaccgtttgtcttattcaaaaacttttataaaatatgtaaaattatatatctacataaaaatatatttaacaacgaatcaaatgatagaaaaaaattaataattacttaaatttttttaataagacgaacggttaaacatgtgctaaaaagtcaacggtatcaaacattttgaaacggagggagtagaagttaagggtcggtttagaaaccttatgttggctgtaatttctcataaaatctccttatgtaagaagctctccaaataatttagacttttattaagattttaaaaaattatagttatagaattaagaggttttcgagcttcttcaaatttttaacagctactccagttctcagaatctattcgcgaacaggacgtagggctcgtcaaagtcgcggaaagcgccatcaccacgcaccattgcggatctgccgtgctgctgcctgcccaactctcattatttggctggctcactctcgctctcgccctctccgtccactctggattcgtagagcgatggaatccgccagcctgcgaatggagacagagcatgctagctactcgtttcctcctttttcagtcaaactggttctagaagtgcattagagcaggtcattagtttctcggcaagttgggggcgtgaatgcgacatggtaattacttgctccgatagtccgatcctactcctacctgctgatgtcgtagtagtatctgtgtggtggtaatttaacttaaacgtactgagtgactgatgaactgacctacagggcagggtgaaagtttggaactttagctgttgtcctacatttttaagcccagtggcatctgatgattgacgcctccgttctggaacttagctagtagtaaagtctgattaggtttaactaccatgcacgcgtgccacacatactactcctgatagcctgatcgtccctttcctgcctggctctggcgtgacatttggcctatacccattgtacacggccggtaaaactctcctagagtggcagccgttttcctggtcggaaagacccgcgtgtacaaaaaagcgagtctttacgatggaaattacgcgccttctccgtgcccgtgaggccaggccacacacacgagatacacaagcagcaggagcacgactgcacgagtgtttgctactgatgcctgaactgaagtagcccataaatcaagcctggatacataggccaggccagactattccgaacactttaggctcgcggacccggctgtttctcccactcgagtccaccagcagcttgccccgatgccctgtgctgcgtggccggccgcgcgcgggccgcgggggccggtgggctgagctgcatagtggggtacgtttgcacgtcgccggattctctcgagcaggccgcgagacgagcggcctgacggtgggagaagccagcgattcgcgtacaatcgcttgggccgaacagccgggagtatggggcgttctcgacctgcggtggcctcgccagcccaagatgaagaatccgggtaggcctcagtgtagctggacccgattgacaggctgcgtggaatcgcatcgtaagccatcttggttcttgcatgatcaagcgtattccgtccggcctgccaagcataaattccataggtctctctttctccactcctgaatccacgatacggtgggctgcaacttaaagccatgatgtcatacgatcagtacacaaaacagggatgatacgatagaagaaaaaactaactacgaagtactctagagcatataaataatactgtagtcaacacgggacttgcacgaagtgattccggaagaactaacgaagatacagctcgccaataactccgtacagtgatcagaccctccacgcatagcaagttgcgcctgcgacattcgcggtgaggttgtagcctgtgtttagttcacaccaaaattaaaagtttggttgaaattaaaatgatatgatggaaaagttgaaagttcatatttataggaaagttttgatgtgatagaaaagttaaaagtttaagaattattttgaaactaaatacggccgtagtcaagaattatagcccgcgtctggtcttctttccaatggaaagctgcacctgcaagaacctgacaggagaagccgacccccaatataggagtactagtaaatggcaggggcaatcgatcaggttcggacaagccactggctgcctagccggccgacccggcccgcttttgacgagcccgcgcatgtgagtttcccggcacgagtgacggcacgaggcctgcaggctcgctgccaactgtagtgtactgtacatgtgcaatacgggggcacttagaaatgtttgacaccgttgattttttaacccatgtttaaccgttcgtcttattaaaaatttttgtgaaatatataaaattatatgcttacataaaaatatatttaacaataaatcaaatgataggaaaagaattaataattacttaaattttttaaataaaacgaatggtcaaacatatgctaaaaagttaacggtgttaaacattccaaaacggatggagtatattctacatgctcctatactatatgcccatgaaatgacgaaatggaatctcgcacatcctgcgtgctgtttctagattccagcggctcgagctctgatcctctcgtccaagcagaatccggtcaaagtctagattctctcatccccgactacgtgcgtgccccacgcaaagcagcatatatctattgcttagcttagctaacccctgcatgcaaagaccaagccagtaggaaatccacccagccgtatgtgccatgcatgtgaggccgcatgctggggttgtgagagagagattattggttggcgattcactcgagcaagcaaggtaagctaagctagctagcgaccaatctcctgccgttctttgctataaaatgactcgaggaaaagaagggaaccttttgggccacgtgaaatcgaaagctgttgcacatcccatcgttgccgtgcgcgatgcctgttgctttatggtgtcccccggtccatttgttcttttataactcgacagggttactgggataggagtagctagcatgcaagtatgcaaactcttacaagtacgcaattatagagaccactagatcatgcactattatgggtttactgattggtgcctggctgccaatggctctccccttcctctcgatctccacggccgaaagctgattgcagcatctttcttcgaagataagtatatactgtactgcattagcagcatacggattacgttacttttccacaatactatgcctctttccagtactacagctattcaacctgcaggcagctgagggattctctctgcattgttaatataaactttctattctctattgcaccgatttacatgctatattactgttaagtttgtctagaaatggcaaagtggctattatatatgtatgttgatagttaaaatatatatacatgtggcgcggcagtcctagtcaagtttctctctaaaagcaaatgcgtgtgtggatatatattgccactactgttggaatactcgtattattggttatggatgcgtacttcctcctccaatttccatcacgccgcacgtagaaattctccatgatcggaactgcacagtgcatagcatgtaagggctagtgactgtttcagattaaaagaacggaatagtacggtagtatgcacatcaccatcatttgagcgaggcaccaattaatgtttcagtcaaaataatagtagaagaggtaggataacatggtcaaaaggcatgtaactatcaattttgactgtcatgagttgctccaaaattcatgcaagcaagaaactttatcacaagtcccccattcttcgtgcacgcatatattacttgcttcgtttcaaaataaaccaatctagaatatcacacgggttacatacgaatatattgtactagataatatcacatccaattctaaattaatttattctgggatgaaggaagaacatatttagtccatacctatgaccgctactatcaacccccaaccccaaccccctcccccacacgcacacgcactccttggtccctcatttgatcttccaacactccaccacgacatcaccttcgtaattaaacatgttgtactgtggtacatatatgcccccgccatcaattgaatgcaccctttatacttatccataaagttgtttttagcactgccagtctggcactataggatggataataacctgataataatactagaaaatcagtgcgcctattggcatgcttgctagttagcccataatgtgtgtgtaaaaattgaacttcagtaaagcgtcattggtttttgtcattcgtttttgctgcatttgcaatagatatattatcattctaaaacttttttaacatggtagaaccgtatttctatcactcaataatacataataaaatagacattgatttttttagtattgttatttttgtggctcttgatttcataaataaatcttatattaaaacagttcatgtattgcataatgcactctcagtaactacgtgtagcgcccgttccgtcgtggcgtctagcgggaaaattatctcttaaaaaccctaattgcgaaatttgcttccttgcttgttgtctagcgtccgtgccatctcaagatctcaaatccccgatctatcgtcgagttcaattccgaatccaaatccctccaaatcaaattcctccgcaaaagtctattttacctccccc

SEQ ID NO: 20296 - DNA, 49626 bp, Oryza sativa
  unsure (1)..(49626): unsure at all n locations
ttacttatttgaatatatgatattcactcgattaaaaaatagactattgtataatatcagaaaatataatcatcaccaccactggtgtcttttataatagtatagataccaactaatcatgcatcaattctcatcataattttaattgtctaagtataattgaaatagcattgcaacaaatccgtgcatgtcctaaaacttacttgaccatctagatttcaggtgattaaaagtttaagaaattttagtcgcttttgattgtttctttttccttatatataacaagttgaacaacatatttaaacatataaaaggtacaaaattatatgaaataaatttacaattaaaaaactcatacctgaataaaaataaagtaaagcaatgctactatatataacaacaaaattacaattaaagagaaataaaactacacatggcatactactgcaattttgtacaatctagtttttgtctattttttataattaaatatacatattaaggtttaaccttgtttttttttaaaaaaaatgagacgcctttctttatgtaaagtacgttggcaacaaaccaacttggttaaaaaaaactttgcttcacatcctcatttgcggtttgctttgtaatcataattttgtcagtccttttacataccgaccttgacaaatgtgtaggtatttgaacacacatcttgggaaaaaggattgcaattgtaggatagaagcacgggcaaaccattacgcaactgaatgcccgatgaaaattatgaatgtgctagaagccacttaaattttactcagttagcgcttttaggcttggatttcccgtttaaattttacacctcttggttagttggcttcaccactcatgcgtgcgtacttcttcacaaatggggctacagtcggtgccaatgatacaacatgctcacagatccttcagtttgtgtaggcgtacacttcacagatttggcaccggggctccacattgcctcttttggcccaacgacaaggcctcccccctctcccccacctccatcttcgccattggctagcgaatagcagtgcaaccctagctcgcgcctcgcggctcgcgcgggtggactcatgaactcggcctacgctttacactgggctagaaaacaaacgatacggcaggggatgcccccgccgcggcctaccagctaagcaggcgagccccctcacacacgtagaatccacatatggtgacatgggatccacgtggcggccccccacgtgccctatcgctgggcccactcctcgcagctataagtaccccgtcctctcccactccgcctccacccacctctcaaactctcggagaagcgagcacacacactcactccctgtctcctcctcctcctcctcccttgaggctgttcgtctcgacgagtgcttggctttgtgtttgtggtgtgtgatcatgacgaaccaggacgtggtggtttctgagatgggcatcgcggcaggcgcggcgctgccgggaggaccggccggcccggcgggcggcctcttcgcgtgccgcagcgcggccgcgtcgatgaggcagacgtacctcgacctcgccgcggcggcggtggcggcgcgctccgcgagctgcaccagctgggccgacgccatgcgcgcctcctcccccacccgctcgtcccgctccgcctccgacgtcgacgagttcaccgcctgggtggtgagtgttgtagctagctagctagctctccccttagcttgcttgtcctctccttctcgcggcgtttctcgcgctcggtgcccagcccccggctattgcctttctggagtggtgtctcaacctttctctgtgtttcttggtggttcgaacagaggaagcacccgtcggcgcttagcaagttcgaggagatcgccgccaagtccagggggaagaagatcgtaatgttcatggactacgacggcacgctctctcccatcgtcgccgaccccgacacggcctacatgagcgacgcggtgagccaccaatccatgcatcgtgccgcgatctgttccggccacctctcccatctcttctcttttgctgatgacgctctctttccatggcggtgcgcgcgcgtgcgcagatgagggcggcggtgcgcgaagtcgccaagaccttcccgacggcgatcgtcagcgggcggtgccgcgacaaggtacattgccggagccactcctctcgccgtcccagacaccgtgacactctcgcgcgtgtattctgattcctctttgcccttcaggttcgcaacttcgtcggcctctccgacctctactacgccggcagccatggcatggacatcaagggaccaagctccaacgtatgctcgctgcacctcttcatccaatcatctcctcattcccagctcactctcgctaattaatcttcttcttctcccatgacaatctgcagccggagtctgccctttgccagccagcaagcgagttcctccccatgatcgacgaggtactaacctgcctcgctaatgaggattaattagtagctggacacttgtcgatttgtgattaacccgcactgattactcgagacccatagatattaatggtgatgaaatattcacattttgtcaggtgtacaagacgctggtggaaaagacgaaatctacacctggagccaaggtggagaacaacaagttctgcctgtccgtccacttcagatgtgtagatgaaaaggtaggcaggactcactctatcttgggataccaacacaacagcttcacttaattacactgctttataataacgggcagctgcatcatgtgcggccataatttatccacacccatcgtctcaagtctgaaccattactgctctcttgcagagatggaatgctttgggggagcaggtcaaggccgtgatcaaggaatacccaaagttgaagcttacccaaggaaggaaggtaggcatgcataatcttgttaatctctaatgaacttaccaagtaattacccagaaaatcaaatcagttagagatacctagtgaggatctattttaacgaagattgcaactttgtttttgtcttttttttaggttttggagatcaggccgagcattgagtgggacaagggcaaggctctggagttcttgcttgaatcgctgggtatgtacgaacatctggacattttgtcttttctccaccttctatgagactatgactcttgctatctttttaattaacctgttcgtgtcagcgtcgtcacagtcgctttcgtttcggttttatttcacttgcgttccacaccactgtcgtaaaaaaaatcggctgatgacactttgcccctattcgctgttcctccccaggattcgccaactgcggcgacgtcatgccggtgtacatcggtgacgaccgcaccgacgaggacgccttcaaggtaaacatcacatcagtttaacaagaacacaacataaatgcatgcatctaatcatcactttaccgattaattcatgcttgcctcggtgattccgactggtgtttgttttacacacatgcaattaacttggtcaaaaccttttgcctcgctatgttgaaaccaggtgttgagaaagagaggtcagggcctgggaatcctagtctccaagtgccccaaggacaccaacgcctcctactctctccaggacccaacagaggtaaacccagctcagacaagaacatgtccaaatattttacctttttgtacgtatacacacgagcacagcacgtacagaatatataaaacgtttttgacccgtttctgcaggtgatggagttcttgctcaggctggtggagtggaagcggaagtcgtcgtcgtcgtcgttgatgattcgtccgagagtgtagcggcgacacggtgtagaggccgtaagaaactgaaactaagatggtcaatcatgcgaacatgcgaacataccccaccaacaccacgtactacccccatttttttccgatgatttctgtggttggcctctgcgacggactcgtggtggttacacgctagctgttcgattccgtcccctgtgccgccgaggaaaaggagaccaccaaaaaagaagaaaaaaaaactctcgcttaattagctctcgatcagattccggcatgtttgggcgcgcagcggccggcgccaaagcaagcatggctccaggcatgttggtcactggtggtgttgcagctgcagtctagaacagtaaccatgtctactacccggcaatgtgctactactattactagtagtctactgctgctactgctactacgactacgactactacccttgttattattatttttttggtcccatggacttggaaggcatatgcaaagaaacctgccatcctagacccttaacaaaaagagaaggttctatctccatcgatctgttcatcaccccatgtaaaatgtactactactagctagctagagcaagacttaattcatccgtttgtcgacagttcgtcctcgatctccctctgtaaaatgtaatggagttaattaattaatagcaatggattatttcgcatgtcgtagtacctctccatcgatctgggatgctaactttctttgctctttcgatgatctcatgacgacgaagatatactgtgatgtgagcatgcatgagcaccgggaaacaaaaggaggccaggtggctagctaacaccgtacacatacaacacctcgcgggaagcatgtgaacggcttgctgcaggatctccctgcatgatcacctgcagggttcttgcgtgcagtgacaaactagctagctagctccaacaagatcgcagggcattgtttacaggattaaccaggtcgctctgattcctgtcgagcagccgtgattaacgggtacatctcgcgtgtacgaacgtgtgatatatattaaacgggggagggttctgaattgcttttcagcctgtgctgtactatggaaacagcttattaagacggagacgtgtgtatcagagatctacacatgtacacctatattactaacccaatagctcgatcatgttgatgattccttgatcagagacacacgataggctggctcttccaaccatgcatgctgtggtcctgcctcgctgctcgtcaatgtgtgcaatatgcaatgtattctatatgtgctgcatctttgaatattggtgtaagttcttgatatgatcagatttgccggtaaaaagtagagcggaattaagcacaacctaattaacaatctctgtgccttgtggccttaattaggccgcaactccctcttaagacgactcattaatataagtatagccaattgttaatcatcggtagatgtatagtaccactactatatatacatgcattaagtgagtgaagcctctcccccctgccagatgattcctcacaatgattcgatgcatattctcatgtgattgcatggccatagtacagttctagagcactagctcatgttcttctgctggaaaagccagtgctacttaaaatgttcatctttatcagaaatcattcatatgtggaagcaagcctctgccaagattgagctagctagctgactgtttgggaccaccaaagttgcaattatctttgatgtgtccttccagtgaccaattgatcatcctaccacttttttcccagacgcaaagcaggtttcctaagacatgaaaatgagtaactgctgctggaaatgaaagcattgccgatccaatcacgcacacaataatgcgcccttgtgtgtgctggatttagtaggtccttgcccctgtttgtcctgcatgcccagtatataccaatgtgcactgtactgcagacaccatagcacaggaactcgcaagctagctaggccattggtggttacatattctgatgcaatttatgattgggattcagtggtacatctgatactagaaaacatccgccaaccgaaacaactttaatttgaatactgctaacctagcttatcaatcgccatcaagctgcgagccccgcatttcactgctccaaccaaccagaagcacccatgcacacacatcctcctcacagctgcagcgatccatcgtcctctgatctgcagtcgtctctcagatggccacgcaaggtagggttttgttggaccccttggtcctatgaaaggtggcatgtatgcgatgcgttttacgggctcagagtggcctcatcattcgtactttatgcctttttggcaccagcaaccaaacccctcttcttggggctcaactcatcatccaagtgttatttgctgcaatcaagagccgataaaatgcatgcgtatctctgcagcaaacgacggcgcgtgagttgatgaagctgttgcgttgcaacatccgtcgatgtggatatatatatacccaggtggtgattttgtgccataccatagggtctttatcattgttactgctgcagtgtcaccatcttaactgctcctatatattatctctctctcggctggtagcgatcgaaactttcagtacgtgttatatgtcttctgtcccttgctgtagaagcaaaagattgcagttttgctagctggcagtctatactaggagtcctaaaaatgtagtaattaacagaagaaaattaacaagcagctggtctcggaatcctttcttgcgtggatagatatatgatatgatccaaacaggcatactacactcgatcactagctaattatccctgcattgtttcctataagttttagctacactaacccaagccaacatggaattattaattaaagccggcgcggctttgagcgcgcgcgcgcgcgcacaagcgtacagtcactgatcgtggtactgattatagaattggcccctaatctggcattgagatccccaaattaaccaagccagcgattaaagaagaggttaaaaaggatcagggcaataaaataggcgatgcaaccattatagggtgcagcgaaataatgcttgtttatacagatccaagctgctttgcgtggatattttacgccaaaggcctcgtagaaagctggctgcccttgaatcaagtgacaatggcgagccagacccccacaagccccacatggctcccaggtggagagatctatccggtatccactattcacctaaacaatctagaactcttcacaagatgcatatataatttttacatgcctcaatgtggcacactcctgttacatgtactagtgctactattattgagtttgttactggtagaagattatattagcatggagtgcttcacatttccagaggtttatcactagttctgttagcgaataaaaaggtcagaaggatcagacacacagcaggtgaagtgagtgagagagaaaggggcattttttgtttgagagatactgctgctgctaatgctttttttaggtagatcaaaaggaaaggggtgactggtgatcgaggcacaaattatgtgtaaaggaatctgatggttgagaagggagttggaatccactaaagccatggtgctttttattctgcagcaccacctgcagtgcagtgcaggggtattgaggtattggtacacaggcaagtgtccagaaaaggctttgacatttgacaagtgcccccctttcctatgtggaaaggtgttgagtccactgtgttttagctcatgattggtgcctaagccaccgtataaaataactaaccctagatgaccctcattattggtgcctggtggtggttgggttgggtaagtaattgggttttgatcagttgagcttgggtctctgtctccgatcgagtcacatcctgagagaggagccactcctgctagtgccgccttcaacacgagcccatgcaaagtgcgaccaaacaatgcagggcagccagccagcacaactcccgagaatctaatgcctgcccaatcatggacctaatctagctagccaggtgttaggagaggaacaactgtcaaaatgcccttcatgcctgcatctgcatgccaattccagatcttttatctgcccatacccatgcgcatgggccttctgcatgcatatgccctctgagtttactactactactagcttgctccaaaagcattgccccaggactaaagatggtcgatcgatcgatcacacaaactcatccctactgtatcttattcctgcctgatccgtaggcagcctgtagcagctagcgtcgcatagatcaaatcttccatgtacaaattatatatgtactctatctagctagctatactaccctgcaggacggtggaaagtggaattatagttaccaattcgtgcagctagcgattgggatttgacgtgttgacgagaactgttcggctttggcgtgccggccagctttagcgaccagtagacccggggggcctcgtcccgccggcgtcagatgtgtcgcgcgctcgtcgctcgatctcctcctgtggctgcgggctcgcccacggggcgccctaggcgggggctttttccgcggaaaagaggcgcgtatgcttccatccgtgatccgtccatcaggtcacactaggctatccccatcgcgaccgcgaccccggccgcgcggcatgggggccatatacgcgtgtcgccgcctcggccgtgccggctgcgggtggacacgcgcgcgcggagacgacggacgacgagctaggcattacggcttgcgcgcgagggccgcggtcttgcagggaggggcgcgcgccgcacgaggccgcggtttcggtgtaggagttggcggtgtttgttttgtttactgacccggggcggtcactacaggtggcggcggcatgcgcgcgcgcgtgcacgcacggccgatcaatctgcctcgcaggcacgcatcgtaccgggccagcgcgcgtgagatcgatgggcgtgtgtgaccgtacccgtgcgggggtttgtttatgcgtgggcggataagtttagcgtagcatctcaggggggatcgatcgatcaacgtgcatgcgcgtgcgtgtacgtgttggttttcaatacgtggagtgctatgtgcttccaaaagtttagccatctgtatattaacttatacagtaccgtacttgattctaagggtgacttaaagaggcatgtactacatactccctcctttcttaaatgttggacgtcgttgacttttttaaacatatttgaccattcgtcttattaaaaaaatttaaaaaaatgtgtaaaactatatgtatacataaaagtatatttaacaataaatcaaatgatagaaaaagaattaataattacttaaatttttcaaataagatgaacggtcaaacatttttaaaaaagtcaacggtgtcaaacattttgggatggagggagtatgtaatagtaatatgcgttttactacctcaaaatgcatgcaaggatatgcttggatgggtaatgttatctattataagatccaagcgcgcgaatgagtcgtgtactacgctatatgtttacacccgagtcctaattaaactagctatcgtatcgtgccatccctagttgttggcgtcctatttgtcaggaaatatgaatcggatctcgtgtacagtcgtgtccaccttttcccattaatgaagatcatgtgtggtggttcaagtagtattgtttttgcacgcacgtagttacacgtagcgattgtctgaccatgccgaatgtatggtaacattgtaacatgttcgttaattatcatattaaggcctggccttcattggttgactagccagcaataggaacaaatggatgtactaaagtgctataatgtaacgcagttgtactagtcctcaagcatacaactgcagatcaaggaaatgacaacactagtaattaactagcttaacactgacgtttcttttatttcttaaaacttgtgataagacatgaagagcatgaagtacttgatgtcaaactcaaatttattctctctatataattaattattaaactgccaaaatgtccaatcgagtagcaaccaattaggatttcatcgatctggagtatccagctgactgcacacgctgcgaaataaatatgcataagtctcatcttcttatgtttcttttttcataaaaaaaatgctacttctagttaagttctgattggcactcacgaccagctagctcaaactaaactaatgaagcttaatttgattgattaaacaaagatcgatcgaacattgcctccttccggagttgttaaaccgtcgcttcagttgagagtcccactttcagtctttcagagtgacggttgttgcatcttcacttcacatacattattccttcgcatgtccttttaatttctggtcctggagcatcgacgatgaatgtgacagaagaaaacagaatatatatcataagatactgtacttatatgtatagtactatactgcacacataaagaaactgagaagtgaaaaaatgcagtgtaatgggccaatgactgcgatatgatcgataatgacgccactaaagaataagatcgccgagaacatcatcgtgttgctgactgtacttgacatcaactcttgtccttctcggcgcctcggcggcgagtcaactgtccgacctggcgccgcctgtgaaatatctccgtcgtccaaccatcagtgacccggtcgtgaaagttttttgcaggcccactgcccaaccgaatcactatagagaaaagtgtgtagtactactaataattaccagttgttttatcaaaaaaaaaaaccagttgctggtatgtggaattttattagtacggcttaactagtgtaatagtcaccgtcaagattgtcaggttggcgtgcagccacacgcacatgcatcaattgtggcacgtgtgggttttacaggcaagcagtaaggtgaagaacgtggttggacatggaatgacttaatcatttttttaggagcgttttttctttaaaaaaaggttagagcatattaatattgtagctgttggataaggcatgtttggttgagtattatggatgtacagtcttttagagaaaaatgactgttttggtttgatgccaaaacttaccctaccaaataattggcaatttaaatagtactttgtagatgtttggattgattccaatatttgcaatagctaatacaactcatatagtccaactctaccaaaatattggtagtgccaaaatatacctaagatttggtactgtcaatggtttggtagtggtagggcatcaaactaaatgagtccaaaaaatattttgggatggattagcagcccagccaattgcaaagaatttggcccatatgtgatattcagctttgggtctaaattgtagtagcagtatttggcccatatgtggttttgcagctttgggagtttgggcccaaattgttgctcaggtccactaggccactagcaaaacccaacgaacgaacggcatgcggctcgagacgaacacggagatgagtttgtcgcttctgcaaggctactcctccgccgaggaagacgacccagccgccgccggcgccggcgctggcgagctgagcgactccggcgactcctccgctgaggacgccggatcagacggcgaggaggcttccgctgctccgaggccagccgcgaagccccgcccccgcccaaaccctagccgcggggatgctggcggcggcggcggggacggctcattgctgccctcagcactggatgccttcgcggagatatcgggcccgccggagttcctgaacaatagagtcgccgagcccgaggaggccgtggaggcgctcggagtgctcgaccgccgcggcaagggcgggaggggaagtgacagcaagcagccgcctcctggtgagccttctcagctaattgaagcgagtattgatgttctctcagaagtttattaatgagtagtgttttttagactcgatttgacatctgcagtactagaatgagccctctatttcgtcccttttggcaaagcaattatcaacgtaggttcaaatctgacattctcggaaatcagaatagtagattacactttgtggattgaatgatactatcacctatacttggtgtggtgatcttcctttgatgtatagatattttgattacagtgtgtctgtgttggataaaagttctactagagtcaatcgcttcaattctagaaagaattgcaatgtgctggttgagattttggtccaaaaatgggtaatatgcagtggtgttggagggccttggcccttgggttgttcatactgctcagtgctttgattgatgtgtgcctagtctttcgtgttagatgtctatacagatactagggaatgcgctcgcatggaatcaagatcttggcacaattgggatgcctgccaagttccaattgagggggtgcagcgcaaaagaagggaacattttttagccaggctttctttgacatggtagctccaattggcacccctgatacatgtaggacagttagaaattggatcttacattcgcatagcaaaataaggggataaattcattcatgttatgcgttcaatggttgattttttttccaaaagtaccgtacttcacgttttgcatgaaagtactgtcaaagtgcagcatgtccaaaaaaaaagttcccatcactgatgactgtttatagaatgggctctgttcttacaactgctttgaatcggattggcagtttatattttgcaaattattgatatgcttgggcacaaggtacatggtaaatcggatctgatcactgtatgcgcttctatgtgcttagtattagcgtgtcaagtttctgcgatagcacttatactgtttccagttcatgttacatctaagagtgatctgactgaaagccttctccaggtgccgttgtggtcgcaaaacctcaattggttgcaattcgtgaacgagttagcagtggaacaaatggtgccaaccctccagtttctactgaaggaaagagaataataggtgcggcaaatcctggtccagaagatgctgctgatcttctaaggttggtcatttttatcaatactacaacaagataacttgaaaacttagctgaattcgttatattcctggttaattatttactgctcttaaaactgtgtttcttttcaatctgtagaatgtgcctccaatgtggtataccaaagacctattcacacgcacgaggtatggtgtgtcctgtttgcaacgatagaccagagcaggcaagagagccagaaaagaagaaaggatcgaccgtcaaagacaaggagaagatcaaaaggatgagggggcaatcatcacacgcttcgtggaagagtgaaactgagatggccctgcggcaacaatttgactgattactaactagtgccacctcctatacttggtgtcatgtgttatgtacactgcgaatacttatgtaatcctatcttcatcaaaatcccgtagaactgcctccaagagtcatagtcggttcccgattgtgtttgctgtattttcagttttccaccatgaatatggatttgctcgataagctgagaaatggttccttgcaaaattccgtcgaagccaaagtttgagccaattgtatgatcatttactccctctatcccaatatgtagcaagttttaagcttgtgcacaagtattaagtaaagtagaaaaaagaccatactaccctcaatgattattcctgtactaaaactcagtggtggcggtttgtttgctgccatcaaactcacacgtgcatttcaaacgcattggcgccagaaagctggtaaaacacagtaaaaatccactcacacgcaaatcaaattttaaactggtagacggcaaaagcacatacggcaatataaactagtactccattattttcttctctttcactgataactatgctgaggggtagaattggtagatttattttcttctctttcactgataactatgctgaggggtagaattggtagatttgtggtaagagttgtactaggttgtaacatttgggacaaattttgaatgccaaaacttattatatattgggacagagggtgtatttttcctcttgcaaattgttcctcagacaagactggaagtggcaatcctaatgttgggtcaggactcatgagtgcctgatgctgtaggactgatgcggcatcagaattcttcgacgcaaggaatgaaatgggttggttgggacttgggacttgtatttcgtctccaaggctcgtccatcgtactgtacggacagttttaaattttactatctataagcagggatagtcatgtggtgtaacatggccaacgtgcaatcggtccaaggagatagacgcgaccgtaccaagcagtaagcagatccctccgtctaccattattattcgtcctctactttctcggatccctccgtttcgtgcctggttgccagtaacgttatccggctcatccaacctgtttttcactgccatcctggagcctctactggttcattttgcagttttgctgtgaaaccaaaaacagcgttaatagtgaaacttctgggagaaagacaaacagttgccgccagatgtatgaagcaggtggagtagccatggcatatggcccatggggcctatccagcatgattttctcgttagaataatgcgcgttcatgtccgatcgagacgaatgcggccgaagaaattttccgcaccatcaacactgtgacagcgaggcccccaccgccacgagcccacgactcatcaactgcttccatttttatactgatccacatccactccccccgatctccgcagctcacacaccgaaacaacacacatcgccactagctccctcgatccgattcggatcggatccatggctaacctcgccgcctccctcctcttcctcctcgccgtcgcgtcgtccgccaccgtgccagcgcatgggcgccgcgacctcctcccgactcgcatcaaggtacgtcggccttggatctctggcacctcgtcatcgatcgtttaatttctccttgcggcttcgcagctggtgaggggagccgacgccggcgccggcgccgtggccggcggggacaagatggagtgcgtgtacacggtgtacatccggacggggtcgatctggaaggccgggacggacgcgaacatcacgctggagcttgccggcgcggacggcaacggggtggggatcacggacctgccgtcgtggggcggcctgatgggggagggccactcctacttcgagcgcggcaacctcgacatcttcagcggccgcggcccgtgcatggccgcgccgccgtgctggatgcgggtggcgtccgacggcaccggcccgcaccacggatggtactgcaactacgtcgaggtcaccgtcacgggcgcgcacaaggggtgcgcgcagcagctgttcaccgtcgagcagtggctggccaccgacgccgcgccctacaagctcgaggccatccgcgacaaatgctccgccgcaggagcgggcgccgccgcggcgtgagcgagtgacgcggccacgccgtgggaaataagctcgtacgttatctgtggtgagtggcatctgtagactgtgggggggtgttcatgttttgatttgtaaagatggtaatccgcgtgcgttatcatgtacggtggatgctacagactatccgactaataactttgcgagtcgccggtgatgaaccggcgttgtgtttcctcggttacgcatcgtcgtgccgcctcgtcatacagaacaaaatggaggaaaaatcgcctaagacagcaacgtaaagtgaaataaatccagctcaatgacaacaatggaaaactaaataattaatcggtattgctaaaaatatgtcgccacaaattatgatggatttcagtcggttgtttcaaccatcagatgcggatgcagaaatcaccgcatgtgtacgcatatccctccgattctgttttaacgttatttgctaatcaggattactaattaatcttaaaaactaaatatctgtgtcattgcaaatttatagttttgtgacttacatcaacttacatatgtaattttaggacttacatatgtaattttaggacttacatatgtaattttggaatttacattgtaaatacactaaaattacatacgcaatttagggacttacaatgtaaatacatgccgaccatttttttgatgaaaaatatggtgccataaatatagctactccctaattaattaatgcgccataatactatgagatagctttcggattttgcgcctaaagtcataagaaatctgggatatcattagcgatggatcgacgacttgctgggtatcatcagcaggctggcccatcagctcatggcatgggccagtaatgagcctcccctgaggccctgtggcaggcaagcgcgcgcccaattagcctcgtttgtgaggtccaatttttcggcccatcgttgcgtttgggccagaattttagttcaacgctcgagtgggccccagcctatcaacaagacacagagaagtattaaacttccagatgctcagataactagtaccctcgaataaaaaaaaaggataactactaccctgggagagtttgtttttgagaattcatttttagttcaaaatcctaggtctaaattctattggttcatttgatccatatcattaccaatataccgaattagaaaaataccattaccataccatcgccatcagattttccttccatcttcattctttcctcttcttctcccatggcgatggttcaagagtgaggcatcaagacgatgaagacaggaccatgggtgaccggtcaacgacggggtcccaaatttgctcctggagcaataaagggaactgaggaggaaggaggccaagctacgcatcggtactagagtgttagccctgccgctctaccaccctgaccgcccttgcaacctctccacgctgaccgtgcgtcgccactagaggctatggtattgagcccatctgctggagccaaactcttatcatctcgcccactagagtttgccactctttgtcacgttgcggacctcctcaagccaccgacacaaagttcttctcgtcgagctcctcgcagccagcaccctcatcgagctcctgcactactaacggcctccttgaggcaccgcgctgaagtcttcttctgcctcttcatcactaccgccataaggtggtgccatctcgttctccctagcatgacgattctgctgctactagttaagcttcaacataggaatcggtgaagccgaggaggttgaagaagcgtaggccatacatggaggaaggagaggaatctaacatggataacaaaaaaactagacgataatggaattgttatcgatttgacaaaatttcagtggcacccaatagatatcgcgaatagtaatgatattttttttcgacaaatttgcaaatgatatttatggatcaaattaacccaaattttatcgtactcagatagaaactgacgggaatatgaattctgccgagagacggcctcccttagcgtgccgagcaaagcaacttcgcaataaatcgatggctttgccactgccgccggccggtggagcatgggcctagcgccctagccacccattgccgtcccccataccttgcatccctctcaagtgcatctcccctttcatgattgcaccaaatgttcttaaatttgagctaactcccttttacaatctttacacatcaccgggttcactcatgcacaccaacctctcccagcttatcattggcacacagataaacaatcacggcgacctcattagtattgatcgaaagtgctaatggtacaagagaaccatcattaggtgaattttattatctcaacagaaataattaactaacctagtaacctatatactaccggtgcccatcggattgaaaaataagtccactaatatatgcagtagcgtttagtttgctttgaagtttcatgggcagttcttgtgatgctgcaatgatcaatctctcttctaaataaattctgcgtcgccgcttgacaattattaggtttggcgccaccgcggcagccacacctcttctcgctcgtagagaccgtgacagtcacgaggcactggacctctcatcaagttatggagctgtacacaattcattgcaccacggcacgagttgtagtagtggaaatgcagatatgttcaccatactgcatatcctgtagcattgccattcgccgcagctgtagatgcgagctgacgaacgaactgtgcatgcacgcgcactgcacttaaaacacacaagtattcgatcggcagaaaataaagttcagagcaagaaggtccaggtgccatacctgtatcttgtagtggtacgacaaaagtagtactccctccgttttcatataaaaacgttattaactttcacaaggttatttttaaagtacctttaatgataaaataagttgtgacagagtaaatattatttgcacatttctttaacaagatgataatgatgaaaacatcatataaaaataaaaaaaatcattatatttaaaaacggaggtagtgtcaattcagaattcagattcggtcatgcttgttccagattatccatcaccacggcagatgcagattatgcacgggcgcgttatattttgttcccaaattaaatctagcgaagatcacttctcagttcagtctacagtattcctccgttgtattcctccgttttttaatagatgacacaattaacttttaattaaatacacgattaaccgtttgttttatttttctcgcaaaggcataagatataaattatgcttaaagtatttttagcacaacaaaataaatgatagttacgtaaatttttgagttattttcataaaactacatgcattttaacacgttgtatcactaaactacaaattgaacgctaaagtcatcataaaactacaaatttaaagctaagtatatcaaaactacctatttaatatttaaataataaagaaattgcataatttagagtttaaattcctatcactactattatattggagttataaacgttatagttttgtggttaaattggtgctaaatttatatcaaagtatctatagttaaaattttcttaaatttttttaataagacaaattcaaacctgtatccgaaaattaacggcgtcatctattaaaaagcggatgtattgttgttgacgaaaaaaattgaacaccggcctgggagatctgcttagctcctatgcaggttcaaagattgatgagatgtgggcgtgccagtcagtttgatcctgcaactgacaagatatgcaaatagtagatctaaacagccgatcggctgacaagccgatggagtagttccagccgatagccgataatagccgataccgataccagccgatagcgatagggtttaagcaatcggctatatgtccaatgtggataatgatataaaggcaatcggctgatgataatataatatagcaatataatccagtagaaaccaatcggctaacaatatgaaatagtagaacaaatattgatccgaaggttaaagcacacatcggctggaggtccgatgtcataagatccacaagattagattaaacagtgaaacctttgttgccatcggctaaatccaacttatatgtatatacaatccctacaagccgatgcaacgtccagataacttatcggctagcaccccgataaaacattagcatgaacctatcggcttaacaagacttatattatcaacaacaatctagtagatcgaacctaaccgatgcagcacgagattgtatatgataatctaatactcgatgagccgatagatctatctaatgtgatggatataacaaatctatttagaacagcattatgattgtagagatatatcggctaagacaggagatcagacctaaccgagacagtcccaactaaaccgatgcgtctctaaacacaatgcaattagagatagaattgagatatcaggtaggcaaatatatcaaccaaaccagagcgatccaagagatcgaatcgatgcagccttgaacaacaccaacgtagccgatagattcaccaggacccgacagaacgtaggacttaccccttcgctggagatcgaaagccgatgcagccttgcgtcaggtgcccaagttccgccgaaagataagtaaaaacctcagggaagagggtggcgatgcgccgagagtattatcgatcgatagattgatagattacaatgaccccgggtgtacatatttatacccatagggagatactagtccttatcggacaagaaagaaactaaaaaggaaaagataaagtccttatcggacactaaacacactttcctaaagataaaaggaaactaacaaactatgcctaattaatagataactgtcatgtcgcatccttcttgaactcgaactcttctagataagcttcctttgattgatccgactccaccaagaacacgacatcgtggcgacttctcccatcggctgattctagaactttgaagccgatactgactctaaaccgatggtaattttgggattaccaaatttcactgttaacaattgtcaaatagtttctttggttttagttcagattatacattttttccctacattaagtgaaattagcggctcgccggttcgtttaaaaaaataccgtataatctgtatcaccgtatatagtccagcatagcattaataagttaatccgcgtacttcgggagtatggcagtacttgcttgcatgctacgacgccgggttcttcagttcagaggaagattagtagcggcagtggtacaaaaactgggctcctcttgcagtagacagtggacggacagaaataaatttggtgccgtgcaacgtacacgacatacacacatacccttgtcctcctgctcctgattggatcggtagaaaggtggcggatgctggattataataaaaaccctgtagattacacccataataaaatggtcaaggaccacgacaccacataaagacacccatccccgtgatcaactacctcaattagcctcccaagatccccctataatttaccataatttattcaaacagctggtacctctcctccgggttaataatacttatcgttttagacaaggacacgatataaaaaaaactttaaccattatttttcattataatatatatagaagtgttaacaaatatatgattttattaaattactttttaaaactaatctatacaggtagtcaccatatttaatagacaaatattttaaaatcaattcataatcaaagattctcaagtttgacatcacctttatctaaaataacaactattaccagcaccgaaggataatactaatttgaacatattcaccctactacaaatcttaataaaatctgaacaatggcctattggagttatagtactataatatatcattttccttagtagggccgagtttggttctaaatttttttttcgaactttcaatttttctatcacattaaaacttttcaacacacacaaacttccaacattttcatcatatcgttttaatttcaaccaaactttcaattttaatgtgaactaaacacaccctaggttactgtattttggcactgaggcggcacacatctacaagggaacgcacgaatctcaaagcagatgctcaggccgaacgcctccatctctaccgttcactgcgccacgttggtgtcctttttgcatgatggatcgctcgctacgagtttttttcttttttaagcggcagcggcaactggaaggtggaaggctctcctctgcttttaagaccagcgctgagacagatcgagcgatcagtcgaacgaacgagatgaagggaggaagggggagcaatggcgccgccaccgacctgctcgtctgcttcccgtcgcgggcgcacctggcgctgatgccgcccaaggcgatctgcagcccgtcgcggccgtcggcgtcggagccggtcaagcgccggcacagcacgagcaggtccgggccgccgccgccgtcggccgcgctcttcaaggcggcggccagtggtaggaacccgagccgccgcgccgcggacgtccccgtcgacaacgagccgtcgtcgccgaaggtgacgtgcgccggccagatcaaggcacggcggccggcggccaagcccaagatcagcggcgccggcggcggtgccgggggagcgaaggcggccaagaaggcgacgtggctgcaggcgctcggcatcaagaaggacgcgctgccgttcttgaacgccgtgcacggcgccttccgcctcaacgtcgccggctgcttcggtagctttcccggcgccgtggtggagtacacctccggggaggatgacgacgacgaggagctcgcggcggggaaggacacagagcacggggctgcattggccaagtggttcatggtgctcgaggaaggcaagaaggtatcaagcaggaagcgggagcaagagccgcagaagcagcaggaggaggaggagcaggacaagaaggaagcggacgtggcgccgccggcgaacgccctgatgctgatgcgtgccggtcggcgccggctaaggggttgccgaggaggttaggaggagatgcagaggaggaggtgatcaagaactccaagaaggaggaggaagaagaggatgagaaggaggagaggcttgtgctcatgagctacgcccctgacttcttcaaggtatccgtcgacatcgccaaggagacgtggatcgtcggcggcgacgacgccgtcttgcgctgccggagctggaagagatgatcaccacaaggatcgttctgtgagcaacgtatgtgtgttttgttctacttttttgctacatgcttgccttttcttttccttttttttcttccctcggagaattatatattcttctttatataaagctcatgtaaagggttcgatgagcacgcagcagattcttcatttgttctgccaaggccaccacaatggtctctctgcagaaggatttctgctctgtaaatagtgctgtaataaccttttactagatgctagtacacggtgaatagtacttttgtttgtgaaatgtaacgagtaatatatatatgatgagctgtatagctcactttaatttcctactttcctagtggagttaagatacaaccattagcgctttagccttgtatgatagattggaatctctatgatgaacttttcagaatatcttgttttctttttgcaaactgataatcatttgctggagtggttggtttacctctgctcagctcatattagctgtgataaaaaggcatgatcttaatgttgtatttggccacattttttaatggatcagtcacagttcgttagagaaggccatgttgttgaaagaattgtccttgtatgcccagaggcaattgttgccactgttgttatccgacagatgtacaggggaagtagtaggtggattaaaagctggttctagtgtcaactcggatttcttttagcccattttttgtcattccttttgaatcactacttattattaccacatccatttcaaaatataaacatttctatattctttaggaaaactacgttaagagaattcagtggtcaaattttgaattttgagttactcctttccaagcatctcattggttgaaaacgtaaagatttctatgtaatggaatcagtgcctaaaaatgtttattgcggtacaaaatttaaatcctagaaatgtttatattttgaaacatatggagtagttattagtctccgacctctgtataatgtgcaaaattttcggaaagtgctaagagaagttgatttttctaagtttcagagcataactgaaccagctcacctgttacgatctacaaactaaatcttatggagtactttacaattattgagaccaaacttagtgacaaattttccgattgtgttttctgaaaaatcaacggaaggttgaatagcgaacagatgcaagcattttttaattttgaggatttacataaaaaagatcatttagagaaacattgaacttgtaatagaattataattcttcagtagccctgtttactaaagagtttctctagtttttatgaactaaatctgctcgcgggaagtgtacatctagagctcacatttctcatccccggaactagcattagcctgccttaactgctggacattaccaattatgtgttcagctttaacagattctggacaagccgaaaaatgcaaaccattctcaatgccacataacaggttcagaatgaagaaactacaagcaaccatatgttcagacatccagaccattgtgccaaccaaactgataaatgaaagccatgcactacggtgtgcagtactgaagttcagttacatatacgcaccatcaatagtacagtcagtcacacggcacagcatttagcaatgcatgtcctgcaaaattttgtacaggcatccggattccagatatagtttcagcaagagggagccatgctcaaatggatactcactcattttctgtttgggatggatattagttttgtagtacaaagtacaacccagtatgttttttgtgtgaggcaaacttaaatcttcagaaactttcatggttgctatcactgccaacccacattcaaattaactagctatacttctcggtgcagcaagtattatgtacagtttcattactctcaattctcttgtaatttggcgtatagtgcacaaaaaaagaatcatactgacttgacactaacaaaccgcgcaatggtgcgtgctgcattgttttgtccaaagtcttgtcctcttcagatcttgcagttgatttcgggtagccgacagattaaagaagcctacaaggaagaataaacttatatagagatcaacatgccaatgctttgttctaaagaagaagcacaggcgagaatctccctaattttcaaacagcctttttatttctttatctgcgcgtggtaatcaactgctgtccttgacctaaccagttaaaattaaggtagataaagagtactgaaattctttttagagccgacacagtagtgcccaagtactatagggactacgnnatgcagttttggatttgtttctttccagtatgcaagcaatctacacaatgtctcccagaaaagtaccgatgagggcttttttgaaataaaattaaggaattcaagggcatgaaaatatgtcttcactgtccattttacttgatttttgtttgatgaaaaggacctggttttctctacgactgatttatcattttctagaacatatattagcaaatagtacatacttatatttctctttggtgtagtactatggtgaaacctagtaggaaaattattttgacggtatattcgatgaatgtaaacatgaattggtaaggctagctgtggttacatggcgtcactgttgtgatctgcttgcaatgcccccattcctctggctccggagcttggcttcgacctcggacagcgccttcttcatgtcctcgttctccgggagttcttggatcagcacctggtaatctcgcaacgacgcttcccatctctccagctgatcacaaaaacacagacaaaaagttcgttgacaaaaatgagatcgcgcattcatgtcaggtatggcgatgaaaatttccggcacggcggaggcagcgaaccttgacgttgcagtcggccctcctgaggcgcgccttgctgtacgccggccgcatggcgagcgcgccgttgcagtcctcgacggccttctcgtaccgcgcgagcctcgcgtggcacgcggcgcggttgcagagcagcacggcgttgccggtctccctgtcgaggccctcgcagtaggcggcgcacgcctcggcgaacctggacgccttgaagaggtcgttcccgcgcagcctcgccgacgccaccaccttggcccgccggtgcacgttcgcgatctcccggttgctcgggtcgagctggcacgccgtctgcgccgtcgccaccgcgtcctcaaaccttcacacatccagcatgaacacgacggcatcagaatacagccatctcatctctgctgatctccatttgatcgaggaagaggaaaaaaaataaaaaacaacgttgagaacgaacctcccagcagccatgtcgacctgagcacggatcatgaggacgtaggcatgggcgacggtgccgaagaacttggtcgattcgtcgacgccgaaccgcggcgcgccgcccagcacagcgtcggcctcgtcgtgccggctcagcttcaccagggcctcggcttgcaacgccatgaccttccagaaaaaaattccatcgtgacagagacgtatgatcagatcgctgcatttgatcggatgctggtcgtgtcgcgtaaacgttttctttccttttctttttctttttctttcacgtggcgcgagggacgctcacctgtggggcgcagtcggcgccgtcggcgacggcggcctgcgattcctgcagcaccgtgatccagttcctcagcttgcgcgcgtcgccgcacttggcgacgcggctcttgaccgactgtgcgcgcgacacgtccgcgcccgtcgagtcgttcgccgattgcttgaagtggtggattgccttgtcaggttctcctaatctgagcaataacagcaatggctgtgtttagttcacaccaaaattagaagtttggttgaaattggaacgatatgacagaaaaattgaaagtttatgtgtgtaggaaagttttgatgtgatgaaaaagttagaagtttgaagaattattttggaactaaaaacggtgtaagtttactatcgataaaaatcatcgtggtgttgtgtaaacaaaacaatgtcagtactcagtacagagtaggcagtagaaaaatgaagtgtgtgtggacttgttctctgacagatcgcaaaattcaacaagctagtactaagctagtgctgcaatcattctcttcaaaaagaagtgtgagaatgcttgtcgaggaagtgattagctattggaattaccaatcatcaatgtgatcgcaaatggctagagtaatttacggcagaaggtcttgcttgacctgctaaaccaatgatcaaatgatcaaatgttccaaaggagcacatgtatcaaattgtactattgcctaatcacaaacaatgggtaattccatttcttaagggaaaagtttgagatttccaagaaagaatagcagtacccctactcaaccatgaattcatttctttcaaaaaaaaatgaataagtcatcattgacaaagagccaatgctgatgcaaattagccattccattaactaattccccaacatctaaatttggtgcacctattttcggccaaaataattgcctacgaaatattagtgggtaaagttgaacaatcagttgtcgtcttgtcaaaagccatgatcaaatcccttttccaatagaattagatcatgctactataactatggtgctagtcaaatctgatttccaaatcaagtcacgatatgaactgacctaattccagtttttttttactaaagacctaattccagttgatcagtgtccttaagaattcctgtgcaaatactagttaatttcatttcttttgccggattcctaaagatttcaattgcactaatgacattggtgatgaacaatctgaacgcccaaatgcggaatgcgcgtacctgagatacagcccgccgaggcggtggtgcgcgcggccgtacgacgggcgatccggacagcctccctgcagtcgccgacggcctcgatgaggcggccgagcgcggcgagcgcggcggccttgttgctccagtacgccggccgcgttggatccaccatgatggcctggtcgtagagcgccaccgcctccgcgtaatgcccctcccggtactcctcgttgcccatctccttgagcttctcggggtccgtccggtgcgacagcgcgcggcacagctcggacgacgccggcggcgccctcggctccttgacgatgttcccgaggccggagaacgcgtacccgttggtggccttccgctcgttcgccggcttgttggcggggttgcgttccagcgagctccgcgccgacgcgccggggacgccggcattgaggttgccgaggttgcggtggagcatcatgttgccggaggttgcgcgcaccagctgcgtggtgcccttgaccctctggtgatcgaggatcatcttgtcgagctccgctgccatcccggtgtactccgcggccggtgccgccgacgccgcattcctcgccccgccgttcgccgccttcgtcgcgtgtacggccctgtcgcttgccggtgcatgggcacgctgcgcgccgttgttcgtccctgggagcggcttggccgggcggtgcgcgagggacgagtcgtcgtggacgccgccgcccttccggtgcgcctggttcgccggcgcggaggccgccttggcctcggcctcgtgctcgtgctcggcggtggcgggtgggaccccgttgatgcgggcgatggaggacatggagtttgaccggcgtcgccggaacatgccgctgtagatgccgaacatcgcgcagccggacggcggggggagngaattcgttatggtgactggngacgtccgcgnccgcgcgcccgctccggccgttgtgtcgtgccgcgtcgtggcgagcgcgcgcaccgggaggcggggaagggggtcacgacgaggacgagggagcgcgggcgttggctcctggctggcaacgaacggcggggttgcgaggttggggtgggaatatttttggaggagggggatttaaattggggaatatttacatgcacccgcttgtacctgttcagttcatcctgtgggccattttgggcaagttctattatccttcctcttttttgttttgttttgttttgtttttcttcttggagagttggagtagatatggatttcttggaccatggtttggttggggaggcattcatggtgggaactgcttggttgggtcgaatgtcttggagtttattaatgttctactgtgttgatgaagtttgaaccataatttgaatttcttttgttgaaatttgaggcacatgggcaccaacgaaattagtttcttcgggagaatatgctaagacaaaatggggccacttactgtttaccatcataagacaacagaggttgatggaatggcagggtcaagacgattagtagtacgcctctgttttcctctttcgagaatagtacgtctctgtttttaaatatttgataatgttgacttacatgtttagaatggatagaataaaacttaagtgacgaaaacaacaatagagaagaagatcggtgtagtgtaaaaagagtagagaagcatgaggaaggtagaaggcagcggacatgtcgggaggaaaactggtgtgtgacctgaggtttgctgaagtgtggctaagaagaatggtttataattctttcttaaaaaaaaggagaatggtttatagctatagtcgttgcactaatctcaaagcaatcccaggctcaaaaaaaatgtttggtagtaccaagcatgaacatatgtgcaacctcgtgaaattattttactccagtgcctctcaagaaacgcttataagggacgtgggtcaaaaggttggtacaacatggctcgcttcctccgtgcatgtgtagcatgagtttacttgattgttttaactttggttaagagatgcttgctgtccgtcgctctgaaaattgggtgttaggcgtgagaagagaagagaggaatagagaaaattgagaaaatatgtaaaacgagataagctactagcgcgtaattaatttaatattaattattttaaacttaaaatatagattaatatttttttaaagcatttttttataaatagtttttttcaaaaaatatcatttagcagcttgggaagcgtgcgtgtgaaatacgatgttctttttttctcccttttcaactctcaaacagcatcagcttgtcaactatcaggcaaattctgatcagaagacagataacacaacagctatgcctgatccttttatttttcactactactactaaaaaacaaaaacttggggcggttgactcctgaccaccactaacctgttggatcgctggaaaatgttggaccagatcaaaccacgcaggcacgacttagctagcaatctggacttgggtttgtgttggccatttttgtgctccactattatgtgcacgtacgcaccgtcaccgacgacgtgaatcgtgatcgatcgatctgctccaaaacgtgttcgacgtgctaaacatggatagcacatcactaataatagcgtattgcgcgttagttggcaaagcagctagcaggtctcccatcgttctgggaatttggggtcactgtattttagaccaaaaagttaagcagcacaggcacgaacaaatctttctgtggtcagcgtcgtttctcgcatcattgcatggtgtgacggcagattgttatgatatcataaaagtataaaaccgttgccgcgtagcatcatcggatttcagtatttcagactgatatatgaatagtggttcgttagagctaacaaccctggtgtttgtggctgatgccgattaccgacaatacaatactggccgttgacaaccggttgatcattattataaacctattcatggtttgctgctactgtcaattgcaatttgcaaccgagcgttgaagagcatgtgaacgttggatcagtatgtgccatgaaattaagtatagttaagcaatcactaaggccacattcctgatctcccctgtcagtttcctgaaactaactctgcagcaggagttaagcgcgatcgaaaagcgtttccatgtaagaaatgccaaaacactcctgtctcggaagaattggtcgtctctctgtcgtacggagtaatgcctaggagacgtccaaatcaaaagccgatggcatgtctaaatcgcactacgagatcgaaaccgccctattctcaactcaagcgcaactaccgtttcaatacagtgatgagcagcatgggacagcgatgcgcatgggcttaccggaccatccaatagttactgtcctttatactcacagaataagtctattttactcccctcaactcatttccttgaatcacatcccttgattgcaaaatcgggtataacccatcctctaactccaaaaaccattgcaatcgactcccagggtggtttcggaggcagtttcatccgatgtggcaattgacttgttgcgtcatcaaatcggacccacttatcagtggcctccaactcatcctcacattccccctgacccctccatctttcatctattcctcttctctcaccttatcagggttattgataccacatatctaatagtaattgattaagctcggtgaggcccatcatataccaagtcttatacgaaatcatagctcgtatatagaatgagttccagataaggaaggacgagtagagttctatatgaaaactataatgactattcgaattgtatccatattggtctctctagttctacttggacaaagggacatctatgggtataaatacaataccccctaggaggaggggagacagaccaacaagacacaacagattgacacactaagccaggacaaaccaatacgccaccagacatcgacatcagagataagcctagacagacctcatccagtgcctgtggaggccgacaaagaggaatctagtgctatctctgatctcgacgagttcatattcgaggaggaagactaccctgtcatcgactacgtgttggtgttcgtgccaccatgtcgacgatagttatataggttatcccaaatattgtacttgtgtaattcagatgaataaagagcaacaccggctttggccaacatgagtatggctattacctgtcagataaggggccctaacatgtataaaaacccttgtctctatctcttttaactcaatctcggtaccaacgatccccataccatgcaaatacagtagtcgtgacctcaaacgtcgacacaccttccatcaatagaggtagcgcagcggtgacggcgcactagggaggagctcgccagctggccaacagcgctgcacgagttggaggagcttgccgatcgtcacgctagttggaccggcaaccttcttcagttggattggtcggcttgctcatcccacttctcggcatccaacttcatccacgcgctgcttgagtactctaggacccatgttgcacgcgctactctccgagacccacgttggcagcaagaccggggaggggggaggggaggctcgtgctctgtcccgtcgccgcctcctccatccacagttgcttgccgccatccatttgagagagagaggggggtaaagaggaaggagaaagggtaactgataggtgggcctgatatttatttttattgttttaccactgacatgtggatcctatttagatttgttttcattttagtgccacataagcgccacgttgatgtcacatggggtgaaggtcaagttaacccgctacgtaagtgtcatgtaggatgaaactgctattaaaaccaccgagggactctacttgtaccggtttttgaaattgagggagacgttatacccggttctgtggttgagggatgcaattcacctaagggcaagatatgagggaggtcaatagacttattccctttacttactcattccctgcctcactgggccttaccttttggaccttccaggccatatatggttgggccgaaaagggattacgtgaggcccgtatttggattcccccacatatggttgggccaaaactggattgtcatgtcatgtgcgtttacgtagtggaagttgggccagaataggactgtgacgtatgtgcggcccatattagtcgagaaacgaggttacggttgcgtacggctcaaaattatgtgatggagcaggatcccgttctactacgtaccaatatacttgtcttcagaaaaaataataaaatcatactagcatatactaatggattgtgccttgtgggtctctctgctttgattgcaaccagctcgccatgccgactcacttcatcatggctaatccttatccattgtttgatataaagcggatttttttttcgagacagagatagagcggtttgatttcataataaatcaatgagttttctttgtttattagcgagcacttagctcagtgataaagccatgcccgctccagcctgcagctggccgacacatcggtgcctcctttttatcagaagatactgtcgcattcgcacgtgcatgacttctctgtgttaactgctaatacgtggagtacgtcagtaaaataccgcctccaaaattgtaccagcaggtagtagctttttaaggcctgttcattttgatgtcattttcaaccttaccaaattttggtaaagttattaaaaaaagtggctacatttagtttgctgtcaaattttgataactatataagaaattctgtaaaaaattttggtaagtatgctaatttttggtaaggttttttttgacattaaagtgaacatgtcctaagtgtgtgcaggtatgcggtaattgattaattatccccatgcttaatcaacaggccgagagttcaactacgttgacgccacgatagcaagtcacgaacgcactgaatgacgcgtgtcgtactagttagcacatatattcctggtctatctcactgtatgacatcgtatacatggttacgttacacattgacggtatgtacacaccatctcccttggcagctaattagaagtcgtcagtcaagctagctaagctaagctagcgcgtgcgtctggatgataatattgcccacacgattcttccatgcgtcgacgttatgggaactgtatgcttgctagatcgatactgctgtactctcgtctgaactgagtttcagctacgtgatacatcgaccatcgtgaccgagaaattattggcgtacgtgagcttgaccacgggatttcagttgggaatccactagcagcgtggtcacacgagagggcagcatccgcaaaccgcaaatcatatgaactacctgtcatcgagttcatatctagaaagaaatggccaatggaactatatcaagtgcaacaaaaaggtttgctttactcgtgaacagaagttaatctaccgcgaaaagcaagatgtgttgcatgcagaggcagagcagagaagagagagtccgtcctacttgacctgccggaaaaagcttagcgatcgcaatgccatttcacaacgctcctcaactgtttgatctgccccccactggcttgtagaacaccctccttgttttaactgacgatcacttcacgagcacgagcacaggaagaactaagataaggatcaactcgccatgtactaatgtacagattaattactaatcgaagtcaaaacaacccaactcgattgttcgatacactaccgtctgattaaacatttaggttccgttctattctacaacgatagttggatgaaaataaaaattttcgtgacatgcttttcaaactgctaaacggtgtgtttcgtgggaaaactttctatatgaaagttgctctaaaatatcatattaatctattttttaagtttataataattaaaactcaattaattatacgttaataccatcttattttgcgtaaaaaattaatctttatctttatctttatatttatctttaggagaaaaaacatcactttatgtgtctgcttggcccaaaagatcgtctgcctggagaatatactaccgggataatcaccgaagaggtaaaagaatttagacccaggcggtaaattccagctaagtatatataagtagccatcaaacgcagctattccactggcaaacctacacacactattgagcctctgtcacgagaagccaatgtactcgtgcgaccacgaatgcacggcgccaacgcacaccgcgttcggcgccaagtaccagccgtgcatcggtgtctcggggcgccctgaccatcacgccgtcgggaggctgcagcagccggctggcaaggccgccgccgccgccgtcgtttccgcggccgcgcagcctcagcgcgccgccaagaagaggcatgcggcggcgccgccgccgcgcccgtcggcgtcgacgtcgcgccgctcgtcgaccaccgtggtggcgaccgacgtgtccagcttccgctccatggtgcaggagctcaccggcttcccggcggccgccatcttccggccgctgcctcgtaggatccccgtccacgcggtcaacccgtcgcccgcggtgcgtgggtacggtggtggcgcgcttcaggggcacggttcggacacggcgactgctgccggcagcagcagcagcagcaacccgggcgtctcgaccgtgcagctgatgcagtgctcgccgcccggcgtgttcgatgggctgccggaccttgggtcgccggagttcgactcgtggctcgatttgtccgacgagtaacctctccttgtcggactggtcaatggaagccaatacaatactgtagtaaaggtttggtaattggcagtacagtactttctttctgcgcatgcatctcttaaggttagtgtgttataacatccttgaaaaaaatgatggcgtttgtactcaagctttcccaaatttgcagaaatatgcgttaatacactcatgtaatctcaattcttggttggcttttttggacttcgttacttacaagattggttgaaattagtctagcaattctgtcggatgttcttctttcagagagaaaaaaaaagctgtcagatgttcaactacttcttggaattgacctgtctgttaatattgtctgtcttaatcggttgttgacatgagccggcctaatggcatacaagcaccagtatacaccgtcacgagtgacaacattgcgcggacatacgaaaaacggaaggtaaaagatcgccgctgacatgctcaaagaaattaattcatgtactgtaaacaggaagagtacaagagcctgataagttcgtggaagaggtttcagcgtacaagtaacaactgtcatgtactcactactgcaggttgccaccttctgataatctcctgaagtcaagtcctgatacacacgaaccatgtaagagccatgcgtagcaagttactacactgtgacaagtcttggtcactcgtgaaaattgacagccgatccaatctacgccgcaaaagtgccatagtattgagttgaatataccatgagattctcatgggagtatccgacaaaacatgtttagccttaagaacaattaagtttccacgattctatggtctcctatgtctgtaaccatcctctgctaactcatggcaccctattcccgaacgatgtaactgggctttttttttaaaaaccctattcccgaacgatgtaactggggttttttttttttgaaaactacctgaattccccacgcaacaataacgcttgataatgaaccaatactccaatagtatctgaagcagctcagatgacaaaccagtatgcaggacagattttattatatgagcactgctatgcagactagctcacttgtatcattcagaaacaacaaaatagaacacagttctatgcagatcttattttccgatcaaacaaggaggatcagacagacgagatggagcagatatacacctcactctgctccaaggagggcaaggagtatatcctcgtagtctctggttgtatctttagcaacagctcgctccaatgggacactgtttctcttctggtaggcctcctttatcagcttcaggtctacctcggcacgagttgttatgatccttgtaagagagttctcgtctgtgcccattcctcctagagccaatcgaatgactttctcaaagtatctgtcagggcaagtgaagcatcttatgatcgcccttagtgtaccaaggaactcgtccttaggatcagctttaagatcctgtcagtgtgccagaatgtgttagaagagtttcagacaaggacaggtcggcaaacgacattatggaccactagcaatgtgtaataatttcagttcctaaaataccatgttcagtgcaaacaatggcatgttactgaatgaaacatttcaatacaatgcatgttatcattcagcttagtgattggacaaggaatggtaagtaaaatgtttttcaacgggaaaaaaaacggttatcaatgctattattaccttagtgattggatggccgaactgatcattgtaactattgaatgttgctagtaactgtgctttgctccttgtggtgagaatcctgatgatttcatcgtcactgtaagccttgtcatggatcttctcatggagtattttggcttcagaatgtgccaacgatgtgttcacctctggcccatcatagcgatatacagtcacaagtggcaccaaaagctgcaagaaagaaataaaaataattcattttggtaacaagggtgttctttttttagcattgacgtatgcaatttagtagtatgtcacaaattttaaagcacaataataaaatggtccagtcaacgtaaactgaggagatggtcacattctagtatacagaccagggtaactgaagtgatatcatctcacacagctagtaactgcattatcttctcagatatgatcatctaagaactacgttaccatttatcaatgcccacacaaaatacaaataaaaaaagtggaattgcagtatactagagttaaattgaagagatgatttagatccttagcaaaacaattcatcttcaatattgagttatccactatacactacatactaatcatgagaacaaggagatcaagaagtaaacatctcgcataagtctattgtcatgataaacatctcgtatatccctgagaagcatagcagcaagtgtaaaattcatggtttctgtgattatgacagagatatcgatctatcaaaatttcaagaactccgtggtagatgatagattcaggatcatcaccttacggtagtcgccggtgatgtgcgccgcgacgtcctcctcgagcgacctcttgaagcgctcgtggtacgcctgcttcgcagcgaagagctgcgatggagtgcgcgtgcacgcgatctcgacgagcgcgcggccccccgggtgccacttcctcgcctcctcgttcgccagcaccgcgtcccgctccgccgggtccagcgtccactggatcaccgccctctgacaaaatcccaacccccacacgaatcaaatcagacagatagcgacggagctaaaggggggagccgattaatccgcacaagctagatcggggacctcgaatttgccgtggatctcgtcgttgagggcgcggagcagctcctcgccgtacgcctcggcgtaggcgcggcggatcgcccggcgctgcgccgcgtcgcggtgggcgaggatggagatgatgagcttctcgttcgtgccccaccctgcgggaccaccagtaaagcagatcgcgtcagcacccggtccggcctcgcgccggccggcggaggattaaggcgaggacggcggagcgcgcgcctgacctttgaacgccttgcgcagctgctcgcagtcctcggcgacgggcggcacggcggcgggcacggtgagcgtcgccattgatcgtcgctccggtgatcgatccaatcacggtctctcactttatgcctcagtgagatcgtgcgacgccgcggggcgcggcggggaggcgaaggggatttatgcggcggggaggagttcgaggaaagtttggacacggagtgtgcgtgcgtgcgcgcgcggtcggtgacggtggcgacagcgtcgcgtcgcgtcgcgcagggtatggaaagacacgatcacgggggagaggttggcaaggtgggacccgagacttcagtacgtgtccgtgcctgagacgccacatgttgggcaactggacgcggtgatggcatcaataggaaggtcttgatgacgaataatttagctaccttaagtggattaggtggtggttaagaccgtccaaggcgttaatgcgtgtgactgtcatcatttgcaagtttgtaaccggtaatacgtgtgacagtgtgactttgtcgggatgtgcaagtttgtggatgtttctcgttatggtattattaattgttgatctttacaaatataacatgctatattagaaaaaaacaagaagttatatttcttcgttgatttgtgaaggtcagtttaaggggcttttatgttccgattaatattcgttaccgtattcgtttcgattcgtattcgctctgtatttgataatattcgattccgttttcgtatccgggtttccgattccgatttcgattccgagaaaaaaaatatgataatgaatatgataaagttagtttccaaccgtatccgatccgttttcatccctattccaagaacaaccatgtgtgcgcttttcatagtgcatttggtggtggcgatagaatacttggattgggggtggcagcacggagattaaattaaatcatgctgtattagggctggttgtaacaatgtgattgggacactagcttgtttaggccgatggttatacttatacgccgttgcttagcgctcctaacttactattgacggatcatacagggttacacgcgtaaccgttcttactaggaattaaagcaatgtgcacgcaaggacgcaacaatcctaacatccttagcagcttcacatcttcaccaaaactattgcctgccctgcccggccgtcaatggatggccaccacagaaagtcggaaaacgttttgctgtttaggctgtctgatgtttgaactttctagcccatcgttcccttcctagggtgtgcttagttcacacaaaaattagaaagtttggttgaaattggaacgatgtgatagaaaaattagaagtttgtgtgtataggaaaattttaatgtgatgaaaaagttagaaatttaaagaaataatttgaaactaaactcggccttaatttagaacaactctaactaatggataccatacacaattctgactagtgcaacagtgactgcacagttaggcacttattgggcacagccacgtagccaattgacctccaaagtttctctcgagatatggctatatttaggtacagtggtgtaaagttttggcgtgtcacatcggatatacggacacacattaaaagtattaaacatagtttaataataatacaattacaaaatccgcatgtaaaccgcgagacgaatttattaagtctaattaattcgtcattagcaaatatttactgtagcaccacattgtcaaatcatgacgtaattatgcttgaaagattcgtctcgcaatttacacgcaatctgtgtaattagttgttttttttatttatatttaatactttatatatgtgaccaaatatttcaaagtaacagggctaaattttagcggggggataaacaggcgcagtagtgccggtagggcgatgaatgcatggccatcgagagaaacattaaatgcgtgcagagaccgttgttttcctgtagttgttttttttggacccctttgaatcacggaaatagaaaaacggaggaataagtgtaaaacagagcattgcaaaacacaggaaaaatataggaatgaccgtttgattggaccacaataaaaacacatgaatttgaggagagataaagactcaaaggatttcttccatgaggttctacctcttgttaaaattcctccaaaacttgtatgggaagaggcattccatagtaatttcatagaattccatagcgttcattcctttgattcaaagggctttgtagaaaaaattcctataaaaataaaatcctctaaaatttctatgaatttcctccgaatcaaagcgggccttatttttttctggacggccagctttcagagttcagaacgaacataaagacgcgatgatgatttggaacgtacgtcaccgttcctgcgtcatcgctttgcctaaggtttcgatgaggattgaactggaatgagatgaacacagaacaattccccaccccaatcttttttcacttatacttatgttatgtttattagttaaaatttaaattttcaatcttagatttaaaattaattttaagttttcttcatcaaaatttatttttagcatttgcttttagatagttataagaatacatatataaaatttttattcataaattattttcgtttgcaaatatgtacccgaagtactccgaacccgaagtcaaataaatttgacagaggagtattgagtctgtataaaacccggacaacaaaagcttgaagaattcctacctgtggtaaaacagcatcgtccacggtacggtgcgcacacagacacacaaatcgaacactcttgcactaataaattcagggggtgtttatttcttttggtgtaaagtttttaaagtatacgaaaacatttaaagtattaaatgtagactaataatgaaacaaattacagactccgtctgtaaactggacaaatttattaagcctaactaatctatcactactaagtgttttactgtagtatcacattgtcaaatcatgacgtaattatgctaaaaaaattcatctcgcaatttacatgcaaactgtacaattgaatttttcttttcatacttaatgtccacgcatgtgttcaaatatttaatgtgatttttttaaaaaaaatttttgggatctggcctcagcagagatcttctccgacgtccctgacgagttacagtaacaagctactccagctttccatgtgtcaaatccaggctagtgtgatagtgtcacgcccgctatcctgtaccgttgcacatcgatcgtgatttgtcacgtgaaatttcattaccacgccagaaaaaaaaaaaaaagcccgcccgggccgagccgaatcgctcgattatccgtccgtccgagcgcgtctatctcccaccgccactttgccattgtcacgaaaggcgcgagagcggagaaccagttccgcttatgggcaggcgcggtcgcggaacctttgaaacgtgacgaccgagacgtgacgtatccgagccgcgcgcggaggcgagcgcgacgtcgctgtcgcgcggcccgtttctggcgccctccgcggcgtcacgtcgcggcgcgggtcggccaccgctgctcttccggcgcgaagagtcttgttggttgggtgactcgatccccatccccaacccaaagcatatccctcctccgggacaagcgttctggcgcgcacttggcccagcgcctaactccctttcacccaacacacggttcggcgccgatgctagctgctgctgcctcgtctcgtcgcgtcgtagcctaagcaccgcaacgctagaagccgagactggtctatggctaggctaaagcttgcccgatctggaggttaggcgcgcgccgcagcggggggcgacgatgatataaatggccactagcgctagctacccctcctgctccttgccgaattgccgtgcacagtgcttttttttcttcttcttcttcgtcttctcccttgccatctctgcgctccgatccttggttgagctgctgtcttgtttgtttggctggatcaataatgcatgcgtccgtggggaggagatgggggtttgatccttgcgacgaggtaagtgttcttcagctttctcgttgcatgatgcatatatactgctttgtttctccagcttgtttgatcagtagaatcgatgtagtatcttgtatttttgttgtgatcttgctcaaaattaatatgggtattggccctccaagaaagaacttatggttattgtttggttgttaacttgttatgcttgaagttctttttttttttttgagaacaattatgcttgaagttcatgtacggaaacggagtcgtatgtactctgtatagttcagtacagtagttggtatggactggagttgatgctgctgactttcattttgatctactacatctgatctgcgaactagatgagagtcatcaggaaaaattgaagaaataataactaaccgtttaacagtacagagaaaaaatatcatactactagtacagaaagattggtactgctataaatttcttactgttgaactgtaatgttctagtagcttttctggactactaaagatgaagcgatttttttctcaggtcacccacgttgttatgaatgactttgctctgatgaatgaccacaccgtgctgcttcaaggccatgacaagtcaaggatcagcccagctggttatttgacaaggtcaggacctacacagggcggtggcatcagaaacaatattggatattgtgacgggagatccatcaatgaatcctgcggtaaaagaagcacttatccaccaacttacaagaaagatgtcactgttccaaaaagtacgcaatcttgcttgtatctttcctttttgataatggagcttttatgatggatagttctagtctaagaccatgtctatgaaatgcattcattcaggtacaaaaccaagcatttttgatgctgatgaatatgtcagtgttagcaatgtttcagacgttccttcgtcagaaggcaatactatgcaggatgagcacaggaacaaagggaaagatttgttatactgtgattggtctgaactgctcaacttggatgacctcgaagcagatctgaggtaatctcttgctgcctccagcatctatctttatccatcagaagctgagtcctttatgtgaatcttgaacatttttctttcatttttttctgaagaagtttcgagtccacgtttgagataggaagtaatcactttgaagatccactgtggtcttcagtttgcttaccagatgcccagctagtaccaagcagctgtctcttggacaataccaatttgtcaactgtttcgaatgagagcacaacaaagtctatattatcatcagtttcagtttccgatactactagtgctgaaccattgttccttgatcaggtacttccaaacttttgatctttctaattgatttccccctaattttataggttagatgatgccgagggtttcttccccagggtagcttctcttgtcattccgagagtcaagatctctggcctcttcaatatgcaacaaatctccagatcatatgtttcctcaaaataatcttggttccatataggaacattttaacatttctcttcaatttatctctgcagaataatatggcaaatcctatcaacatacaacaaccacccagcaaaggaagaagttcggcaactttgaatcatgaagcacttgcctgttcttccggggaaatcgagcgattttcacaacattcagatgttgatgttttctacccatttgacaatgtaacaagctcggaacgcataagtggctgtgagggactagaggctatcttttgcacaaatcaggaaatgctagccccaacaacatcaagcatcatgtgtgatgatgaaattgtatcttcatcgactttctcagcaccggatctcgttgcaacctacgttccgcgttcgatgaagagatctcatgatccactgaatggaactccagacatgatcctcgacgaaatggctggaaatccactagagatgtatttccctccatcattgactgcatatgaacacccagaacatctgaataacgttactttgacacaaacacaccagtttcctgaaggatttgcaggtgacgatgttctgaaaagtgcagacttacagttcctctcgaagggaaagacttcagcagacttatgtgtgaacccttgctcaccactgattctagaagctgtgccagttaaggatcttggcttccataagcttcaggaaggcatgaatcaggtatactaatagtatcagtaacttagaacaccctcttgcaacccttctagctatgttgcattcttcaggaatttgtgaatgcaattagctattattcaggttgataatatttcagattgtccatgataagtattcagctcttgtatccttccaatgtactttgcagttggacgtggcatccaaagctcgcataagagatgccttgtatcgattggccaattgtgttgagcataggcatcgcattgctagtacaacagagaccgttaaccaacttggagttatggaatcatcagcttcaaagaggtacaacggtttaatgtgatcttcaattatgtttaggacacttgaagtgatcgacagctgagtttttgtgaagtgtaattttctgacatgttcaaatcaaacaggtggagagaaattcagatgatgaaccctatggatcgctcagtggcacagctgcttctccagaaaccgctccaccataaatctccacctgattcggcgctcggcattggtccctgaattgtactgcaccgtgaaaaacacgtaggagtggctgctgatgcgatgtggttttttttactgcacatgtctgatcgattgagcattctaggtccggcaattttttttccctctcggttccggtacgcatgtatatacagtaatcactaaagagtacagacttactagatgaaatgtaatgtgatagcaacgctttgctgttcagagatgtgattctaaatagaaactacagtgttttttttttgttgtcttcagcatttacctgtgacttgtcagatgccccattgtaccgtccaaaaatttcctctattgacggttaccccttggtcgcagatttacacggtttctcttattgacggttaccatggtaattaggcttatcacgtgtgcggaaacgataagtgccggataattctaccaagttcaaagaaacttaaatgtaaactctctccagttttttcacggttcatcacgataaccgcaatggttaccgcggtcgttggagataaaccctgtcgccgaaccgaggccgcctgtgcactaaccgccaattagaggaaaggaaacaaatcttgcaagtgtgcaagtgaccgggctagataatccaatcttgacttggcagttgtgttcgccaccgaacggcaggagaagcgaagcgtggggaggaaaaggcccaaatcctcgcctcctcctgcctgcaaccaccgcctccgtcgtctcgtctcccccggcagaggaatccccaacccggaagctttcgggagtcggacgagctcgccttgactcgcgtccccctccctcgcgcgcgcgcgcgctcgtcgcctcctaaacttagcggccgcgcgggacgcggaggggcgctcccctccagaaataggcggggtgggtggcgaggaggatggggtacctgccgtcgtcgctgggcagcaaggcggcgcacttcgtgtccgacctcaccaccgtcatcctcaacccaatctccgagcgcgagccttcctccccactccccgtgagacccgagatctctctctctctctccatctctcctctctaccgttcctcgtagtgcgggcagtttatatctggttttgaattgtgatcggtttgcggctcgcgtcctagatttgcgcgatcgggctgagtcggatgctgccggtagagatatcagcgtggtttggactttttggagtgatttcgccgcagggatcatcccgttgctagggtttttgtgtaggttgctgaattctctgcctgtctttgtttagttttctgtgggggtttgccgcgatctggatgagtggcaacggaattggagaatgctgatagatagtggacttcgtcgggtggggatatttgtgttctttttgacatgattgaggacttgagaagttgaggtagctgcaatagtaaagttagctcacctgtatgtttctacttgctacctgaaagttgttcttcgtattgtcagcttctgctagtctcgagaggggaaatagttctgttccatctcagtgcgcttttgaaagcctaccccagctgtttatctgttgtctttgttgatgtatccctttgcattctgttatagtttaaagatggtttgcattgttgattgtttgaaataaattgttactgcatgtgtttgatctttgatgccagtttgtagctatgaattgccgctaatcactgacccgtgtttcactcaccatcttgttttccagtaagctcacatctcaagttctttgatcgttgtaggaggtggacaaagacgaagaaaaatcagaggatgacaaagattctgagcaaaattctgacacccccgatggccctgacacatcttcctttagagcattcttgatctcattcctgtcatcatctggttctagtaatggttccatggagataattcctgatcagaatggggaattgggatacccaactttcacaccaatggggaagtcaaaaaagggaaagtctgggctcctaagtagaggaaaacattccattggaaaaatcattagcaaagcggctagaattggtggtttcaaacaaaatgtggagcctaagattgatagagaggtggtagatcatgttgaatcagtttcacctgtattggagcttgaagaatcaaaggaagttgcttccttcattaatttgccagctatgtcagaaccatctgttcttttgtcagaagtgatgaggttcaatatttatgcatcttttcctgttcttgccaaaggaatgaactgggtcttgctatacaggtttaaaacatgtctgttatttaatatggtatgactatatgcattagctaaagtctaatgtttgcgttcacaattgtgcagcacatggaggcatggaatatctttgtctactctatacagaaggagcatgctttgccctggttactctctcttggtattcttcttctgtagcttgaagctgtttgatttttatagtttaactggtactccaaggccagcagccagtgtgccaatatacatattgaagttccaaatattcttacgtgggtgatactgtgatagcactttattccaataaaattctatggtttaaatatcggtctccataattttagctcatgttagttcagtttttacaaaacttctttttttttttgtttagtaataataataatattttccctaacaggtagttggggataaagaaggtgcagtttttggcggtttagttgaggctccattgcagccaaccagtgcaaagaaatatcaggttccacctacacattctgaatttctgataccctttttttctggtttaattaccttatgcagattatgatggaatcttaatattgcaggggagcaatagctgctttgttttcactaatttacacagcaatcctagtatatatcgaccgactggtaatatttcacctcctgttttcatgttctttgcataagaacatcaaaagctgcgaaataattttgttccatttgaccctaccttccagactactagatgtatttctctgtgtagcagtgacttatgattgtttttgtcccctgattcctgttcaatatatataacactagcatactcctacaaaaattctgggggatcaagttgctgaatatattactgttaacactagcaaagacttaactcaggagagcccctgagcattcatttctggtattgcaggtgctaataactatttcacagtgtgctccaccgactatttggcattaggaggtggaggtcatttcgcactttatctagatgccgacctgtaatctcccacctcttaagcatgtctttcacgccgtcaaatctgctggttttattgccttttgtcattgatagctctcatcttttcttctgggttaccctttttcaggttgagtggttcaagttccaattcagagacttttaacaacatgtgtttatctcattccccagacttcgcggtaaaagatgtcgaggtatctaattgtgggcttctggctgaatgctatcatgttcatctgggatgcagatatgtaactgctgttttctttgcaatgcagctgtggggtttcgtctatccttccaagtacgatgagacgctcgccctctgccgtactgagaaaccaggaatttgccggtggtgatttggtggtccttgaaggcttgaattgtgctgaatctgcgaatgatgcatctgtacagtttttcgtagacttgagagaattttagtgcacaggatcgtgtaggattgtaggagtgatggaaacttgcgtttctcatgcgagcttgctcagagctgtacatatttgtaattttcttgctactgttagcgaaacatggacgcgctggttatttgtttcagtgttgtcagcttgtcattatatgagaacaatattactggcgaatcaggagataaatgacctgcaatctccccatgcctctacaagaaattgcatgcaaaacatcactagaactcgcaaatcgtgtgaccgttctaggcttctagcgaatcattttaaagcagctgaggcgcagcgataactgttagtgctagctaccattaaccactgtttatagataaaccaactgaagacgattacattacatacggaaaacgtaaatgacatatttatccccttttatcagagttattcgaatcacatgacgcgtgcaaaaggataactgacgcgtgcaaaagtataactgtggctgcgttttataatacgatcactcgatcagacatacgagagggcaccatcgtatttcgcttctcaagtcaagctcaggttttgaaggaacagatggaatttaaagagcttgaatatgttattgaaatattcaat

SEQ ID NO: 20297 - DNA, 2730 bp, Oryza sativa
ttgagtaaaggccgggatattatattctattatctgaagaaaagacgcagatgtcagtaggtctacgtctatgatgtggatttatcgtaaatgtgaaatgtaagacactaatagaaaaacgatttttcacaaagacgattacaatttttataggctgatgttatttttagctgtgaatatgcatgcgaagttatgtagagaaggatctaattttttcccgcttgcaaaaatagatatttttttactaacggacaacttaaaaggagccacctatgataatatttttatttttgcaggcagatctcttccacggcggaacaacccaaaaaaataaattttcaatttgttcttgtccccacatctccccaaccactccctatctatccttatcttctcctctacccctctctctctactagactatcagacttctctcattctcctctcaccgtcctctccctagagcgcacaatccctagagcgtacaaggaggagggctggtggcgggtcggcggcatctcggcgaggaggaggaggagatccggcagcggcggcggttcggcatggcgaggagggcagggtcaacgaggtggtctggcaacggcggctcggcaaggaggaggagggccaatggcagggtcggcgtggctcggtgcggagaatgtcctgcaacggtggcggctcggctcggtgagaccatgaggaccggcagcagatccagagttcctccgttgttcttctttctctagatctagatctgtaatttctttttttttctctttatttctgaggactatgtgaatcttgtttctcatttgtacagtgacatttgatatgtgaatcttattcttctcatttgtgtggtgatatttgatttgatttgtactgtgcttaatctgtgcaaatggtagctggatggggatatttttaaatatatttttttgcccaaaattatcttcgtaggcggtttgctttagatgtccatctacaaaaatctcatttttgtaggtggaccgcttaacgaagctgcctgtgaaaatgatcttctttagagaatgctaggacaacatcaaggcggacgtgttcttagtcttcaactccattttcaatctcagatgtgccaacctgagccttctaaattcaacaaacatcatcttgattccaaatattttaggccaatataattagcctgattcacaacattgccagaaatcctctctaagctgttttcgatgagactgaggcccctcatgaaatcccttatctctgtcaatcaaagtgccttcataaaggggagaagcatgcacggcaactttctcttcgtgagaaacattgcccagagatatcaccgcacgaaagggccagtgctagttttcaaacttgacataatgaaggcatttgactctgtctgatgggactacctcatggctttgctgcagcaacgtgccttccctccaagatggagaaactggttgggggcccttctctccacctctacctctcaagttgtccttattggtatcctagtgcacaggatccaacattgcagaggactccggctaggaaatccgctctctacgcttctcttcatcctggcttttgacccgctgcaaaggatcctcggtaaggctactgagctaggcgtgctcacaaagcttcgaggtagaatggctcgccttcgaacctctatgtatgtggatgacgctatcatcttcgtcaacccaccgcgagaggatgtcatagctcttaaggaaatcctatgacgctttggctcggccaccgaactcatcaccaatctccaaaatcccaggtggcggccatcgatatgagagcattgatctagagggagtccttcagggcgtcccagatgtgagagcgcacttcctgcttaagtatctgggactccctcttatcctcgatagaatgaagaaggctgacaaatagattgttgggcgtgtggcgaactagaggggaaaaaacatgggcctggctgggaggaccacacttgtcagagcggtgctaatggcatagccaatatatttattgacggacctaaaaatgtcaaaggacgccttggagcacctgcacaagtagcggcagcgcttcctgcgggctggcacttggaacatcatcagagagaaatgcaaggtcaactggacaaatacgtgcatgctgaccaggcagggaggcctcggggtactcaacctagaaaatttcaaatgggctttgtgccctcgttggctatggcatgagtggaaagacccgagcaagccgtaggtggggctggagacgccttgcgatcaaatagataatagcccttcgctacttcaacaaggataaccgttggtgaaggaaacatgacgtgcttctgggactccgcatggataaatgagcagaggccgagagatctcatgccactagtttacgcaatctctacaaaaagagggaagtccctacgccaaggaaaggaaaatgatgcttcggtcggggacttggccttgcagtcaaacccacaaatcacggttgccttctctgaccagcttgtggccttatggaccgcagtccgcggcgtgcatctagatgaggaagagtctgatcaaatttcttggaagttcacagctcacgaacagtattcaacatcttcggcctacaaaactcagtgccacgctacacctgacaccttttgacacgctgatatggagagcatgggcaccggggaaatacaaacta

SEQ ID NO: 20298 - DNA, 853 bp, Oryza sativa
cagtttaatacatttttactgctttccaaccactgttgagtaaccacgtccttcgacgtatgcagttgtcatttcgacaatagctggcgccgacgttggggacctccgagcgaaaccactgagagtaaatggcaccgaagagggtcgtgaaggagaaggttgcaaagcgaatggggagtgaagcaggagaggagatggccgccgaagagggagccgagccttcggcgccatcgttgaaactgggggagcaccgtcggcttcggcacctgcgccgcaaccgccaccttcagctcttgccacttcgtcagggctggtgccaaacacggtcgacgcggcgaaggcagctacggcagcaagggcgctccagatcagggcagagatcctttcgacgagccagctgctggtgccccaagccgcttcgtcacagctggcaacagcttcgaccgcgcttgccgctacgcaagtcaaccccagcctcgaagcacaagccgaagccgacatggaggccatgcgccaaaacatgacccgactccaagacatgcttcgccagatgcaagaacaacatcaagcgtacgagacagcacggcaagccaaggtcacttcggccccaatcctccggtattcggcaggctacattccaccccaagcctaaccgcaagcatcaactcaggcccttccgccacaagccatacaagcgccagtgtacttcgctgggcagccttcggccgcaacggtacacccgacccctcatgtacaaccgcagttcggccggtcgttgccaaagtacaccctggccaaatgtcacaagcaatggcggaaggggcctcggctttgcaggcacagcttcaagctt

SEQ ID NO: 20299 - DNA, 754 bp, Oryza sativa
caagtccatgatggccaggtctgataatgacacgttagtcatggaaaatcaatattaccatgggcagacataccagtttaccgctgcagttacatacaaagggaatgacaggacaatttccaagatcttgagaagccttgtgataatcgatgtctccggtaacgcattccatggtgccatcccagataccattggtgaacttgttctgcttcgtgggcttaacctgtcacacaatgcccttacagggccaattccatcacagttttgcaggttagatcaacttgagtcattggacctctctttcaatgagctttctggagagatccccaaggaactagcatcactgaattttctttcgacgttgaacttgtcgaacaacacgttggttggaagaataccagactcatatcagttttccacattttccaatagctcttttttgggaaacacaggtttgtgtggactaccgttatctagacaatgtgacaaccctgaagagccaagcgctataccatacacttcagagaaatccatagatgctgtacttctcctcttcactgcattgggatttggcatttcttttgcaatgactatcttgattgtatggggaagccacatgagaaaacgacactgagagtactttgtgtatgtatacaactctagcagtattgagtgaggccaatattcttaactgaagctatgaacgttctgatttgagcaataatcctgggactgttgtaacatgaatccctat

SEQ ID NO: 20300 - DNA, 3122 bp, Oryza sativa
acagcatggcaccgacgtaaacagtaacttgaccaaactctgaaggctctcctgggcaaaacgtcgaacagggtgcctgcacggtaaggcttgtcaaaattgggtaggcggatgctacaacccggcgtcctgagcacaaatcgatcggccgcaccacaccactcacatacctctagcctttaggcggaagatgattgctgagttcaggtgatatcagatcgccgcccgcaaatctcattcgcttcctgtggcaagcagcaaatgcaggagctaatctcccatctgtcacgcgggagagacctcccactcgttctcccctcacctgccgcgccttcgtggagacgacgagtccctctcggcgcccttctcccgcgtccgtggtccgccgccgctcggagggttcgggctcggtacgaaagttgttttctactccattcgtgtagctcgcgtggggagtggagtgtgttctttttttttttaacggaaaacagcgctagtgtgctttttcattgaatagagcttgagaaaatacaacccctaatgataaaaaaaaaagtcacggtaagctacacacgaacgcggaataaactgcaagggcctagagactagcctcctctttgatcttcgttaaaaggaaactcattgccatctctttgtggtcgaaaatctgtcggtttctctccttccagatctcccagacaactagcaggatcagagatcgaagtcctttttctgggacagcggacgtgtttgctaggttctcccaccactattgcacttactgggccttcccattgacctggttccatctattggtagcccacccagctagacacaaggtgccagattctcttggtgtatctacacgtggtgataaggtgcaaggccgtctcaccttctcgccagctagcatagggggcattggccgttgttttgccaacccctggtctggattttgttctagaatgctgagttcggcacccagacctagagttgggaacttctcacgagcacgctttttaaactgctaaacggtattttttttaaaaaaattatatacgaaagttgttttaaaaaatcatattgatccattttctaaaaagaaattagctaatactttcacgcgctaatatatcgctccgttttttttcgagagtgattcttctttagaaaccatgtgttaacttaagaaattcggctacagcgcaagtgtgaatcgaaatgacaaaatagcacagaaggcaacatttgtgtcttccgttagacttgagttgggcccacatattggtaaatgataccgtgaaatcaacagatttgttttgtttccttgtggttaaaaagggtctatttctacagacctatagtgtttcctatatgcgtactatagatatcttctgtgcttttaaaactctcactgataaatactgagaactagtagaacctctggtttctttcaataaataaacagtccgcaatgggaggaggtggatcaataatgtgttcagattttgattagttccagaagtactatgctgaattgatctgttgatttttcacatgttgattactgatcagttggtaaactctgaatttatgtgccaaacatgcatgccatttaacttgcacaacaatagagaccacaaacaaagaacaaagtgatataatataatgtagaccacgaacttctctgaatattctcaacctagcattacatgtaggacagttgtcttccattaaccatgatatgtaattcttgctgaacggagctgctatgctgctcttggagaagcatcgccggctcctgctcccagcttcactgccttgagcatccgcccagtttagtgttatcaaagcaacaaatatatgtggcttgaggaatacatcccaactgaagctcaatacataaagaacatagtaaaaatggtgtaaaccatatatatacattatttctgcacacggtccatcacttattctgcttttcctaatgcctgttcagttttaagcaattaaaaactgatatggcaaaccagaacatgtcgttcttcagttgaacaggggcagatagcggagttggtgctgccctcgacctccttcagatttattgacgcctctcggaaccgggttggtgacgcgtggggatgaacatcgcctgaaagcggtctccgaagtggccaccgccgtcataatcgggcacacaccggaggaatggatcagagggcgctagcggagctcttgcccgcgcgcgcacggcggcgaaacggggtgacaaatgatggacaagaagttggggaaagaaccgcctatgagagcggccgccggaggccggagcagattgctgcgtgcgctaggatgcaccgtcgagtaggagagcgatacaacctgatgattaatggatactcttctttactctttttcatttacgaagtagtactgataaaatcatactccctccattccaaattgatctacatatttcataggtataccaagaccaagaaaaactaataactctctcatactatatttactctagcaacaaactcgatgcatgcactatccctaatatttcctagccaatagcaaatcaagatattgcatgtgggttataaatacttgtgtgcatagatgtatgcatcaatgtccatttactctaatgcataaataacgagacttaatggattaacacaaatatgtagatcatttaggaataacctcaaaaaaactatatgtagatcaatttggaatggagggagtaaataccagcattaccatgatgattattattaaagtacttatatgtccttacgaaccaatggtctaaattgattctactgatagtataatactactagtagagagcttcctttattcatgggcttccgatggattatgctggctgggccgctggggaattttcgaaattttaatggaaactataggacaaatacggttaccgacaaaacggtcggaaaaacctccatcccatttccgctaccatttccgaaaaatattaccgtttccatttccgacaccgacaattactgacaacgactgaaatggtcggtgcaaatcggaaatggcagccaaagatcttggaaatttctataccattttcaccccta

SEQ ID NO: 20301 - DNA, 1584 bp, Oryza sativa
ccaaatctcaagcagtcaagacaaagaggatcaaatatctatggctcgatttcaaaggtggcaaaaacatttctcgaggtgctaattttcaaaggatttccccagaaagctcatttgacgagaggtctaacaattcaagttgtttcaagttagcaaactgaactgggattggacccgtaagagcattatgagacatgttgagagcacgaagcaacacaagttccccaatgcttctagggattctaccatggaaagcgttatttgagacatcaatgagtacaagtgttcttaaggtcttggaaatcgtcaggccactacctttgtatgagattccagcagtgaactggtatgactgcatcttgccacggtaatacagatgttggtctctcattaacatatcattatcacacgtgtccattatcattgatttgagcatcttgaaccactcttctggcaatgtgccactgaggttgttcgatgacatatcagcaaactgcagtttcgtaaattgacagttgtttccacctccagtataagaaggatccaatatctgcccaatgaacttgttagacttgaggaccaggacttgaagttgaggaagtttactcatccaacatgggaaagagtcactaattttattgtttccaatgtcaaggatctccagattcctgcaagcgaccaaagatcttggtagttgtccttgaatcgaattgccgctgaaatctaatgcgcttaatgcacaaccttccttgatattatcaggtaactcgccggtaagatgattatcctttagacttagcacctgcagtgcatctgcatcctccatcagacacgatggtattaagccagtcaaattgttgttagagagatcaatgagttgtaaactcttaatcctatcacagatggatggtggaatgtttccagatatgctattattggaggccttgaaaaggacagtatttgataggtaagtagagaaattgagaggcagagatgagaaccggttgttggagtaatcaagggtgacacttccttcttttggtataggtattaccccttcaatattgttgaaactgagatcgaagaattcaatgtaaacaggaagcaaagggtgatcagatccaatactcgtaaacttattatgtgataggttgaacaaggcaaagcctaggttcaaggtcttccatgcccacagaggtattgctccttggatttgattatacgaaagatcaagaaaagtaatctcatggagatgctgcaagatgttagggaagctagatatactgcaagatgctagtcgtaacaagacaatactagggtaggacactactgaagaactattttcaccatccatcacaactagtctattatttgagagattcagggcagagagattttgcattttggagtacgatgatagctccactgtgccaactaaattgtttgaatggagcaggaggtattgcaaatgagtcaaatttaagatctgtggagctatcactcctgaaaagtggcaattgtacagtgccaattttgtcagtttttttaagttccctatggaagctggtattcactactacagat

SEQ ID NO: 20302 - DNA, 1199 bp, Oryza sativa
ttgtcatcagtgacgggtcgtaagttacaacccgtcagagatgagtcctcagtgacggtcaggtagttacgacacgtcactgatgactcatctgtgacgggtgacaagttttaacccgtcagagatgacttatataccggtcagagatgggttatctgtgacgggtgtttcatccatcacagatgattttgtcatcagtgaccactaatcactgaccaagaccaaacccgtcacaggtgagggtttgggcccgtcaaagatgacctggtccggcgtaatgattggtccggacaagccacatctgaagaacttgataacagtaagagaagtcaggtttgagatccatgatggtatggatcctactagctctaacccatacacctctatataaagacaaggatttcagctgaccaatggaggagggcagcactccagagaaaccactagctccaagagccaactccttgagagatctaatgttgctgatagaacctggaattgtccctgaaaagttggtgttgctgacagataaactctgtgagctactgtcacctgagaaactactaggcaaatttccggagattcctagatgtttggtgaggttaatagttgtaagtttctcatgctggaagatgatgggagggaacaccccttcaaacatgttatttgaaagctgaagaacactaaggctggggagtgcagccaagaactcaggaactggaccagacaaatgattgtagtgcagctctatcactgaaagtgatcgcaaggccgagagcgagtggcaaatgggaccggagagtgagcagtacggcatgctaatgaccctcaactttggcgatgacctggccatggcgtcgcaccaccgtgcagtgccgtagttgctcgacatgttcaccatcaccatgcccaggcgaagctcctccaggttggtgaggtttgcgagcaaggtctccaagctcggctccgagagctgtgccattgtgtccgagtagtagtacgtgatgctgtactcgtcgtccaactcctctacaaaaaatgtcgtcgacaggtcaagatagttcaggctggtgaggcggccgatgccggcaggtaccagaccagcgaagtttgtgttggagaggtcaagatgggtgagtccggtgagcatctcgaaccctgtggctgggagcttggacttgctgaagtcgttggaagag

SEQ ID NO: 20303 - DNA, 3568 bp, Oryza sativa
aattaaatagattaaactgactataagataaaattttcattggtaataacgaaggttttttgattttggaaagtatgggcttgtttggtacggctccaactcctaaatttagcttcatgagttgggtttggagtgaagttgtggagatgcctaaatccagctctataactctagtccattttatgatagagctccacccagctccacttctattttcggtggagctgaaactgtttgtctgagcttcagtagaggtggaggtggatttgtgccaaacaggtcatatatatatactagaaaatcggtgcgccggttggcgcacttgttttatagcccgtgtatattgtttatatattattaagatgcattactttcattctattaaacaggataacatcatgcaatgtgtacagttaaatatcaatatcttaaattattaaaatttgaaaatcatattagtagattttttatgaaaactctttttatatagttgtatttttattatctttgatatatgtatagtttgtgaaagttatgataaactttatgtattggagagtgtgtctaaattgacattattttgtttcccaaaaaaaagggcattcattttaagaatgtaggatacattttactgaattttataagaattagttcgattttcttgaaattcatgcaaaagctgaacaattaaataaacatttcattattttttttcaagtgcagtttaacttagcatatcacagtactatatggcaattttttaatttttctcttttcccatccatactatttagggttatttatttatgaaatgttataattgagttatctattagattataaaattggtgatgaattttttaagatgtttcatattttttttagagctgcgatgctcatcatttcttcctaacacgtactaacaattttccaaattttttttcccaaaaacatcacatcaaatctttgtacacatgcgtggagcattaaatattgatttaaaaaaaaaactaattgcacagttaggggataaatcgcgagattaatcttttgagcataattagtccatgattagctataagtgctacagtaaaccacatgtactaatgatggattaattaggatcaaaagattcgtctcgcggtttctaggcgagttatgaaattagtttttttattcttgtccgaaaaccccttccgacattcggtcaaacatccgatatgacacccaaatatttttttttcgcgaaagccctagtactccactgaagcctatacatctagcttaactatcctactgagtaactacggtaggtcagttgctatttttatagggaactatgtttattttattaagtgtcgaaacatgaattcggcaataataaaagggggtagcgcacgagacctaaaagtggatggatgtggagacaaaggattagacaggttcaggccctctcaatgagaggtaataccctactcctgtttggggatttgaatccgccgagtgtgtattgatctgacgatcaggttgtctcatgccccctagagggcctcctgcccaccttatatagggtggggggcaggattacaagatagaaaccttaaccaatacggtatcggtttcctaaatctactttacaatattatcaaaccaggactttaggctgttccgtaatatataaggaaacgtaatacccaagtcatgatctgttacatattccatacatataagttatcccctataactagtcggataaccatgccgtgtgggtatggggtacccataatctccacagtagcccctgagaccttcacagtcgaaaagataatcttctctcgaaccagattactccaaagccgagtacttcaatcatctttgccatggtctcccgagtacttttaccaaatctgaagactgtggagggctgaaaaataaagtcaggtgcatcgactagatgcacctaataggtgtagccctcgactatgcggttaagtgaacaaaccaagcatatagtcaaggaataaataatccaaccaaccgagtggcttcgataattatagttaatcaagcgacttgatattaatatgtagcatatgcggtgtaaatccctgaataacatgatccgagtgatataccgactgctttgtaaaatatgatgagtgtaacctaaagttggctacattattgaaaattcacatagcaaaacagctataaaaaagctagtatgttgtgaataaagaaatttccaaagtattgggcatacgccatgcgcacactgctttaacagatgtgcttaagtccctagaagacacatggttccaccacacctggaaatatatgacatatgtggtataaaatccgagtaaataaactcataaaggatttaccaaccgcctgaaaaatgaccacaatatataatcagcctaagccataatattggtcaataaaaatgcacacttacgtggcaaaaagcaacgatattgtatccaatcaattgcttaaaaacccaaacagcaccatgactatattaaaaagtcagcggggcagctatataaagctttactgtttgacaccttttaagatgcattgtaccaactcctaaaaagttgagtaactgcggtataaaaggattttaaggtattgggcacttgatcacgcgcactttggcctaagcaaaaagtgcctaagtccctaaaagaacgtgacaggccacacctgaaaatatgggctgcagacatattaggcctaggccaaaaaatatgccttcgacaccctttataggatgacgcatgtaacatgctcccgagtaataaatcttccgggtaatatagaccaagtgtagctcatatgaatagcttctgatctgagtgattatcccttatgggataccccaaaatagatataaaaattgaatcccgactggcgcaagtattcggttgataacccttacggagaataataaatagtccagtctttgagcatagaaaatagacccatgatcatgaattcatgttgcatgtaaccggaacaagtccaaattgaaggtatgatacttgtgtttgaactagtaagcctctgagcatatagcttgtccttctttgtagtcacaattgtccatcgatggtagctgacgcagttggcatagagacaagacgaccaatatagagataatattgcccaccagaggtggcaaaaatattggtggtagtgaagatagtgataccaatcaaaagtactgaagtcgcatagccatggaggcgaagaaaccagtcggcggcaaacagatcaactaacaatgaagatgaaggcgcccagcgataaagttgtgtagccatggcagcgaaataatcagtcggtgacagacgaggcagatcaaatgcgatgacgaaatccaccaatcatgaagatgaagaaaatagttgacgatgacaaacgcaaccgacatgatgaagatgacgatgtcgatgatccagtcaatagcagtgtagcaaccaatgctaatgacaaagacgctcatcagcatttgcatagtaggtcaaccgtgaaggtgaaataataagtcggtgaa

SEQ ID NO: 20304 - DNA, 716 bp, Oryza sativa
aattcctgcagccccccgactctttgtttagttgggaaacaactgaacatagagtcgagaattatagcttcttatcgtcgagtagtcattgcttgattgaagatatgtgttgaagatgtccaagtagaaatcatgaatgttggagagccacttgttgtagtaaaataacacggcatcgcatgccgagatgtcgagattcacaacaacgtcatggttggtgatgtagcaaaacttgtgaagtagcagcaatagagtttgctggtaccgaagataataaagatgaagtcgctccaccatgatgacaaagttgtgttgccgtgatgaagtgaacacgagtcggcggcaacagaagcaaaccggtagtgaagacgcgcagttgtgaagataaaagcactagtcggcggcggcataacacgagtcggcggcggaagacgatgatgtccatcagtagtggtagctgtataaaccaaatgtagaggcgagggcactagtcagcagcagacgagacgaccggcgatgaagatggtaaggccaatcaacactggcagaatcatgcagccatggaagtgaagaaaccagtcggcagccatggcaaacgtaggcagcttgtgttgaagatactgatgcctattagtagtgacagcgatgtagccagccgtgaagaagatagcatcagttggcgttataacaggccagccatgcaggcggtgacacca

SEQ ID NO: 20305 - DNA, 1343 bp, Oryza sativa
ttctgactgatccattcctgcagcgtaagagataagcgtaaagccatgaatcccttttatgcatatctggatctggatcctgcagaacaaacatataggatgagtagtatctgatataaatataatactcgagaaaaattcaagcagtttataaatacgtatttcttctcttgttaattttgatttccccgagcagatgactcattacgtttaaacactctgcccgactagtcatagccaccaagcactgggagtcggcctaagcacttcccaaacatgcatatgagtgacatgagttcgtcattaatggaacaaagtttcacggatcggagtttactactcgggtacttttgcaattattaagagcagaaaataaatttatctcatctctatgcttttgatttattccgaataatacttagcaccttgcgttactcggtccatccaacgagcccccgggtgctaggaatcggcccaaaggcaaccatccattggcaaaccaaacggaaagcataggaagatagaactccataactcgataggtacttttgtactcagattatgtcgcaagcaatcaagataaatattatgaaaattgtttaaaaaatacgatataacatctatagcccccgactcactagtcaacggcgaaccagttgatgtagtgaggcaaaggaaaagacaaaatatcatataaagaataaaataaatgatgacttagctttgtaatattccctcggtgacagcagaagtagccgatgtgggaataaagcagtccatcaatggtgacaaaaacaccagtcggcgccagtggaaccaagccagtggtgtagatgatgaagcccattaacagcggcggagtccgccaaccgtataggcaaaaacaccagtcagtggcggcagaggcaagccggtcggtgaagtcgtagacgcccaacagcggcggcataataggccagccgtgtaggcggaggcaccagtcggcggcgacggaggcaggccggcggtgaagtcgtagacgcccaacaacggcggcataataggccagccgtgcaggcggaagcaccactcggcggtgacggaggcaggccggtcggtgaagtcgtagacgcccaacaacggtggcataataggccagccgtgtaggcggaggcaccactcggcggtgacggaggcaggccggtcggtgaagtcgtatacgcccaacagcggcggcataaaggccaaccgtgcaggcggaaacaccactcggcagcggcgaaggcaagccggtcggtgaagatgtagacgcccaacaacggcggcataataggccaaccgtgcaggcggaaacaccagtcggc

SEQ ID NO: 20306 - DNA, 2268 bp, Oryza sativa
tacaccacgttgaacaggccctaccaacccacctgaactacagtgcattgggtcattttattatgtgtgaggctaatcacggtgaatctggtcgatcgcccataaccgtgggcacggctattcgaatagttttactctggccagaggtgcacaactgtatccacaagacacaatccacaggcatgtcaccgtgcctgcgcagacacgtcaacatgtcgagtgattgtgacaagaccctacatataactctcccctaaccatccacaccatgctaaggtttcacccccaccccctaccccggaggtgggcagtcccctcgtgcgccgcggtgaatccggcagctggacaaccggacaccccggccgacccaactccatcacgcccaccctcaccaccggtgcctaggaaaaggtcgagctatacttcagatcaagcagttacccactccagcttgtggcaagcgctgtaagtcttccaaggtttcccatgaaccggtccttaattgccatgggtgcgactcgtaaaaccatgcacccacagcccaccactcagtcgcattttagttggataattacgaccatgaaacatggccagatgtcttgagcacacaactcattatgatactaaaaaggtctaatactgcaattatcccatcaactgagctagtggtaattaagcatggctaagcatatagttctagctaggtcacataagtaacatgagctagtcgatttattacccaaggttgacaatggacggttatcaagtaaacatgctacaaaagagcagataggtaaaccctgatcccatgtaattagcaaaacatgcatatttatttgcaaacggtaaagaatttgtaaattaggctcaatatgctcaaggggaatgtgtgacttgccttgcttcttcaaacaatcttctggactcttttcctcatgatcgcgggcttccgaaacgatggattgtacacgctggcatgcaaaacgaggaaaaactctaataaaaccaagcaaacagtacataaaaattaaacaaacatgtagatctcaattttagatgaatttcacaagttgaatggcccaatttggagttcgtatgaattagatatgaattttagaagttttgagccatttaaatgaatttctataattattaccgaattatcgcgcaattattaaatatttttccaaaggaaaagggacatgctgacatcatcatggggaggggcggcgccggcaagcgggccccgcacatcagcggcacaagaggataggcgcacggtggaccaagtccacacgtggccacgggtgcgcgtccaccacgtggacggcccagatcggcccgagccgatcgggcggccgatgggagcggcggccaggggtactggcgcggccgagaccggcctggccggccatggcgcggcggcagcgcgcggccaccggcagcagcagccggcggcacgggacggcgacgagcggcagagaggaaaaaagaggagggaggaggggtcctcaccgagggcggcgacggcgagatggcaccagggaagcggccgacggcggcacgggagtcgacgcgtctccggcggtgggcggcgctcgggaggaggtggacggcggtggtgcatcatgggattagaggagtggtgttagagaggacggggcagtgacatggccggccgaagaggaaaagaaaagaggaagggctcaccggcgcacgggaaaacggatgtccagcgagtttccggcaacgggaagtggtggccgaggttcttcctatccatgcggagccgagggaggcgtcggcatagagcgggatggacgggagtggcggccggaggcggcaaaaggcagtggcggctcggtttcttggtgggatggtgtttcggtggtggttttggggaggggaagcggatgctggggtgcggtggggtgtggcaacgctatgggtggcggtggcacgtccgggagaggcggcgctcgccagcgggaagcggctggaggcagtggaggcggcgatagctcgggttcaccgtggagagggcggctcgggggtggaaggggaggacggagtggatgccggggcgcggcatgacacggaggatcttttggcggcggcggcgcaacgcggcagcgactggagcggcgggaagcggcggctggaggcacggcagcgagcggcggagcgcgggctcgcgcggggagagcgggagagagcgcggggaggtcgggaaggagggggaaatggaagaggggagcacgggggtgc

SEQ ID NO: 20307 - DNA, 981 bp, Oryza sativa
actcttttcccgcctatcctaagaaataaacccgaacatcaaaatgcacgccctttgatcaataggattttttatattccaatatgtcctgtctcgctacaggttttgatgctttatatagtttgtaacttgtacatatgagattacacttatgccctcattgggcctatgtaaagttacaattgtgcccttaacatgttagcaattccaagggcaatttagtacatctcgaaggtttttatagtcttttggtgccagctggatggagtggttgagtggtccccggaaatcttctcgtggcatctttattgctcgaactgtcttctccatgagaacgagcctttttcatggtagagagtcttctccttggcaagtagtcttttccatctcgaccattcgaccaccttttcctgttcacctagtgactgatagtttacctgtcattggcttagacaatactcaaaacagatctggcttagtaataagaaattgcttgaatagtgtttccaactcgcatagcattttaccatttttctgttctaatggcacttttccacccgtacacttacaatagaaactcactcttccttctaaatgtttctggcggataaggagggatggtggtgacccccaactactgcaatatatgcgtgcataaagccattaaaccatcgtccactacaaaactaagggggagagatggagcgaggaggaaaaatggagggaggcactaccgtgcggcggggcgcacagaccaaaggccgacgagccgggaataatctccccggcctctggcctgggaagaagaatgagagggcgcgccctgagtccccttccgcgttcttgctcatgccggctcctacgacacgcgcaacgacgaacggcgacaacgaacagagcacgggggcggcggcaatggcgcggaggcgaatgggagaggaagggaaaggggaggctggggtttataggatggcaatgtcg

SEQ ID NO: 20308 - DNA, 3712 bp, Oryza sativa
ggcgatgaaaacaccaaggcaaaggtaatccatctcgctttagatggcatcacccgttcttggtatttcaatttaccagctaatagcatttactcatgggagcaattgcgcgacatctttgtccctaactttcgaggcacttatgaggagccgaagatgcagcagcatctactcggcattcgccagaggccgggggaatcaataagagaatacatgcgtcgtttctcgcaagcccgatgccaagttcaagatataaccgaagcgtctgtcatcaacgccgcttcggccgggctgctcggaggtgaactcacaaggaaaatcaccaacaaggagccgcagacactcgagcacctgcttcgcatcatcgacgggtacgcaagaggcgaagaggattccaagcgacggcaagcaatctaagccgagtacgataaagcctccatcaccacagcccaagcccaagtacaagcacaggtcgccgaaccggctcctctcaccgttcgccaacctcagctggcaaaccaaggacagccgccaaggccaagtcaagctcccatgacttggaggaaattcagaaatgaccgcacgggcaaggctgtgatggctatcgaagaggtccaagccctccgcaaggagttcgacgctcagcaagcagtcagcaatcagcagcctgttcgcaagaaggtcaggaaggacctctattgcgcattccacgggcgatcctcgcacactaccgagtaatgctgaaacatccggcagcgtggcaacgctcaagacccaaggctgcagcaaggggcagctgtcgaagcacctcgcgaagccgcccaagaacaagcacccccagtcgaacagcgccaggacatccagctcggagtaattcaagtgattacaagggccgatccaccagttcaacagtcgaagcggcagaagaagatgcagctgcgaacggtgcacaacatcaccgcggcaggccaaggggctctgaggtacttgaactagcatatctcttttgggccagaagacgccgaaggggtgctattcccacatcaagaccccttggtgatctcggtcgaagtagctggcttcgaagttcggcgaattttggttgacgggggaagctcgaccgatgtcatctttgctgaagcatatgccaaaatggggttgccaaccctagccctcacctaggcaccagcctcgcttcgtggttttggcggtagagaagttcaagttttgggccaagtacaactggtggtagctttcggcacaagtgaaaacaggcgcgtagagcaaatactgttcgatgtcgtcgacatcccatacaactacaatgccatcttcggccgcgcaatcttgaacaagttcgaagccatctcccaccacaactacctcaagctcaagatgccgggcccaactggcgtgatcgtcgtcaaggggcttcaaccttcgaccgcatcaaagggcgatttggccgcaataaataggtagtgcacaatgtcgaggccgaaccacatgaccatgctaaacgaatgccgaagtccgcccctcatggcaaggtgatcaagatgcaagtcgatgacgccgatcccacgaatttttccagctagggggtgatctagcgaagaggaagccaagaatatcctggaggtgctcaagaagaacattgacatcttcacctggagccccgacgaagtgggaggtgtttcgacgaacttcatcatgcatcatctggcggtcaagccggatgccaagccaagggaacagaagctgcacaaaatgtccaccgatcaccaagaggcagcaaagcccgaagtgtagaagctgctcaaggctggggtgatctaagagatcgaccacccagagtggttggcgaacccatttttggtgaggaagtcaaatggcaagtggcgcatgtgcattgacttcacagacctcaacaaggtgtgcccgaaagatgatttccccctgccgcggatcgaccagcttgtcgactcgacagctgactgcgaactcatgagctttttggatgcgtactccggctatcaccggatccacatgaatccggccgacatcccaagacagccttcatcacgctgttcgacacgttctgccacctcagaatgcctttcagcctgaggaacgctggagcaacattcgccaggttggtgtataaggtcgtttacaaacagttggggcgaaatgtggaggcctatgttgacgatatcatcgtaacaagccgcaaggctttcgaccatgcgtctgacttgtaggagaccttcgacaacttgcgtgcggctggtatgaaacaaaaccctgagaagtgtgttttcggtgttcgcgcgggcaagctgttgggctttcttgtttctgaaaggggtatcgaggcgaaccccgagaaaatcgatgccattcagcaaatgaagcctctgtcgagcgtacgcgaagtacaaaagctcacaggctgaattgcggcgcttagtcgatttctctcgaaggcagccgaaagaggtttgcccttcttcgagacccttcgaggcacgggaaaatttagctggacacccgaatgccaagtagcgttcgactagctaaagcagtatctgcaaagcccacctgccctggtcagtccagcgccgagaagcgaactgctgctttatctagcagcttcgccggtggcggtcagtgcagctctcgttcaagagacggagccaggccagaaaccagtgtatttcatctccgaagcgttacaaggggcgaagacaagatacatcgaaatggagaagattgcctacgccctagtgatggcttcgcgaaagcttaagcactactttcaggcccgcaaagttactgtgccatcgcagtatcctttgggcgaagtgctacggggcaaagaaatcactggccgactcagcaagtgggcggcggaattatcccccttcgacctacattttgtcgcccgcaccgccataaagtcccaagtcctagctgacttcgtggccgaatggacactggcattcgcccctgaacccgagcccgtcgaatagccttgggtaaatgtactccgacggctcatggtcgcacaacggggcaggcgccgcggcagtactcacttcgccagggggtgtgctgattcggtatgccgcaaggctgtagttcgacacgaccaacaacatggcagaatacgaagctgtactattaggcctaagaaaggcgaaagcatttggggttcggcgcttgctcatccgaacggactccaagctggtggcaagtcatgttgacaagtccttcgaggcaaaagaagaaggaatgaagagatatctggaagcagttcggtctatggaaaagtgcttcaccggcataacggtcgaacacttacctagaggccagaatgaggaagcagataccctggcaaaatctgcagtctgtggaggcccgcattcatcaggcatcttttttgaagtcttgtacgcaccaagtgtgcccacagaaagcctggacatcatggcaatcgaccaggcaaagctgggcgaagacccagaagattggcgaaccccattcgtcaagtgtcacgtcctgataaattcatcccgaaattaaaaatcattctctaaaaggaataatagaattaattaaaattcgaaaagaaattggcaaacactaaaatacgtacaagaaaaattcgaatgtggcccggagaatttttgttaaattctccttggtc

SEQ ID NO: 20309 - DNA, 1398 bp, Oryza sativa
gggtgcggctaacgcgtgggacccacggcgccggccggcgcaagccgcgtgcacccggtccaccgtggaccgtgaggctgccgcgtgggccccactcccgtggacccggtccgcgcgcccctcccctcggctgacgcaataaatccgattttaaattaaaatttaaatgaagaaattcgtaaatatccatttaaagagcatataaacttcaaatggcatatcttggccatttgaactcggaattggaccgttcaagtctctaatttttccttaagaagtcaagaacccatttttgtgctttgtttctgcttgttatatggagtttagtagagtaaaagccttttcttttccgttggtcgtgtagacgctgcggcttcggaagatccgctcttcgtggaggttgaagccgacgtttgggaaagcgagcaaggcaagtcacatcatccttgagcatattgaatcccagtttataaaattattttaatttaaattaatgcattatcgctttatttaaattcccgcgttatcactgttttatttagccatgcctatttacctttgttatgaccttattattgttgttattgttattattaccttgttcaccctaggataaataaaaccccaactagtgggtattctattcatggttccactagtatgaatttaggtagatgcttcgctgattaattaggcaacattaggtggttttataactttagactttgggaattctcatatcatctggacagtatggaatggttggcttatgttggaattggacacacacctccccctctattcaaaacccccataatggttttaggctgggctcgaggtgcgtggttgggtttggttagtcgtacctcgggtactataaggattaagctcgggcctctgttgcaaagcactaccgtacttccacatgtctagtgggtaaggcttaatttgtggctcagtctggttataaacaaaagtacacggatggagatggatgaagtcgggggtcgatggacattctccagggcaaatgaaggctacacgagctgcggcccggtagtcgagatgtcatggcacagggccggtgtcctgctgctagggggctcaatcctgcctgcctgtcccgggggttccggccgtaggtggggttgggtcggtactcttgtctatggctaggatgggttggaaactatgtcacgtcttccgtccgtataccgtggtggtatgtggcacgtggttacacgtgaggaagatgtgtcttgtgggtaaagatgtacacctctgatcagagtataatctattcgaatagccgcgccctcggttatgggcaagccgagcaatgtacccaagtcagtgtttcaaattcttaaaatttgcttaacaactaaaatgtggaat

SEQ ID NO: 20310 - DNA, 3673 bp, Oryza sativa
aaaagagtgcatcaccgacaacggcaaacaattcgattctgacaagttcagagagatgtgcgaagggttaaacctggaaatcaggttcgcttcggtcgcgcacccacagtcaaatggggcggccaaacgaacaaatggtaagatccttgaggcgctaaagaaaaggcttgagggggcagcgaagggtaaatggccagacgaaatgctatctgttctctgggcccttcgaacgacccccacaaggccaaccaagtttagcctgttcatgcttctctatggcgatgaagcaatgaccccaactgagctaggggctaattcaccaaggtgatgttctctggaggcgaagatgggcgcgaggtgtcgctcgaactcctagagggggtgagagtcgaagcattggaacacatgcgcaaatacgccacaagcacttcggcaacttacaacaaaaaggttcgaccgacagagctattgcttagccatctcgtcctaaggaagaaggcgaacccggtggcggtcgggaagcttgaattgaagtaggaagggccatacctcatcaaacataggtccaggataggctcctttcgcctagcaacgctggaaggcaaagagttcgaccattcctggaacgctgcttcccttaagcgtttctatgtctagaacgggtggcacccaaatcgccaacttgtaaaaaatgtacatactattgtataggccttccggcatctctcattatgtaagcctttcggcacaaaaatacaaaaaaaaagaggaaaatgaaaaaaggaaaaagaaactggatgtagggctattatccaccttggaggcccgaaccagtataaaagccttgtgtctttcgcacttgtgtgaatgataattcgtggaaaaaccccaaggcaaacgcctgatcagcgaaaacgccgggggggggcgaaacaaatcggccgaagcattgctcaccaagcgttgaaaccgcgatagcttgtttcgggaaataactaaccaacaccgttacactcgatccatgtgaaaacataagcgcttccttcagctcggaataccacagaccgaaaacgaaagacgaaagctgaaaagtcagcatacctatttcgctagtatacgcaaaggggccgacacagttcgacctaacgaaagcacgaaaggtgacaatgcgaaaaacagcgaaaaggaaataaaacacatctttattaacttcgaaaaataatcggaggatgcaatcatacaacatgatacaagtacaaatagcaccggctttacagcctagcttacaaataaattacgtctccacccccaaagcaatccccactccctaaggaacgattcgacgaacatggttcgtcgtcactactaatgtcatacactatcctaaggggggagggggggcgaaacacaaactagactataatgacgctaggcgatcgcttcctgacgatcagtcctttgatggtttcgccaaaagcaaaccatgtcctcccggcgttctatatggacacaatcgtagtcctccagggatcgcctggggtgcgcccgtatccagccggcaaccttcaaaaccttgtagctgttgccatttattatcatctcgcagtaaactggccaaaacggacatcgcaccttcagcaaacccttcaccgccacgaacttctcgttcttatttcaccaattcccaaagggaggccgaacaaatgggcgaaaagagtagacaccctttcgcacgcgaaaacaaggcgaagataacgcaatagttgactatactggagtcatccattcatcatatatcaaaaaggctgtttccggctacaataagaaggggagaaggccatcggccaaatttacatcgttcgccctccacggcaaatgccaaaagaaaactacaaaatctaaagagagggcggtgggcctcacacctctgggtgatcttcggcatcgcctccaccctctctggccgcagcatcttccccttcgccctagtccgccgcctctgcctccgctagttgctcaaggagatgcaccttggcagtggatcggccgtccctctgccagaactgtttacgctaggcacgaagcgcgggcgaaacgtcctgcgcactaacctcctagtccccattcgcaaagttagggaactcagcgacgtgctcacagccgaactgctgcaggaggcccatggtgaaggccgccgacatgcgtgcacagcaatcaccatatgcagtggcgcagtccgagaccgcaccgcgggcctgctgagtccactccgagaagtcaaaggcggaagcatcttcgctagggactccacgcaccctcgcccccatgtcggaaaggcaaggcggagcgtctggcaagcggtcttcacaaactcggttgccttcaccatctcccgcgcgaaccgttgcgcctccctcttggtttttgcctccgcttggctaacctcttggcgaagagcctccatcttcggctcagtgaggttgtagtagtcggtcagagcggcggaatgagtttgctctttttttagctcggccttgaggcgctcgatctccgccttcgcctcactccctttttccagttcagcctggagccgcttgttctcggccttcgtctctttaagggcgtgggcgaggccttccatttccaggctcttgtagcccagttcgtcgtccttggctcgaagacggttcttcaaaccgtcaagacgagcccgcatggttcgctcggtcaaacaatgggctgcgaggatctggttcgaagataagagagagaggacgaatgttaagacaagttgtcgaaaaacaacaagtaaaaaaaacaacacaacatagttaagctacgtacccgaaccaccaagctcttaatggcagagcatccctcgtcgaactcgtttagctccgtgaacaggctcgagctaccagctggggagacgagggcgctcaccccctcgacaaaagggataagttccgcccgagtctcgaaataggcaggggcgaaatggggcgccgcaagggagtaatccgaaacggatgtttcgatcgccgtcttcctccccttcccaaggccgagcggcaaaatgaccggctagcgaactgggatgctcaagaccctagccgcggtcttgacaacctaatcggccgaagccgaggtcccggcaacactccctcccgctccacccgcatcgatcgcggtgccaggagcagtcgaaagccccaagctccggccagtaggcgaagtaggggtttcatcggaggactcgtcatcgctaaaagcgcgaccgacctcgacgagccctatccttttggaggtcttcttgaccggaccccgctttgccaccttggccgacgcgatcgcgaccagtgccttcgccctctccatatcctttcggcgaaggggggagcagttcgactccaccccagtctcaacgtgctcggggcttggagttggagtgtagccaggcatcccggcgcgattgtcggcagcctcttccgcagccttttcggccgcaacttccgtctcccccacatcctccccctccactccgtcgtcgttgtcttcgacgatgtctttgtcatcggcgtcggagtcagtggaggcaagggcccttcgcttccgaggggccgacttcacttccccacgcatccgctttcgcgaaggacctgcggcgtcatcg

SEQ ID NO: 20311 - DNA, 1826 bp, Oryza sativa
gtcataaacccggttcgcccgaccagccgcctgccgtttgagcagctggctgaactcggtgaccgacacatcgccgatcatctttcgggcttcggcgtcggcctgatcaagagtcaacactgcgaaaacaaaaggtgtaaccatatcaagcgtcgaaccggggaaaaagggcgaagcacagatgcacataagaaaagcatggactcaccattcacccccgcaggcggaaccagcttcggcaagccgtcgacctcctcgtcttgatcgaccacaacttgccacgactgggagagggggaaaatgtgaagcatgcagaactcctccaccaagtcgcggcaactaaggcgggaacagatcttgcgcagcagggcgaaccgagcttccatggcaccgtcaacagcgaccttgggcttcctgttcggtgcaatcgccctgcgccgacaccgtagggctttcgccgcttcggacccagcctcgaaggtgatggagtagtagtaccacttcgccatccaatggcgatcccacttcgacatggcggcgttcaccagccagagatcagagcgttcgaggcgaacattgaagttcacactcccgaacgccgtcttcttcgtcctagccagggtgaccaccgtcttcgagttcatggtggcgaagaatacggcaccgaagagctcggcactcggttcgaacctggcggtccagcatgcctagtcgaagatggcgatccgaacgagcgccgatggactcagctgggggagctccacctggaagaggcgaaggatctccggcaaccacacgttgcatggaaatcgaagccccgcctcaaagaagatggcgaataccaccgtccggttgtcaccgggcttcggcaccatggccttccccggggtgaaggcctgctcctccaccaccacgccggagctgaccaacttcgccagctcatcgtcatccacgagcgaagcccctaaaaaggcggtagtgtcatcgtcgatccggccgggatcggggcccgtcgctgaggctgggtttggcttgcgaggagccatggcgaaaagcgtgcgctgtggcgaagagggagaacaggcgaaagatctagcaactcaaagggcgccgtggaagaaaagacggaggagggaaagctcgcggtgaaaatgacgggggtgtgggggtgaaaaaggggaaggggggaatatatagcccacccaggcgacggttcgccttcccacccaatcacgacccaccacgtatcataagggtaggcgaaacggtaaattccacttgaccgagccgcacagtgacgagcccacaaagaaaatcccatcactgtttatttcagcccagtgaaagaacaagaacagctccgccgttcacagaaggcgaaagctgcaaaacattactgcgtgttctttgcaggattccaacgttagtttcggtaggagcatcggtcgaaagggggcgcctcataccataccacacggtttgcacggtctcggccgaagctcctatctcacccttgcccgtgaggggcttgttggcgatatgtcatgagacccttcgaccagacctgccgaaaccatgcaaccagctagggttcaggctcaaggcgttaagcttatcagggcgaagctccatggcgaagacaatgcagcgaagacgataaatgatgaagcctcatggcgaagagcgtgcatcctgggcgaaggtcgaagggcgaagagtatacgccgaaggaggatgacttcgccatatcgaggccagctccgggaaggcccaaggggccatcccagccgcttcggcccgttggccattgggccagcgatcgccaa

SEQ ID NO: 20312 - DNA, 3048 bp, Oryza sativa
  unsure (1)..(3048): unsure at all n locations
ccatgcttagttcaactagtgcacaatggggaaaatcctattaatgtgtagactgttggttctaatggtattgttggattagtgccaccgctttggagttggttaattaaaatgaatcacatggtgggctgtgggtgcatggttttgctggtcgcacccatggcagttaaggaccggttcgcgggatgccctggaagaacttatcgtacttaccacaagccagcgtgggcaacggctgggcttgtagtgtagctttcctctagccgatgcatccaggcaagggtgggcgtgatgaagtggggcgggtcctgcgacggcctctgtcgcttccggattcacctaggcacgagaggggactacccgctgccttgcgaggagtgggggtgaaacctgaggtgtggtgtgcttggttagagggggttatgcgaagggtcctgtcacggcctctttccggtatgtcgtggtggcatgtcggcgcacggaaacgtgtcgtggggctgtgtcttgtgggtacagttgtacacctctgatcagagtaaaactattcgaatagccgtgcccgcggttatgggcggtcaaccagattcaccgtgattagtctcaccctagtttagtctaatgaaattggatagtataggtggatggttgggcctgtcgcaacgtggtatagcattggacactggatgaataatattgattaattatcacgactgttttcttctttaaacttctgtttataaatgctcgctttatgcaaatgaaccactctagctctcctttgataaatccctgcatcatacccctattccggtatgacttgctgagtaaagtgggtagtactcagtcttgctctattttccccaaccccagagtacgagtatgtgtcagatggtggtttctccgaggagtaggcttcgtccgtgccgtcgaggatgcctgtggagtggtgttcccgctgcagttcaagtcaaggcttagctccagttatctttcgtttttctgctgcatttatgtaagacttttatgatgtttgtaagacgtggatctgaatgtcaacattgtcgtttgtgtaccccggccggtcctggacggggattttaatgcacattctgcttggaattctactcaggaatttctgggcgtgacacaaccacactccacgacgaatcaggtaacatatttaaggtaaatggtcaacgcctaaagattttccttgagccaaaggaaactttagatgaagaagtggatgttattgaattaatcgattatgaaccatgatgattattgtcggtccttaaatcataatatttgaccgtcaatacctacatatagtgaattaaaacatggtatccaacttagtggtagggattattactaatcatttccactagtgttggtgaaatatgtgtatgcaggtattttgagaagaaaacacatccgtcatgtgacaaaatgcaccttcgcgtattcaggatgcgtttacacggattagaggcccaataagtcaataaaaatcatttagaattgggtcaaaacatagcccaggttatcgggggcccactaagcaacctcccagcagaaggagaggccgggaggacactttttgggttcggccgaaccaaccagttcaaccgaacctgttctgtggccgctcatcgctatcttccacgtgtacactcctgatcacgtcccaatggcagttccagggcattttggacatttcgcataggctgtaaccgtcatacctgcctataaaaggaggagctcactctcattctaagacacacaactttgagctgaattacaagaggctctattgtatctattgtacactagaataaggtagagagtgaggggaagctctggaggagtgccctgaagtttggcgcttatccgacttctacctcgacgagtgtagctgtcggtacactctcctccaggttcggagtacttcttctattaagtaagcattcgtgttcctttcttttgttatttaattatttagtctgagtaagttatatttccatctttgcgagttcattgtttagtattcatactaagtgctctattactaggactccggatagagaaggaagttcccgcgcaagtattagagtagtaattaataacttagacatggtgtctaggttagagattacctttgtttgttgtgtatcccacggatttgtcagaggtaagcggcaggtggtgacagccctgaattccgtcccagtaatcctccacgttcggatatatcatagagctatagccggaaccacgctggcagaccagcaggggtcggtgcccgaagcaacagataggaatttacctttgcttaccgtgcataattaaaacacatagaaagtcctctctagcctagcctacctatcatcatttgttgtccttggatagccttagccttaggtagattacacacattccctgagttcgatatcctttaggggttacccgaaggtgaagtgctatagcggtattccgggcgcttgcggatttatctgtggtcgtaagaaataccaacaagcatttctggcgccgttgccggggaacggttgctaatttatccgagtctatgtcatcctcgtatctttatttttatttcttcttcttttattcctttccttgatggagcaacccacaattcaaaacctttatgctcctcgggctgatctttgtgagccatcctgttcttcaaaaccaatcctttccgatggctacgaaatcggtcctagctttatagccatgattcgagagcaaaccttctctggtagtatcagtgaaaacccatacatccatcatcgggactttgagctagtgtgttcaggcctatccatcgtaggcatgacacatgaactgttaagtggaaattgttcctttttctcttagagataaagcgaagcaatggtacacnttctgttctgtcccaagaaattcccacggtgaatgggaggagcttaagtgcaaattctaccttgctttctttccattaacctgtctaattaatcttcgattagacatcctgatctcttt

SEQ ID NO: 20313 - DNA, 4167 bp, Oryza sativa
tttaggatagtatgcactttcaggtattcttggttgctaaccattttaggttgaaattaagaacgagggtcatgcgatgcctaagaacacggtagctacatcaactgtacactttggtgatccttggtattggaacacactctataggagaatctgacatcacacacttggtttttgttgtcttgcgacacaaaagtccaagtgggggggagggggggaaaggtcgatgagcttttcatgacgagttccatcaaccaaggccatcttggtttgaagatggtgttagtcctagcttgctagaaaaaaaggaagaaaataaataataaaaaaaagaagaggagaaaagagagaccgaagaaaagaagaaaaaatgggaggagaagaaaagagcaagagagctggcgagctacatttggatcaaagaccgcattatgtgcgtgtcggctatacacctcactagtagcaatcatgctgcctggctacacctagtccctctctcaagctcatgtgccgccttggctcagcctatatccactcctagctgtgcacaacctttcgctcccgcagcacctacgcgcatacaagcaagaggagatgccctcttctttaataggtgtttgctgctccatttcagttggcacttgcacatttgccaaaaagagatgtatcctacgtctctacagtattgtgccaacggatcacgccttcaagacacaaggttcttgcacccgaggtgtgtgcatgaccaaattgcttgcctgagttggcatggtcaaaataccttcctccggtacaatctgcatggagatggaggagaaatcgccaatcatatgtgaccatgccactgcctagagatttcaaaatatacatcatgctggaggtaagtacactcaggtatgtgaaagataaaataaggttcaccattccttttactcatacttatcttcatttgaatgagacttgatcatacatggttatgtttcttgtgtctatttgcatatgctctgttttagatgttcgtgcaagacatctataggctttttaaattaagcatggtgcttaggttaaaatagtctgctttaatcaaattagacatggagtttagtttgactaatgaatttcagagttaatatgttcatagacattggatatatatcttctgtggactaacccctgcaagaaagttttcaaattgacgagtgagtcctcaagttcaattcacaatggaggtagatcagggtcggaaacaaatcaattgctaacatacaaaggagacacatatcacctatcaaggtgcacggtgcgtatattactaattactcctttagcatgttcatgaaaatttacctccgccctgtatgagttgtgcttaaacgaaaatttggtgaataataaaaaaaaattgaaaaaaatatgtttcagaataaaaggattgtctctcgaaaaataaaataaaacgatggcaaatttgtgggatccacgcttcttatgttttgaatccgatttctttttagcatggatgtgaacaattaatcttgaggctacaataaaatcatttcaaatcttcacagtgcttcgagtatttgttgtccactaaccttttgcaggaaataaaaagacgatcaaggagcagtgtacagtaacttcaacacttatatcacgctccttattgttggtattccttacgaccacagataaatccgcaagcgcacagaataccgctgtagcacttcaccttcgggtgaccccaaaaggatatcgaacgcagggaacgtatgtaatctacctaaggctaagactatccaaggccaacaactgatgataggtaggctaggctagagaggactttctatatttcttaattatctaagctaagcaaaggtaatttcctatctattgcttcgggcacaaacccctgctggtctgcaagcgtggttccgattatagctctatgatgtatccgaacgtggaggattactgggacggaatttagggctgtcaccacctgtcgcctacctctgacaaatacgtgggatacacaacaaacaaaggtaatctctaacctagacaccacgtctaagttactaattactactctaatactcgtacaggaacttccttctttatccagagtcctagtactagagcacttagcatgaatactaaacaatgaacccgcaaagatggaaatatatcttactcagactaaataattaaataacataagaaaagaacacgaatgcttactttatagaagaagttctccgaacccggagcagagtgtaccgacagctccggtactcctccagaattcctcttaggaagctacactcgtcgagggagaagtcggatgagcgccaaacttccgggcactcctccagagcttcccctcactctctactttattcgaatgtacaaaagatacaatagagcctcttataattccgttctaagttgtgtgtgttggaatgagatgaagacctccttatataggctccaaatgatggttaggggcatgggaaatgaccaaaacaccctgcaaccaccataggggaggaatctaagccatccacgtggaagtagacggtgaacggccgcagaacgggttcggccgaacccaaaaagtgtcctcccggcctctcttttggccgataggttgcttaatgggcccccaataacctgcactatgttttggccaaattctaaatggtttttattgacttatggggcctccaattcatgtaaacatgtcctgaatgtagagaggtgcattttgtcgcatgacggatgtgttttccctcaaattacctgcatacacatatttcaccaacactagtggaaatgattagtaataatacctaccactaagttggataccatgttttatttcactatatgcaagcattgacggtcagatattatgatttaaggaccgtctacaatacccccacacttaacctttgctcgtcccgagtgaaggctatggactctacaatagagttatgacttccttactaataatcatgcaaacaaattattcaaagctatacctgtacttgtggatctttgtagtgtctaccatgcaatcctaagcaattaagaaatggaacaatcttgactcaagtcaccctaacttttcgtgaagaacaacttggggtttttcatgtaacacaaaattatagctttgctttgctcctccattgattctatcgatcactcaaggtgtatgattcctcacaaaggcatatgattgtgccttttcttttcctaccatctagtaaggcttatgtgaagctcagggtatggaaaagagtagagcattacttgcatcacatatattgcaaagtaaaataatggatccacggaaatacaagatatactttatggatcaagaatgtgcacgtgtatgtgtatggtgaatttgtgggtggaaaacggaaaataaaagtaactccttttgtatacctcctcctccatttattttctcttttgaaatttaggagagtacatggctatctttttttttctttttctttcttttttttttctcatcatcttgctccatacttgtatgagcacttcttttttcttttttcatagccatgcctcttatcttttttttaaagaactttggaggaagaggcataaatgatatggagtatttattttgtggaagatggatgaaatcgatgacaaatgaaagatgctaacttctagtgtagaagtcaagcattggtgggtgtatgtggaatttgtgtgatcttgaccatgaaagtatgaaaagtatttcactagggtcacaaaatttgacaacgctcaatgtaatgacaagcagcgtatgtagcaagctaatcatggatgatcaacctatggctctagtgggaataaaaaatatcaatgaggagtttagcatcgttatattttttttatataaaattcccaagtgtgcaacatgtagagctggatttctatcatcagactatatcttattcatcaattacctagatagcatggggtccctattggatatatcaccacaagcaacaggtaatgagcaaagaaaaataggcatgcatgtcattttcagggagaccatgaactctagttgtaccatccctagcttgagttcacgtggaagcaaacagtgaacggccgcagaatgggttc

SEQ ID NO: 20314 - DNA, 42163 bp, Oryza sativa
tgacttatggggtctccaatttatgtaaacatgtcctaaatgtgcagaggtgcattttgtcgcatgacgaatgtgttttctcctcaaattacctgcatacacatatttcaccaacactagtggaaatgattagtaataatacctaccactaagttggataccatgttttatttcattatatgcaagtattgacggtcagatattatgatttaaggaccgtcaacacttatccatgagaaaagagatgcacatggaaccaagtagaacaaatgcaaaacttgttgcatccttgcattcggttcgaatcctggtaagacctatctggtaagaatcttagacactatgtgcatcctcatctcatgtctccatcctgtcaggatacccaccatatccattgttgccataaaaaataagaaaaaaaagaaaaataaaataaaataaaataaagttggctctttggtcttccaaccaagtgagtcctttttgcttcattcgtgtctttgtttttctttttgtgtccaataaagagttccaggtacaaagacaagtgtgggggtgatcttgcacatcaacgccataaccaaagcaagatcactccagaagtgacgagccatgacgaaccacacagggaaattgatgcggccagacccaatgaatcgtcctctgttttatatagagcgtaggtttgcacaatttttactttggacatccattctatcttgagtttaatttgattaccaattctaaaatatcgaagataattgaactcaagctagggatggtacaattagaaatcatgatctccctgaaaaataacatgcatgcctattattcttagctcattacttgttgcttgtggtgatatttttaatagggatcccatgctatctaggtaattggtgaatgagatatagtctgatgatagaaatcctgctcttcatgttgcacacttgggaattttataaaaaaaaagaaaaaaaaataacgatgctaaactcctcattgatatttttattcccactagagccataggttgatcattcatgattagcttgctacatacgctgcttgtcattacattgagcgttgtcaagttttgtgaccctagtgaaatgcttttcatactctcatggtcaagatcacatacacttcacatacacgcacatatgcttgacttctacactggaagttagcatttctcatttaccattcatttcatccatagtccacaaaataaatacttcatgtcgtttatgcctcttcctccaaagctctttcaaaaaaaaagagagagagaggcatggctgtgcaaaaagaaagaaaaaaaagtgcacatacaaccatggagcatggtgatgaaaaaaaaaaggaaaaaaagaaaaaagcaaagagaaaaaaatagccatgcactctcccaattttgaaaagagagaatagatggaggaggaggtatacaaaaggagttatttttatttttattttccgttttccacccacaaattaaccatacacatacacatacacattcttgaccagaaagtatgacttgtatttctgtggatccattatttgactttgaaatatatgtgatgcaagtaatgttctactcttttccataccctgagctccacataagccttattagatggtaggaaaagaaaaggcacaatcatatgcctttgtgaggaatcatacactttgagtgatcgagagaatcaatggaggagtaaagcaaagttataattttgtgttatatgaaaaaccccatgttgttcttcatgaaaagttagggtgacttagtgaagattgttccatttctcaattgctcaggattgcatggtagacactacaaacatccacaaatacaagtatgactttgaataatttgtttgcgtgactattagtaaggaagtaaggaagtcataattctgttgtagagtccatagccttcactcgggacgagcaaaggttaagtgtggtggtgttgttgacggtccttaaatcataatatttgaccgtcaatacctgcatataatgaattaaaacatggtttccaacttagtggtagggattattactaatcatttccactagtgttggtgaaatatgtgtatgcagttattttgagaagaaaacacatcgtcatgtgacaaaatgcacctccacgtattcaggacgcgtttacacggattagacgtgcaataagtcaataaaaaccatttagaattaggccaaaacatagcccaggttattgggggcccactaagcaacctcccggccgaaggagaggtcgggaggacactttttgggttcggctgaaccaaccagttcggccgaacctgttctgtggccgttcatcgctatcttccatgtgtacgctcctgatcacgtcccaatggcggttccggggcattttggacatttcgcataggctgtaaccgtcatacctgcctataaaaggaggagctcactctcattccaagacacacaactttgagctgaattacaagaggctctattgtatcttttgtacactagaataaggtagagagtgaggggaagctctggaggagtgcctggaagtttggcgctcatccgacttctacctcgacgagtatagcttcataggaggaattcgagaggagtaccggagctgtcggtatactctgctccaggtacggagaacttcttctattaagtaagcactcgtgttcctttcttttgttatttaattatttagtctgagtaagttatatttccatatttgcgggttcattgtttagtattcatacaaagtgctctattactaggactccggatagagaaggaagttcccgcgcaagtattagagtagtaattaataacttagacatggtgtctaggttagagattacctttgtttgttgtgtatcccacggatttgtcagaggtaagcggcaggtggtgacagccctgaattccgtcccagtaatcctccacgttcggatatatcatagagctatagccggaaccacgctagcagactagcagggatcggtgcccgaagcaacagataggaatttacctttgcttagcgtgcataattaaaacatatagaaagtcctctctagcctagcctacctatcatcagttgttgtccttggatagccttagccttaggtagattacacatgttccctgagttcgatatcctttaggggtcacccgaaggtgaagtgctacagcggtattccgtgcgcttgcggatttatctgtggtcgtaagaaataccaacaatgatctcatctattgcatgcttaaaaccctgtatagttgtcattattgtgcttagaataggttttagtgggcctaggaagaaaattgggggcctgccggactcaccagggaaccagggcagtgcccgatcggccccgaatttgaatgctagtctcccccgctcgtccctagtctgtttagatgcgcgtgtggaggtagaacgttcggatcacaccagaacacttcttcttcctcctttcctccacatttgcacactcccctctccaattcaacccaattcctcgaatttccactcatacccactaatggctggcaaatccctaatcccattcattggctcctcctccaattccacctacaattttgatggagagccgacactggcaaatcaattgatcccggtggagcattacacgatggaaggggtgaacacactatgggcgcagcccctcgcaacagtgccgggttcccctgtgaatctggagcccgtcggcgagctccctggttcgaccgaaccaggggttcggcagaacccttctcggccccaattggccccccgttcggcagtgcgatccctctcccctcgccatgttacaagaataaaaatccagggggattcgcctgcgtgacggccgacaacgggagagctcggtctcttgaaggcacgacgcctttttcaagatgatgggaaggccgcgccgtctcccgccgagtgctatgtgggcaccctgttcaccaaggcaagggatgaggtgctccacaagtacaccacacccaccgctactccatccactccgaaggaggagcgattccgtattcagggagtgcgaactaccggcggtgggtatggtaagggtttactccggcttttgatggcatcggagaaggagggggcagcggagtcccgtagccctccacctatgaaggtgaagcgtcatttgacgccccctccaatcgtaagggttcccagccaattccaagaggatgaggtgaaatcgccggagccctcgatccacaagctcgccgctcaagtgaagaaactccgcaaggagaacatagagcttaggaatcgcaatgcggagctaggggtagaactttctgaaattagaaatgatttcgatacccttagttgcggtttgtgcgctaagatcaagcgtgcattcatagaggtgggaaaggaaaataagtattatgctaattggatgtttcctttcccatgaataaagtagtagtaggtgcttggtttttatctttccaatcatgtaagcacttgctataaataatatggctcattggtgttaaccccaatgtttcccaaagtttttttttgttttatgttcaataaagttcaggttttgaataagtgtgggggagatatcccagcttctggcgtgcatatactctgaaaattgctgaatatttgaacacctgtgttgacggtcgttatcgatcagtttcgaccgtcaatattaccaaaataaaggagaactagtgatgcttgcaatgcgtagatatgttagaataataatatttcactagtattaggtttactaacctttcgcagagaatgacaataaagtgaaggagaatcgacatcaacacagacgataaatcaatcggatggtgtcgagaaccagacttatgtatgaatgggccaagaactcagaattgacatgatgaattgggccaaaattcacaagttctacgaacaggagcaacagaggaggccgccagctcaaatttggctgtattgggccggccccaggttcggccgaacctggtggttcggccgaacatcccttgcctccgttggatccaggttttggctggacggttgagatgaagccccaatgactgttggagggtattaccgaccattccaaccgtcacaaccatcatagttcagctataaaaggagttcactcgcttcacttcaacacacaccttaagcaagagctctctcattcctctcaagtttagtttggtagtatctagctggtggaatagaattagaataggaatcaagagtccagaagccttcgaaagagttcgggtatggctctagtagctttcctttcctcttttgtaagctttgtacttttattagtatactcttatatatacatttatggtattgaaatactttccgagtatatgagtacctactttacattatgttcttgttatactgaatatacggctagcttatctgggagatgctttggtgcgggtatagtgtttgcttatgcaattactctatgtcatgacgatgatattagagtagtatctggtagtttagacgtggtgtctagattacgggatatcattatttggggttatatattgcggatgagaggtgggccgctgatggtgacagctcagtacggatattcctccgcgcctatatataatcctaagttaatttcctggggagggtattcctctgtatttagccccggttggatggtcatgacgagctgtcgtatggaactcggcagtcaggggtggcttctcgaagtaccaggagggcatcggatagagggtattagctagtatatcagttaactagaatgtatgtatactatgtatattagaagtatagggatagatttcttttctcttttctttccacctagcttagattatttattatgaggatgagtagaaatgcttgtgtgtcactctacccttggattatcttaaccccttcttagaatatgattatcacaagtaatatataaattattagttgagttctctctgcattatcttcccatgagataaaataaatacgatacccttggaatactctcgggtgaaatgctaaaatggtatatccgtacgcttgcggatgaactctgtaaccataatataccaaaagtatttctgcaccattgctgagaattatatttctagtaatgttgttaagaaataccaacaacctggaaggcactgaactctgcagaaaattgcagagggatcaggcaccagagtggttcggccaaaccaccaggttcagccgaaccaaagctggccccaatccctctcaattttcacaggtaagcaggtgagcacgttctttatctatatatctccaccatggtatagtactagagctgaaaattcagaaaacaactggttcgagcataagtgtaagataaaatttccaactaatgaaattcttcatgtgaccgatcttgtatattcattattctcagctgaacttctgcttgtgaacaaccatccatgattagggaaccttatacatctaaatgattgctttatgagagatgattaagatgaaaggaatccttgcaactttgttatgactcttgggaatttattttcaaaaataaaattgttttaaaagctccatcctccaattgactttatcttatacctaccaaggccatatgtaagtatatcattgatcaaccttatcatgcatatgactgcttgacattatattgaactttgtcaaatttgtgtgacttgtgttagatatctttcatactctcatgatcaaggggtcattttcatttccactttccatttccacatataaaattaagctaagcttctacactggaagttggctctccacaaaaatacccattcaaataaactcttacattgaactatgctttcttctcctggaaaagttcttggcaaaaagaaaatgagaaaaggagggaaaggcatggctatgaaaaaaaaagagaaaagaaagaagaaggaaataaaatttgctctcaagacattgagcaaagtgcaaagaaaatatagccatgccccttccataatcatgccaagaaaacaaaacggagagaaagtataggaaaaaggagaatcatttctttattccatcattcgacaacatattttactttttcaccatgaataaagacccttgatctaggagtataattgatgatattcttgagtccatatttttggcttggcaatatatatgatgcaggtatgtcccgatttatccctaccaagctccatacgttagccatcataatagggataaattctggcacattttgccttggtgaggatccaaaaagaaaatatacatctttgagagacaagagagaaagtcaatatgaggaaaagagctagtttgcgaaatttcataaaaatcccatgagtctggcagagaagcaagaaggactggaatcaagatcgttccatttatcaattactcaagatggtaagatagccacttataaagttcacaggtgcaggtatgggtgtgaatgatttatatgcttgattcatctcttgaaaaaattcattctacactaacctttactcagggacgagcaaagagctaagtgtggggggttttgttggcggctgttaaatgccgattctataccgccaacatctgcataaagtttagataataaaacattcaacatagtataggtgcttaatctcacatgttccacaagtgttggtgtatagttgtatgcagatgataaaccctgaagttgggaggaaatttagactaaagtgaggaaaattatgtatccatacaaggaggggttgcgaacttcatcgaaacaccagtggatcaacccaaaaatccgcgaaatggatagaagaaggtacagggagttcaccgaccgaaggccaggccaggagggcccagcccaggttcggccgaaccaggggatcatcgttgatcctggggtttagcgtggacgctcctgatgttctcccaatgacggtttgggggcagttcggacatttccccttctcataaccgtcataactgccctataaaaggacctcacttccaagctcgagctgaattataagaggctctattgtactatattgtatactagaataggaagagagtagagtagaaggagtcggaagaattccggagttgtcggtaatcttctcctatttcttttattctgtttattactctgaattcaatatattcttcttgagtaatttagatttatcttgtgagaattatctcttggttagttcctaaatagcatacgggattattgttcactataatcaactaaaatatagtgattgctttggtgagttataaacactaaagtagatattaattgcttagacatggtgtttaggtaattattatccagtaattgttgcgtatcccacattacgtttgaggtgggtgtagaggtggtgacagccctcgagatcacttaagtcctccctgtccgggtacatagtagagcgatatctgggaacagcgggttgccagtgcctgaagtattgcgttaggattaaaattaagctttccctagacactgtttctcactagtgaatcatctctatcctagcctatcaattgcttggtgtccttggatgaaccggaggaagatctgaccacacacgttcccttggattcgatacccttggaatactctgaggggaagtgctacatcggtatatccgtgcgcttgcggattatctgtaaccgtttcaaataccaacaccatgttcaaattgtgaaaaaacaggtataatatctatagctatgtattatacgaaaattgtagttgtaatttatttattattaccttggaagcatcttgtttctttccttaaattaaaaggaaaaaaaatatcccctctagccatctgtcctgaagtgtgaacaacatactaggttgggataacaattccttgaaggtcttgcattatttatactgtgggttatcagtaatgggccacaagcaaaccccatcaaagatcaaccttcatcgatgatgggcttcacagttatttttgtcaggctgttatacctggcccgtcaccgatgaccatgaccctcatcggtgatggattttcgttgtggcctattatcaattatcttggacagaccgcaacaaaaccccatcactgatgagggacgggcctggccccgaggactcacatactgcctctctcggtgcctatgtgatagagttctttgaggtctgataaagatgaatatctctataacaggccgcacgactccatcacagattggtcgatttggatgtccggtgcagttttgtactagtaatatcaacattataattactctagaggtgtggttagtccattgttccatttcttattatacctttctgttccagtttaacctgactgcaatctattttgttttaattgctgctccttcatgatatcaaagctcggttaaccgttacatatgaaagaaatggatgaattatttaatgtggtgcaagaattttgtgatattgaaggtgttccagttccaaacatgtacgaagaaatactggtaagtaggggtgaaaacggtacggaaatttccgagaattccggcaaccgtttccggtttgcaccgaccgtttcaatcggtatcggtaattgtcggtatcggaaatggaaacggtaatctctttcggaaatggtagcggaaatgatatggggttttttccgaccgttttgtcggtaactgttttttatcggtaatttccgtcaaatttccgacaaaattccgaagaaggaagtcggctaggcctggctagcaggaggaggagcccattaggcattaaggagcagcccattccgaataaagaagccaactaggcctgaccgcatcgtcgtcttcatcggcgctggggcaccgccgcgccatgttgggcgccgccaccaggtcgccgacgccggccgcaacctccttcgccccgacggcctccgtcgcagccggccaccttccctcccccatgctccaccgccggcttccgtgccaccgagccaagcgccgagcgccgccgcaccgccccagcctcctcctccccaccgatgccgcccctttctcctctctccttcccccaccgccgccctgcgccaggccgccatctccggcgcctctctcctctcgggcgcgcgtgaaggagccaaaggcagagaagagaacgagagagaaaacagagaagaaatcgagagagcaggaaaaggaaccgagagaagggaaggataagagagagagaaaaaataaaagaaagagaggaaaagaaagactgtgggatccactggcgggccccaccatcttgactcctctctgtgatcgacctggaaataccaaaaagtctagtttagcatgaaacttaattacaacagtagttatacagtgtcaacataaaagttcttatgcaatgtgccactgtaggacgatgatatagctatgtcaattgatgatgaaataatgaatgatgtttgacaaggagctgatcagctgaagccatgccagcttgtgagcttggtgttctcgaagacttcaaatctatatcctaaaaaaagtcggacaatattagttatgctgtaatcctatcatgtaagccacattgtatgctttagccacattgatgttgaagtatcattgaactttatttatattatttatcaatcttattgtcaacttattaatcatcatataacggtgttgtgtggcagcgtaatgatgcaagggtgaaattataaggtcatcttcatacatagttaaatgcgggatgataccacagttcgctgtttccgacatgaattttcgacttccgtccgatatcggtatattcccgttccgacggttccgtttccgagataccgatataaccgatatcgttaccgtttccgagtataccgttccgattccattttcgagaaaataaaatgaaaatggaaatggtagagggtttttccgaccgtttccgaccgttttcatccctactggtaaggggtcattcgaggccgttaactagagtgacacattgaaatgccacaattcatctaaaatcacaaagaaccgaataactactttatttgcaatgttcgcattgttttattagtgctctcttgacatcgtggagtaattgcgggtttggtaaaactaaaattttgctgaaagaatatgtagcgagtattaatttaattagttgatttcccacgttttgcttgtgggattactaattagttttgaatatgttttttttttgttaacaatcgagttaggagaaaaaggatattagttattaacaactggtttgtcaaaccatatctcaagaaaaataaatttaatagatcatgtagcagattgtagatgaaatattaaattgttgcgtaagatttgcatcgtaagaagcaagaggtaggaaaattgatgaaaagtttgtgtttaattattagtactaatcacgaaacaaaataaatgatatacctcactttgatgggagatatatggatggaaatatgttaagtattataaaaataatagatatctatgttaaaatattgtggaaatgatacgagggggtgttgattggatttgcttgcatattgattcgtagaatttgatacaatatagatgatgtgcatgcttgcattagctttgatatgtaattattactaatagatgatgaggtggtatgtttgtatgttaagttttaggcttagtgggttgtaactatataaaatgtacagattagaggccgaaagtcagacaacgacaccttgctcatgtagcgcctattttatgataatgatttcattttaaatgcattgtttcacaaattatcatttctatcagacaaaataaacaacagaaatagacattaatatccattccatttatcatttctcgaaaagaaaacaaagattacaacgacacgatgcagttgctgtcttaagcctagttaaaacacccccttgtctccacctagccgatccaccgagtcctaagagagcagtgaagactgtctgctcggcgccatagaacacagtagacgaggacgcgttgcggcacgagaacagaccggcgagcgaccgaccatggcgtttgctgctctggcctcgctcgctatggttgccagctgctctgccacgggtagagctgctgcggcagttgacgtaatgcagggaatcacttctgccaagcgtgctgttcctccttccttgacccttctgtcttgctgctccgtccataatgcagggaatcacttccacaaactgggagggcctgagcccacctaggatcaatctgtattattactttctgttttgacgccatacactgatccttcaattattttcgggtcttcttatgtgtaagcaaagaactcattagcagattcactacgactgtaaaaagtgaaaaatgcgtgttacttcagaaagcatgaaaaaaaatgtaagctgcaatgtgttggtaatgttcgtgggtacaaaatatgcagacatcgatagtcctgcccgttagtatatttcaaactttttcagccatagtaagtagagctaatagcatgcggcccaacaagtgagatggacaagttcctattgaagtatttcgaaatgtggttgtttaaatctttgattatggaaaaaaagttgaagttccccaacactgcaatgtgctcatctcaggttaaaggtacagtaagaaataaaggattgatccacagtcagcatttgatttagcctatttgacatctcgaatcagctcagtagaagaaaaaagaaaaggcatgctgctgattatgtccagacatttaatatttttttttcactcacaataggtggagaaaggctaagtatgtgacacagccgaaataacccccccaaaacctctatgtttctgagggcaagaaatagttaagaaaaaaaaaagaagaaacagagttcatacatgcaagcattacaagaaaaggagtaccaatacaagtaagaacggctagattttggaggaaatacttataacacaagcatgcctttaaaaaatcgcagaaaaaagtgcacgcaagaggaagaaagaaagacccgttcgaatacctttggccttgatcaacgagatgttctatctctgaagatgttgacacaattattggatctttcacccacctactgctggtgacgaaaaggtttcaaatcttcaactgaaggaaatgtaagacaaacaacggtgtagtacagttttgctcacattttgtagtacaatggccaggcaaaactcaatcaccaagcccttggttttatagaacggaaaaggtaagcagatcccattggtgcagtagatagggtccatgcatgcactggttgaaggaagcatgggcctctggctgctgcaaacgtagtgaatgaagttgcactaaactaccagtctgaaccattctgaaacttgtgtgcctctttgattttccaggaacataggaatggcaaatgtcacagagcaattaactgcagcgtgcaggctacagttactgcgacatttcggcaatgcatttcttgttcagttcctactgctcacataccacttcagttttgtttcacaaactggcaagtggctaccaattacaaaatcgatctctctttctattaggtcctaaaattctctagagacccaactatagataaaccaacccagctaatgaaccatagatagtaccatgtaagttgaaactacccagggtgaaaggaaccgaactagccagtccaattgcacaaatcaacacggaactgatctaacctagcacaccatgttggtgtaacggtgttacaaccaatgtaagagatcctaaagtcaaatatgttcattatcacaatagagcatgaaatcagggtagtgatctcaggcttgctgcccgtgcggaccataatgaatctggtgtagttgtgcagaacgatatgacttatgctaggaggcatcattatgtggcaactcgcaagcagccatctgattctttgacttcaccttcccaagcatctcagctactgtcctgcagcgacattgctttccaggacggatgacatccccatagacagccatttcaatcacatcaagttctttatctgacaaagaaaaaacactatcagattaaatttgcatgtcatacgaaactaccatggtaggtttttcatgctaaatagagttggcacaacagttacgttcgattagagattcagttggatctcctgattcaggaatgagaagacaacttaagatataaaaataaataagagcagtccatggccctatttgggggagcttaagattctaagaatctgctggttagtagctagcttccgagaatctggagaagctgggttttccagcttctggattctagttccggattctacaattacagattctcagaatctgggtaacaatctggactgtttgggggctgcagcagctataagctaccccaaataggtcccatgtatgttatttgttgaaactttttatcctctggccaaatcagcatagtttgccaaaacaaacgcatgaaatagatattatctgaaattacttgtttatttttacaaagtcatgattgttttgaagttttatggctagttcaaaaagtacaattttatagcaccttgcttatagacaaatgcatcatgatcctaattattcacagtaacaaagcaatttttcgaagcaattgttaataatggaatgtacaatgaacaattctagagaaaaattgtaatctagctccatagaattgttctcagatggctcaaaggtaacttgttttatattgataacagtacggtgcaacatccccacctctgcaaatttaatttcactatttcaaagaacatcgaaacatacacagccattaatacgtggataacgcataacagaacatctattaccatccatctataccatttataattgctaagggagcagcataccaatggacatataagcatgtacagcagaccaatgacattatgaaaaatcatgcattgcatattgcaagctgtttattctgttaaacataagaaatcagagggactactacacatacattataaagatccatgggagcaaatgaatcgcaatatcgacatactcaccagtgaacttgatatcacaagaaaatccctgcatttctgcctgctctatccatgctttatcagattttgaccgattcacccttgtctgaagaatctggcaattgtcaacagtagactcccctcctaaagcatgacaaaaaattcaattccagttccagaacaatcaacatgagaaaatctgagtataatggaaaacaaattgtacaaataacagagaaatagacaaaggattggaagatgactttgttacaaaccaagtgtccaacctacaaagtaaagtagggccagcactgatcccaaatttagcacaatttggaagaataggcatcaattttcagacctggtaattataaactaagggatgctaacagcagaacagtaaaacatatcagtataaagcagggaatcttaatagcatcaaagacaatattctaagcattgaatcgtaaagggcctttctcatccgcaaaagatagtttccgggatgagggtcttgcccatttttcagttggacccttccgcaacttatgtgaggtccaacaatctcgccttgtttgttctccttaaccatacaactacagactctcggatcaaagaccccatatccacccaccatttatggcgttcacacagtaatgttctcatgccaatttgttgaaacaaaatgacttttcatcccaaaaactagcctatgaagtgggactgttccaacatcaatatcagattttatttcggtaaagccaataaatagtacggagtatgtgtgcggttaccaaaggagtgaagtagaactgttaaaacttgcagttttgtataggcattagtttgaaaaccacaggtgcgctccatatatggtattatgttaacaattcatagttaaattagacaagcaaaggctatataagtaccaagtacgctgatttaaaaccaagttgtgtcagcctttataacaaataactgatctgaaccaagtctgaggagaaggggattggggagattggggagattgggaagatacgcaaaacgaggtaagccattagcacatgattaattgagtattaactattttaaacttcaaaaatggattaatatgattttttaaagcaactttcctatagaaattttttgtaaaaaacacaccgtttaacaatttgggaagcatgcgcgcggaaaacgagatgcttttctctctcaatcccccagattgcccaggaacgaacgatgcctagtttaatattcaataatactgatatgaatactcacaagtgatagaaatccaaagaaaaatacatgtttcttgcttaacatggattgctaaatgttacatgatattgttgcacagccatctttattgattggagaaggcatctccccctaatttaactaaacataaatgatttacttagtaaaaaaacaaaaacatacggcattacagattccaattatcatctactgacccacaggagattaggctaaaatttctccatctgaactcacctgtgtactcatatccgattttaaacatcccaaccttaatctaaatgttcctctgaataaaacaaaattagtgctcatctgcggatgaactcaactcagcgacaactcctccaatacttgatcgagcaaaaatagtccgagtatccaacattgcaactacaccgcggcaagcaaacgcatcagaatcctacagatacgaacttgacggatcgaccaccacctctccaagcaagaaacggaaaacttgaggattctccctaaatcgagtgggcaagaaggaggggacgcacctttggagaaggggacgatgtggtcgtactcgtagcagaggcagccgtggcagctccagaagcggcggcacacgacgttgccggcggcgtcctgccgccaccgctccgggtgccggcccatcaccaccgccgccttccgccagcacgccgaccgggtcttctcgtcgaaggacctcggccgctccttctccctcgccgccgagctcccgccgccggtcccctcgccgtcgagtcgcggcggggagaggagggagccattcaccccagccgccgcagctttactttcggctggtatattcgcgttttcatttttttttaagtccaaataccccctatgatttgaaaacgtcgatgcagcaccctgaactctaatcctatcctatgatatcgtttatataacacttaaaatggttttgcatagtagtttttatttaatttacataatcgttggatgagtatgattatgtgataaaggggtgaaaacgggtcgggttcgatcagatttcacccttacaaatggatgattaatataatactgatatgacatcactatagaatataaattgataaccgatgattgacagtatgtgaacatgccataccagttatccaaaacctgagcgtagctctgttggtatgttccaaaactgcttgtttaagatttgaggaccactcatcgactcacggacctcacaggggtttttcccgtttcctgagtcaacttcggttggtcctagttaggtaatagggtacatatacgtgcgtgttcggtggtactgtatgtttcccgtacagtgaggcataggtcctcgaatctctttcctaacgtgtgttagggacgcgcacgcgtgtgtgcgtgcgttgtggtgtgagtgttgtgtgtgttcgtgtgcgttctgatttgtaccctctcaaaaaaaaaaaaaacaaaaccactatcaaagtaactcagaggtaatttgaacggtttaggaggctaaatctccgattttaaagtttatggtgctggacaaacttctatcaagccggtgcatcggcaatctctggatcctctagccggtgttgcatccttgcatctgcttcaatctagtcattaaggcaaaagattgcctgtcaggtgcaaggcatgacctctattcttcaataatttttccaacctcgctaattgcaagctctgaagagatagaagaagttggaaccaatccaatagaatgtcatgtgcaaagtgagctagcacaggaagagtccattctctcttaatttccaccactcttggagatcgaaattttcacgatccagtgtttgaccatgttctgtgtggattagtgttaaggtaatggttaagctctacgtctgagttccaatttgacctgctacctgatgaggaggcttgttccttgcccctgatcttcttccacaaattcatcgcacttgatttactttgcttttttttttgtggggttttcttaggcacccgacgagcaacacttagctcagtctggtacagacggaaaaccctgaacaactcatctctagcatgttgataagctttagaataatcaagacccattgcatcactattggtatgaaagcagcctccacaacctccaactttttatgaggatcaagtaccaaagcaaaacaataaaggtgtggaatagcagtgaagtatttgagaaatttttcttccatgggttgaacaacataagctaaaactctgtcatgtcggttttcttgaaacacaaaggacaatttccaaatacattcaagcaccttacaaagaagtaggatagtaaattctagatagtaggactgtagttttataaaaaggctttagaaatatatgcagacgtgttgctatgtcccattctcccttagtaagaaacaaaatctcaccatcaccatcctcatcagtatcattacttctaaagtgcaatgaatcgatgaaaacagaaattattttctcataccctttcagttgatgtagcatgaggtatgttgtgttccacctatgtttcacatcaatgccaaacatcctcacaagtttattctttgctcggcaatagtcttggaacatctccttcatcactagctgatccccaacaataaaaacagcttaatggatcttgttgagtaaattagtaacaacagtaatcctgcatagacaataaattccttgtcatagatgcattaaaattgataaattatttacactaaaaaaatcaataaattctcaacgactcctaatacatgcttgcacagtcaggttgatgatgtggcagatgcatctatgatggataacataacctccaatgtagctttacaaatttgtctccaaaatcgtcatggccgttgtatttgctgatgcattgtcaagagtaatagaaaccaccctagattctaaattgaattcttgtagtacatcaagtacaacactaagataagaggttctttggtgcttggatatccaaatgtcatatgtcacagaaaaaggaaagctaacagtactgaatgagcatttcaactcatccaacctagaacgatataacacaacaatattgttcttggtagttttccttgaaacttgggtgtactgtggacaaaaagcatttcggatcatcctctgaaattttttgcttttgcccatcctaatcggtagctcctcagaaactatgtaacaagcaatttcatctcgagctactcgtggctcataggtccatgtacttacagaaccattgggtccggagctcagttatgtctgccaggctcctgccgatgctttatccttgaggtgcgtcaaataatgtcggttttgatgtcctgttcctaaactagaagatggggataaagtttttccacagtgtttacaggtagcacgtgttactagttgaccgtccaccttacccttattttttctatgtgttgccaacaatccgctctccctgcagatggtgtggatggctcggccttgcctcccggcaaagacaagaccgtgtcgtcattggcctcgatgatggactgttccgtaggatcatccccatctccctccagaccatccatatggcggttatccatcccatagtcatccataccaggagatagttggcgggcatcgaccgacctacgggaaggaccaggcgagcattggcggcgcctttgcgagggtctcgacgaggttgacctccgacgagtatcgccccacatttttgctgtggaaaggaaataactatgttgctctgtttatttgtggtgcatttttcttttatgataggaagaagaagaggaggaggaatttataaaacaaattgccctcatgagctagttgtttctcgttgctcttgcacacaacacacaacacatttgctgcctacgggctccacagaggcacatggcgcagccaatcgcctcaccatgcccatgcagcttctctgccactctgcctctggcaactggaggtctggccctctactcgtctacgcctgcactgctacaccaggcgacccggcgtatatgtccttcgcgccggtgtggcatggtctaaactcaagtcgtcccatctccatctcaatccgaggcaggcgccagcctttcttcacacatccgcggcgtcgtgcggtcgtgcggtcgtggcgaggcggcgaatggcgatggcaggatgcagacggacagcagcggggcaggacaggatcaaccaagcaagggaatcacaggtacccagccttcccagtccttcatactacctactacctagtcctagtactagtccgagctcttcgtttttccagcggtaaatcacaagtggtgcccagcgccgcgcgtctgcatccgttcggccgtccctgtcctcggtactcgaccagtcgaccttgcagtgacagcagtggactagtggtagcgcagttgacggacgctttgattcattgcgccaatgcggaagggaatcgcgggacaccgtcgcagctttgcaggagatgctctgagcgtcttgtagagacgtagactcgtatacgcgtgggacgggcagacagagatgctttgatgcgctgcagacttgcagtgccgagcttgttgccggggcacggaaagatatgcaatgtgcgcgggtgcaggatgcaggccgagcgtgcgtggtggtggaggcgcgtttcacacgatgagtatgtagaagcatgcgtcgctccttgatgcgcccggccaggcctgatggctattgcgaagcccattgggccttcgtcgtgcctatgggttgttcatgtgctgtgccggcccatagcccactggtcgtgttgtgccggggagcactaatgggcgatcagtcgcgccctctgcacggcgcgcggtcagttataacccgtctagtctctcctctctactactagggcggtggatggtgcgtcgcttggagcgcctgcgttttgtttctcttttcttgggagtgcccgcttttcccttttttttttgttttttttcggtttctctttttttttttggttttttctgtttttcttccgtaccttccgtttcgttttttttctgttttctttctttccatatctttttctgtttttaatatgtatgtatgcaaactttatatacgtacaaatacaaactttgtatacgtgtattttttagtttttatacgtacatataccaattttttatacatgtatacaaagtttatatacacatttataaaatttatatacgtgtattttttttaggtttttatacgtacgtacaaatacaaactttgtatacgcgtatacaaaccttgcatcccgtacgtacatatatataaactttttatacacgtatgtaaagtttgtatacgcgtataccaagtttgcatatatacaaactttgtatatgtacatattaaaaaccgagagaaaaaacacgaataaaaaaaacaaaacttggtatacatatgaatataaaatttgcatacgtatatcttaaaaaaaccaaaaaaaggaagagaaacaaaaaaaagggaaaaaaaccaaacagaacgagaaccgaacaaaaaggaagagaaaccgaacaaaaccgaagaaaaccaaaacagaaagataaccgaaaaaaggaaagagaaatgaaaaaaaaaaggaatcccgcgcgggcgccgtcagccaccccctccgtgcgcgacacgtgtccagtcgcgcggcggagggcgcgtgcgattgttcgccgattagctttttcgtttgtgctgcccgccatgcccgttgtctaggcccaggcacggcccatatacgggccgtgctttaatttctagcgtgctaggctatcatgtcttgggccggcctgataaagcacggaccaaatcccagctctgagacatgtttagagcttggtgggagaaatcggactacctctaggagtgctgaagataatttattgatctggaccgtgaagctggttctccattagcttcacaaccccatgtggataaggtcagagctcatcctaatttgtacattcatgtgttgaccaacaagttaagagagacatgggatgcaactgatgctttcacggctagcgtctgccttccaaataatttactctgctatctccaaaataataactttgcaagataagattgctacgatcatcaattcttatagagtaaatttcacaaaactacagatactttgagcaaattatcacaaaactacagatttatggtgatgtattataaaactacatatttaacactaaatttcacagagaactacaaataggtggggtatcgtaaaactatatagatttagtaacaaagtaaccacaaaactacagatttagtgtcaacttaatcacgaaacttagacgtttataactcaaacataacactagtgctatgtactccaaaatatatatttttatgataactttattactaaattatagttttgcagtactctaccttaaatctgtagttctgtgataaatttagtgttaaatatgtagtttgtgatacatcaccttaaatctgtagtttaattttgtgataatttggctaaagaatgtgtggttttgtgaaatttactcattcttatttttttttattgaagtatgcaactgcctccatatgatacttatgaaaagtttgtctcatgaaccactgacttatcgattgattctctgtagccattgattgtactacgactgacttgaaagaatcttaccaccttactttttatgtgctatttattgtattttatttattttctcctacaatataatgtagatgaacctttttttttctctcctaagggctctatgtatttgctcttctctttcgactaatgggagaaccttttgtatttcatttatggcacaatcgaaccacatgatgtgagatgacgatcattttggcatggcgagaaagggcaccgacgtaagtgtagggttgattgcaaagctgatcggtaactccatatatatgggagagagaaatatggatttgctcttttttgcaaaaaagaaaaaaaaaacagtgttgctcctaatggtgactgggtcatgtgaataggatagaatagacggaaaattctttttggtggcaggcatataaggaaaaataatatgaattatcttgtaaaagggatgtagatcaaatattggatggtcatgaatggtttggacttttttttttttgtctatgcacttattgtgaagttgtacattaagaattacataatttcgaaatatggaaatggtatgatgttattttatgcttgattgccaaaacatacacattctttttattatttagttaaatactatcgtagcgttagcatggacaagttgctagtcaattgagtgactcatcccatagtgcatttcaccagaaaataaaatattatttacggtacataactatcctctttttctgaaacaaatttctttattccaaggatcagacatataagttatgatccatagttcacaatcaaacagtacatatataacaaagagcaattaaaacatattgttttacaaaaacaaacaaatgtgctatagcacggtaacatcacatgcccttcgttctgatgacgattgccagcaatatacacaatagacattttcttttgacgtgaatgtacacaatagacatcaaaccacaccattatttattttccgagtagttccaccatttcttgtacttggactgctgcatgatgcattattcggcctgctggtctattgtattcgttgtagtcattacatcctgaatcattataatatcacaaattttgttcatgccattattataggcttataaacaatcaaatcatttggtgcatttcaacattgtacgtccgacagttcaagttgtctgagagaaaaacaatactatgcataggtaatgaaaatcagcataaactcagatgtatctgcaactcttatttgttgggatacttaaaacaaattaaaataaacagttaacatgcttgtaacaaggtattgtattttaatatgtatgtgtaactgaaacacaattaatagcacacatagatttaatgtaaacctttagagttttccacttacagcttgtgtttgtggagtactatagaatgcatgaatgtcaagctgtctagttgtctcaatgccaggattgttcttgactatgttgtgctgaatagtgccatatgccatagcaagttgtccagtcccaccgacaatggcccactcaccagtttctggagtagtccccatcacctgaagctttgatccattaaacctgtaccatttcaaaattattatgcgccacaagaatctacaataattgaagcacatgaagcaactaaaattgtgaaataattaatccattagtcatggatgctgcaatcaagttaacaagcatcagactatcatgaactaaaaagaaatcgaagcgcagttaagcacatatattggtcctagttcaatgctgtggacaaaaaagagttattagcatgatgttgttcaataaaaaatataaaaacttgttagtacctggcatccacaaactctatgttcatagatgtgtaccaggtgttgttaacttgatcaacctggacatgcattcctcttgcattgcaacaatagtactgtgttgaagtcaggtccatcatagataggccaatcgttgataacaatcataccaaacgaagcgggatgtgatgagggcaccattgtttcttggttgtggtttggccctgtaacaacttggtgcaagtacaatctcatggtaatctcacactgatcgcggagcacaggccgtactggaataactttgaaaaatggactagccatggctaaaatgtgctttggtaggactggcaaagtggaactaggaattgtttgattctttgcttggtgtcgatgatcagagatggtgtatggctagctgtatttatagcgtagtggtagcactctagttcatgaggccaactcagagcttcatcgattttctcgtttgcattccctggctatagcatttagaagaagtatggaataatgtcacaaccaaacaaggtcagatgtctaattcttttgcccccacttgcattagccatccaacatttttttcccctttattttcactggtacacaacaagagatccctgccagttttcgaaacggcaggctgcatgtggcgcagtgatggagttggagttgacacaaaaatatccctggaggtttgtcattccaggtttagtccaccaaccggcagtgatatggatttgccgcgaaaaaaaaatagtccagtccaaatgtgcacgaagatgacggtttgtatatgggaagtaaacatttttgtttttttggagctaattatccatcatttcttttgaggtgcttatttaaaaggattgataatgcatctagagacagccatgcattatgcatagagctaattctatcagtgtttttttttctctaagttttacgaagttattatcagtgaaaagaagaagcagttcatcattcaagtaagataccctgggaaaatctgattttgcggttcctcaactcttggtccaaaattatacattagcaacatgaacatcagaataacttcaaaagacatctcaaatttttggtttgaaggtgtttttttgcgtgatttgattcttacatggtacatgcctgacatattattaacttctgtcaaaaattaaggtggttattaattgttcctgtaaattcatgggaaatcataaacagccagtcacttgtggcaaacaacaaattaacattcattaatatatattcttaaggaaattgtaataatgcaatattgttttaatacacattatttggttcgtcatttattatatgtgtgatttaaaattaaacaaaacttatatgcgtcatttatattttctcgcattttcatacctgtgtcctttcaatagagaagtatcttgtagttctgataatttttctctagcgtggttaacggaaggtgcattcctttacctgcatatacggtgtgagtggtgctgtgtagcggttaatccacaattgtattttagaaaagcatgtatgtatatatttgtcctttggtgtggtctggtccacctgttagggttgaattttcaagagatgacaaatatggcactttacagaaaacaaatatgatgacaaatatggcactttacagaaacactagagacatgatgaatatgaaacatatattcctttttttttgaggttcaaatcgaaaaaaaaagaagccctgattatcagtgtatgcgtttagtattagagttagattagatttgtatagattgtatccgtatataacttttatttaagagtttgttgtaatctctattgtattggatatataaatacaatcaccctcccacgttgggttgtgaggcgttgtgaggcgtctcataattctctacatggtatcagataccagtttccttctaccctaattcaccgcttcctctggccttcgctttttccgcgttcgcttctcttccgctgcccacgcgacttccacgtccccaccaccgcgccgcgccccagcgatttcccctcacgatctcgccacgccccagccccactgcgccttccatgtccccaccgcgccacgacgcaccgcgccgcatcctcgctcgttccgtgccgcgccctgcctacatcgcgccgcgccgcgctctgcccccatcgcgccacgccgtgccctgcccgcgccgcgccctgccctgctctgctcacgctgcgccgctttctgtcttcgccacgtcgtgattattctgcctctctgccatgtctaccgagtccacctcctcttccacaacctcgggaacaatggcatctacatcatccggctctactccatcttctgctgccagcaccggggattctaccggctcgatcttcgtcaacccgtatgccaccgtcaacgtcaagactcacataccaattaccctggagctcaagcaccccaatttcaacaagtggaagaccttcttcacttctatgtgtggcaagtttgggctccttcctcacattgatggcactgcaccccctcgtcccgacgactcgacttgggcacaagccgattgttgtgttcagggctggctgttcggctccgtttccgatgctatcctcgacgtcgtcatggaaaccgaccagaccgcccgtgacctatggctcgccatcgacgatctctttcaagcaaacaaggaaccccgcaccatctatctcagtcacgagttccactcaatgacgcaaggtgacatgcccattgccgattattgtcagaaggtgaagactgctgccgatgccctccgcgacgtcggccaccccgtcaccgaatctcagcttgtcctcaacttgctgagcggcctcaactctcgtttttcgagcaccgccgacaacatcgctagcgcccctgttctgccctcctttgcctcagcgcacaacaccttgttgctcaaagagctgcgaattgccaatgcacacaaggtccaggctgagacaaccatggtggtggctgcctcctctgccaatgcctgcacttccggcacctgtgcgtcctcttcttcatcacagtctcatggcgatgtctccaacaacagtggtcgccgcaaccagtgacgctacaacggtggccggaacaacagcagtggtggcggcaatggcggacgacagaacaacagcaacggcggcggctatggcaacttcgggaacaatttccagcagcagcagcaccaggctgggccacgaactaccggcccatgggtctgtttcaatccatgggctgtgcagcagcagcagtctccctggcgtcccagcaacagtgccggtctgcttggcccatatcctcaagcacacacgacatttgcaggcccatatgtctctccaccaatgccgggcttgccaccaatgcagcaatctcagcccaattgggatcaggcaggtctgattgctgccctcaatcagttgtccgtgcaaagtccaagtccttgggtgcttgacacaggagccacttcacacatgtcctctaccgacggtattctcgatactcgtcttcccaattcctataccttcattaccgttggcaatggtcatactattcctgttatttgtcatggcacttcttttctacctataggaaccactaaatttgatcttaaaaacatccttgtcgccccctctttggttcgcaatctactttccattcgtcaattcactcgtgacaataactgttccattgagtttgatgagtttggtttttctgttaagggcctccgtacccggcgcgtgattcttcgctgcaatagtcgtggtgacctctacactctacctattgctgcacctgctattgctgcccacagcttcttggcccaatcctctaccctgtggcatcgtcgtcttggtcatcccagttcagctgctattcagactctccacaaattagctattcttccttgtactaagatagatcatagtttgtgtcatgcgtgtaagttagggaaacacacgcgtctacctttttctcggtctcagtctagtacatcttctccttttgagcttgttcactgtgatgtgtggacctctcctgtcttgagtacttctggctttaagtattatttagtggtgctggatgattttagtcacttctgttggacttttcctcttcgccataagtctgatgttcaccagcatattgttgagtttgttgcttatgttacgacccagttcggctcttccattaagtgtttccaggcagataatggtaccgaatttgttaaccaagccactacctcgtttctcgctagccgtggaaccttgcttcgcttatcctgtccttacactctcctcaaaacggcaaagccgaacgcatgcttcgcacaatcaacaattccattcgcaccctactcatacaagcatccatgcctccttcttactgggccgaagctctagccacagccacatacttactcaatcgaagaccctcaacttccgtccacaactccattccgtttcaaatcctgcatcacaaagttcctgattattctaatcttcgggtttttggttgcctctgttatcctaatcttagtgccatgactcctcataaactctctcctcgatccgctggctgtgtttttcttggttacccagcttctcacaagggctatcgttgtttggacatttctacccgtcgtgttttcatctctcgtcatgtggtttttgatgaacagacattcccgtttgcagctattccccaaactgcttcttcttttgattttcttctacagggtgtttctaaagcggtagctccgtcctccttggacgtcgagcgtccgcgttctctaccggtcgctccctctcctgaggtcgagccgccggatgacttggccggccctgatatgtctcagcttcttctccataatagaaggctacaatcatcgcaagctccagaaccagctatattggcgccttccagtgcatcctctagtgccgatgctagtactacgggcgggagcatgtcttcttcatcaccagtgcaaactatatcgagttcttctattgctcagccgcctgccttgcatggtgttgcttctgctcggccgctgatttctccatatcaccatacgtatgtgcgtcgtactcagcctgtggcggttcatggtcctatacgcaccaccagagcttttcgagctgcacaacattcacaggatcaacagcgtcatgctatggtaactcgctctcagaccggcaatcttcatcctgcccagcgcttcaattataccgctatgcagacttctgtttcgccagttccttccaattatcgtagtgctttggctgaccctaactggcatgcagctatggctgatgagtacaaggctcttgttgataacaacacttggcatttggttcctcaacctcctggtgctaatgttgtaaccggaaaatggatctttcgacataagtttcattccgatgggactcttgctcgacacaaggcacgatgtgttgttcgtggctattctcaacagcatgggattgactacaatgagacttttagtccagttgttaaacctgctactattcatgttgttctcagtattgctgcctctcggtcttggcctatccatcagcttgatgtcaagaacgcatttctccatggaaatctagaggagacagtgtattgtcagcaaccatttggttttgttgatccttctgagcctactgctgtatgtttgctccaaaaatcgctctatggtttgaagcaggctcctcgtgcttggtaccaacggtttgcaacatatattcgtcagttgggtttcacatcttcggcatctgacacttctctcttcatttataaagatggagataatgttgcatatttactgttgtatgttgatgacatcctgctgactgcctcgtccacttcacttcttcagcatattactgctcgcctacactcggagtttgctatgactgatcttggtgacttacacttctttttgggaatttctgtcactcgatctgcagacggtttatttctttctcagtggcaatatgctgttgacttattgcggcgagctggtatgtcggagtgtcatcctactgcaacaccggttgatgctcgatgtaaactttctgctacagatggagctcccgtttcagatcctatggagtacaggagtctagctggggctcttcagtaccttactctcacgcggcctgagatagcttatgcaattcagcaggtatgcttgtttatgcatgatccccgtgagcctcatcttgctctagttaaacggattttgcgttacatcaagggtactctacacatttgtcttcacatcggaactgcaccagttgactctttgacagcttattctgatgctgactgggtgggttgtcctgattctcgtcattccacatcagggtattgtgttttcctcggtgaaaacttggtctcatggtcctccaagcgacagaccactgtctctcgatctagtgctgaagctgagtaccgtgcagtagcacatgctgttgccgaatgttgttggctttgacaacttcttcttgaactacatattccacttgcttcgaccactatcgtttattgtgataatgttagggccgtctacatgacagttaatcctgttcatcatcgtcggacgaagcatattgagattgatattcattttgttcgagagaaagttgctttaggacaagttcgtgttttacacgttccgtccttacatcagttcgcagatatcatgaccaaaggcttgccagttcagttattcactgagtttaggtccagtctttgtgtttgtgatgttcctcccgctttgactgcgggcgggtattagagttagattagatttgtatagattgtatccgtatataactcttatttaagagtttgttgtaatctctattgtattggatatataaatacaatcaccctcccacgttgggttgtgaagcgtctcataattctctacatttagccaggctggaaagttgggaattaccataacttcacaagacaagaaacctaattatgatttgattagtgctgaacataaattattggctaatcagacatttcttttgtgaaacttatcaattttttcacgagattttgtatctggtgatgacgactctaccatttaggtttggaatccttgatggcatagattatgcttgataacttggctaatatgctgacattaaaatatgtccaaatgttcataaatgtcacggacttcatagcgtttccataaagaggacaaggccatgtactgatgcacatctgaacaaaattaatgtatgtcataaaaacagataaattgtgagaaaaatttgaactgtgatgggcaattgatcatatcgtaattgtgacaaccatttctaatcacaacacattagtagcgtggagttaattctgaggaattttcatgtagctggaatatttcttttgcaaaacttttttagcagcgttcagtagcgatgaacaagtgtcttcattttttcgttgcagctagttaggtaacattatttttgcaataagaaatcatgcacgtcagcagtaaccagtaactaattcaatagtcctcaaaattattggatgtgtagtgtcatatatttatgaagtttagttgcatggtacctacactaggactttttttttcacgaaatggaaatgcaagaaaacatgatgaattcctatctcagcctcctaaaagttaaggccgcctcaactctacaactgaaatcacatttgccatttccatttaaagaatcctgttcatattttgttcgcttctctatctctacttctgatttatattcatgctcgaaattgaattgatagaagcaatttctattgatgttttcattgagcatcgatctgttatgcagaatctgcttcaaaatccctcgccaaggttaacaatttcagaaagctaaatttttttaagggaccactaaacctgaaataacccagcccctcagcggagctcatgtcagaaactttttgacgtatcaagaatattaatttgcatattcaacgactggacattctttggattaacctgtcctagccgatgaccattagcaagaacaatataagggcacattcaacggtttagcctgctatggactcttaaataggccatgtcagaaaaaaaaaacaattgttctacaaaggctggttttatgatcgtctctccactaatatgcagtaatatataattaaattcttgtagcaatggtgctgtgattttctgcattttggatctaaatacgtgacttttcttgaagatggaatatacaacggccgttgcttatcgtctgctcgtgttttcctcgttgtgagggccgatggcatgcaaaagatggatgcatctcccttctttttttctctctcatccacatcatcaaatctgcttacatggcaacaaatagagcccactaattaatactctctccttcccaaattaatcattagagcaagtttaatagtatagccaactactagctccaaatcatctatagccgatttaatagccaattcatacaatatttacccagaaaacctacaccacggcatcccgtggagacgggatcccctcctcctacctcactcctctccccaaaatcatccgaatcctctcctcctacctcactctcctcccccaaatcacacggcactgcagccctccctctccctctcccctctctctctctttctctctctctctgaagaaggccgagcggagaagaagccggccgggaggaagggatcgtcgtcgtcgtctccggcggccgaggaggacaacgacggcactgcgtcagcgaggtcggccaaccctcggcggggtcaccctcgagctcgcctcccctcgctgcgccgctatggctcgctgccctcgtcggtcgggtgtgtgccggggagtcgtcgcctcggggagggcagaagcgggagctccccttgtcctcgccctcggcctcggcgtcaccgtcgtccccgcttttgcacctccaggatggacgccggcagcctgcgtcgacctgcaacaggtatggccgtcaacctcctcctcggctcctcctcaagacttctcaaactctctggctcgggcctcgaccctcacctcgtcgtgcctcctcgacgtcatcctccgcagttgcggccctccctccctgacgtctcctcctctttttgacagtaccctctgataccccataagtaccaggctttataccttggtaccaaggtttgatacctaggtatcacctggtaccttaggtactgggcatcaggtatcggtcgatacctagtcggtaccaaaggtaccaggtaccaggtacgaaccggtacctaaggtaccaggtactaggggagcacacgtccctcaccttgccgtgcctcctcgacgccatcctccgccgttgcggcgctccctcccccacgtctcctcctcttttttgatggtaccctttgataccccacaagtatcaggcttgataccttggtaccaaggtctgatacctaggtaccacctggtaccttgggtaccgggcatcaggtatcggtcgatacctagtcgataccaaaggtactagttaccagataccgaccggtacctaaggtaccaggtatcaggtaccaggtactaggggagcacacgtggacagaggaaacgaaaagggagagtcagttaaaatatcccgttgcaacggtatcccgttgtgtagctgccctcatatttacctataaacatatactacactagtaatacttgatcccaactgtcatacatacattttgtcttatggtctgtgctgtagctcgctacaaatctgtagaccgctgctcttttctatcatcatttatcttcttgatatgtatttataggtggcttatagcctgctattgtacttgtcttatataagtttaagcaccaaaaccaaagacaatttaaatcacatcaatcaagacaacatgcacacattctcccacaatgcatgcattgattaaaaccccataccaattacaccctagcattgtcgcgcccagggattcgacaacccgaatcaccggctatctgtggatttaacctctgtctaggcatcaaccagagtacatagatgacaatttgacacagatccacgtcttacaaaaataacacaataaaacccatatgcagcggaaaaactagagaactaaacttaatcttcacagcaacgcgaagcttcctccataactccataggcaaactcttgatggctggcacaagcctaatcttcatagaactcaccatctgaaccaacttctgcttctgggagattgggaaaaagaagcaagactgagtacaaccaccataatcaacaagtcataccaaggggaaggtatgatgcaagggtaatcaaaggattggctcaaaggatattttgcagtaaaaacagcatttgtaaattataagttgaaagcaataaaacagtatataattaagtagtattaaccatcatcgcagtacaacgctaaatccacgttgaaataggcccaacccaaaaccacccgaactacaccagttcattaagacaaattattaaggtgagactaatcacgatgagctggttgaccgcccaataaccgtaggcgtggctattcaaatagttttactctgatcagaggtgcacaactttacccacaagacacgattccacacatgaaaccatgccccgaagtactgccacgatactgcaaagggggaaatcgtgacaaaccctccatataaccacccctaaccaagcacacccacctctggtttcggtcccactccaaaatccagcagcccccgctcatgtctggtaaatccggctgcagcatagaccgcctcccggtccatccatactccatcacgcttacccttgccaatggtgtgctagctagaaaagattatatttaagattcagcctggagcccatctggcttgtggttagtacgagtacatcttccagggattcccgagaaccggtccttaattgtcatgggcacgaccaccaaataaaatcatgcatgtgcccacgacccaccaagtaaatcatattttaattaattaaccatatgccaaggtggcataacatcatcataaaattaaggactatattatagtgaatcccaaagtgagctagttgatctaagcatgactaagcaatcctagaccaatcatctagtcaaattattaacctaggctatcaatgaatcaggataaacaaaggctgagtatgggtagaaaccatcccacatgacattataaaagtaatgcaattttgagagaaaagcaggggttttgcaaataggctcaatatgatgaatgatatatgtatgacttgccttgctcttcagctgacgggacctcggcgaccacttcaaaataaactggagcgtcggaactgccggagtctaaacgacaaacaaggcacacaataaatacaagctaaaaagctactgaaacatcaaaagaaaccaattttaatggattcttgacattttaacgaatttactgcaatttgaatgggttaaaacaaagctctgattattaagttatgaattttacaagatgctctgtgttatttactattgacagaaacttaatcaattgataggaattagagcccaaaaggaacataggatcaaaggataggttgactagcaagcaaacctcacgagataccgactcaacgagtcaatttaacgtgacacgggatcaccgaaatgatcgaccgaaactggcgaacggaaccggccgctctaaacgactctaacctaaagaacgaatcgggttggacaaacgaacaaaccatgggggaacacctcgttcgaacgaacgagcggacgactcaacaacggctgtggctaaaccggtgggctagacatgattcacggtaaagccccggtacagcaaacgataggccagtaggaacctagggttgcacctatggctagacaactcgactaccaagctatgggacaaaaacaacggctaggattaagcggcacacggctgcgacacagcggcgcaaagcggcggctcggctcggcagtggcggcggcatggcatagcacggctcggcggcggcgggacgacccgacggtggcggtgcaaggtggcggcacggcaacgacacggcgacgacttgactaaactacgacacatgaaaagaaaaccctaaaaacaggagagatttctcatcggggagcaaaaaccagggagagatgacaacagcagcggcggcggttccggtggcaacacccgggatcaacgacaacgctagaaggagacaaaaaggggaaaaacttaggttgctagattgatgattgtaggagcaaatacatcaaagaaactgggagacgaggtactggcggcactcggtggcgacgttgatggtaacgacgacggcggcggtgcagggcagcggcggcggcggggtgcaggggggggctaaagctaggactcggaaaaatacaaaagactggagaaggaacacttacaaaggggagtactcgattaggaaaggaggagtcctagcgggagtagtactaggagggagggagagggaggcgcggccagctggggaaaggagaagggagagaggaaactaggggagactaggactttcccaaaaaggaaaaacaatgtggtgctgttttaggaaaggaacggaaacagtcccgcgaactgacacgaatatggttcaccatgcaaaacgaaactgcggactgagaggggagtgaattgggcacaattcacgaccaaaggcaaaggaagaagattaacttgacacttttaactttgcagcattgcctctggtgatctgatgtttactctctacgtcctgttagtgattttcagagcaaagagaattcgataaaaatattctccctgacaagtccgagtattaaatgcattgttaactggggttttctcctggttaaccaaagcaaatccttgatgccatttattagtgatttgaaacctaagggaagggaaaactccgggtgtgacaagcatgcacatattctcctatactacattaattatatttcgatgaaatccgtatccatgcagttatatgatgatcaatttgaaaaattctggactctattacatgatgttcaatttgggaaggaggaaatacctttttacatgccctaagtacaataatataagtggtctctggggcgatgaacattacaagttatgacaggacataaatgttggtggagttttcttaatctggtgagagcaactggaaggtatgactgcactacatcacccatatatattggggataactagggatcggtcgccccatccaaatcttcaaaaatcgggcgctgacgttatgctgacgtcaacgcccgatttatatgcaaaacaaattcaaactgatttttctcttaaattatttatccaaatcattatccgattgcaccattaaattcgttgcaattaaatcttcaaaacaagactacacatggatatattccgacaaaaatttttttagcttattattgattttttttcatgttgcacgatgttccaccaagtatatcggaattgtttcactgagtagatcgaaaatgtttcactcgtttaaatcgggtgttgtttcaccttatataaaaacattgtttcagcaaatagcgaaagaatatttcagttcactgcaacatttgatccatgcatagtgaaatattacgagtatactagatgaaacatttttcgatggaataaaaaataaaacgaattcacttaatagagggtttccaaaatatgtgggtttttttttgttgcaatggagtatctcaaaatcactgcaacattagatctataaatagtgaaacattgtacattaggtgaaatattttttgtggaacaaaaaataaacgaattctcttaatagggggtttccaaaatacgtgggtttttttgttgtaatggcgcgttccataatataaaaatccactacagcatttgatccatacatagtgaaacatcacgagtacactagctgaaacatcgtaaaactactggttggaaacattaaaagagaccatatgcaacattcaaaaaaatatcaataaaaaagctaaaaattttttttgtcgaaatataatcatgtgtggtcttgttgtaaagatttaattgtaacgaatttagtggtgcaatcggatcgtgaattagataaatagtttatgattaaaaaatcttttgaagaaatgagagatggaagcatgtagggaaagattctttgtatgcaaatggcagaccatgcagcgtctgatttttcttccctcccatcagacgcccgacaactagcattctccatatatattggcggttcacctagatcagacatttatgacagaaaaccttgatgtccaaaaaaactggtcaggcaccatctagactccgggtgaaacctctccatgggttggcctggtgctgcatcacccctagacggctagacctcggcagtggaacaaaccaatggttaggccattttggtggggagccgagatagctgtagtggactggatggtacgctactcgaaatagttctatgtgatgttacttttgcagttattgataatatattataaaaagaaattaacgatgaaagttttgaagaccgtgtaaaaaatcttagactttggacagagggagtaaaaggtttttttttttattgtgagctttatagacgaagcagaaaaaagattgttactaggatgacggcctcatcagattgttcggcttcatcgacgttattccacgattagcaatagcatcagcttcctttcttcagcaggtctcaagattaccataggcccaccgtatcacagacgaaatgatgtgaaaatcgactgttatatatagggcggggttgagaggagtttatttctgaaaaacatgtcatttctcactacccacagataccaactaataacagttgcaagcaacatgaacttgacattgtttttcctttgaccagatctctcaagttttttgtggaataagatcccaacctgaaccatctctacaaagtcaccagataacttaagaaatcagacagtgtacaaaatatgttgggtatattttgaatttgtacacataattaaaggacaagagccacctggatttatattgatgttggacagcagattgcattttgtctctgcgaacaaaatatagaaagtgttggtaataacagggttgtaagttcttctattatttaatatatccaccctgttccgcaaaagaaaaataaacaaatataagaggtgttctatttttcacagggatggaggcagcccaaatatcagaaatgaaataaaattgaaaggaaatataggagaaaaatggctggcttgagaaaagccaataaaacggaagtataattatattgttcatgtttgtgccacgagagacaatatgccgtaaatgttgtgtacagataacagatagccaggtctaatattaatgaggatgccataatcaagccgatgtgtccagactatacatcatttttgtgcccaagacaaatacgcaacacatattcgtgtccagactatacatcatttttgtccagagtatacaaatacgtaagcagcataattgcttaaagcaacaaacctgattaattattattgattaaagactggacatatttgtgtccaatcatacatttatcatttttttgtttttgcttgtttcacgaggatttggatgtggtgagcattatatgtacgctgatatgtactttcagaacttctgcagatatgtacgcggccatttaaaaagtacatggtgtcagggtatagcacgtatatttcagttggcacaatgcatatatacgattagatcaacagctagcaacggttttgtatcactaccagaaactccattagccctgacgggccaaaatttttctgacgtgtatctattaggctgtcaggagtaaacaatttttttctgacgtgctttcggtaccgtcacgatatcatgaatttcgctggcgtggtttgcctgtcagaaaaaaattttaggttcagatggttctcctacagagaccacatacgttttcatacataaagactgaccggcctggttataagaaactatagcatatattattattattattattattattattattcaacatgcatcctatgatgcaagacctatgatgcacacaaccattacatgattaaatcaccaaatgcaaagcatgcacttactacaaggaaagttctgaaaggccgaaaaaaggcatgataaagaaatgaaatttgccaatgctttggctgatctgcaaaaagaaaagccatagtgccaccaccaagactatcagtacatcagccatatatacaaactcaaataaactctactacgcaatcaactttcgcggacgagcccccgtccaaccttcaagtggaccgcatatcgtccgcctgtgataatagtgatcccaaagaaaaaataagacccatatgaaaaatcaatttttacagatgggcctattaagagacccatattcctccagcccactagtctggccccctcccttcttccttaaaatatctaagtcgtatcctcgcccctctctcctcatcctctccgccgcaccacctctactccactttttttttgagcaaaacctctcctccacttcaactacttctcctctcctctcacttcggaaggtggtggtaggctctcttgcagccaaggtggcacgtgtcgacgacgggcagtggtgatgaccaatgcgacagcggcggcaggaagagtccgctggatccaccggcagcaacgagggaaggtgcagatttggcaggctctttccctcccgcgtggatcacgccgcctcccctcccctctgcatggatccagaggtgcacttgatggcgacgagggggaatgatgactacaacaacgatgagtggagggtagatccgacgggctctcccccttccacgaggatctcgccacctcccctcccccacgcatggttctggtgatgcgctcgacgatcggttggggtaacgacgattccagtggcagcggggagagcccgccggatctgccggaaatagaggatccgtcatgctcttccccctctcgcatggatttttccacctgctatcc

SEQ ID NO: 20315 - DNA, 6730 bp, Oryza sativa
ggcagcgatgggaggggcagatccagcgagctctccccctgcctcgcgcatggctctggtgggccgggatctccccctctacgtggatcccgctgcctcccctcccttgtgcatggatctgtcggtggcagcgatgggtggtggggacaccggggagggcgtcggccatggtgacaatgaacctagagcacgggaatgacagtagctgtgacggccgacatgcatgggagctaattagctgccgctttagccatcgtctccattcaccgttgccgccgtcaggatcgcaaggaggagcaaagcatgtcagccccatcgccaccgccgctcaccaccagaatgttgccgccgcccccgacccgaactgagccgccactccaaccttgccagcatctactattgcaccacccaccggtgagtcccctgcgccaatccgaacccaccatgccctagatcgccggccaccatctggtcccgtgccactcgcaaccagccatgaacccaacaccgccacatccgcgctgcttcagcctctgtctgccacgtcagccgcacatgtggtgaacccgatttagttcagccgttagatctaggatagatcggtcccttttaatctgagccgtcagatccatagactggctctgcgcacccggtctactgtggagccgatccatgtggatgcagtaatccgttttccaattcataaataattcattattgcgtcataaatgataaatattatctgacagtggtttaaatcctattgaacttaggaaatccataactaattaaccgtaactcggatttaggtggttcaagtctcgaaattcatctaaaatcgagatatatccaacaaaagtatccacatgtcatgtttatgctcgtttttgtactgttttgttgattgtattcatttgctttggctttcgacgttcccaaagaggctgtttatgctgaaggttcgaaagtcttcgcaggcctgcaaggtaagtcacacagatcctaaagctcccctttgggagggttgacctatatcctttgttatgaccctgttgacattccttacctttcctttgcaaatgggttaacaaattgattagctagaactctatgtggtttagctaaagctattaggatgcagtcctgcttagaaacattagcacactaatgggataacttatgttacactatcacttattcatgttcatttgacggtagctcacgatggtcagttgtgattggttaaaaactgaattttccaactaaaacctaataatggtgggttgtgagcacttggttttgatagtcatgctcatgacaattaaggaccggttcacaaggtactattgtgaatgtttaatcatactaaccacaagccagcgtgggaaacggctggacatgttgtatagcatggttcatcgtggagtgccagttagagaagtggccgagataagcccacgagggtcactggggaatccatacctgactaagggggtggctatgatccgggtatacggtgcaccactttgaattgtgttatgctagttttgttgtcaaagctcctttcaaggtactgtggtggtattgaggtgcatggcaacatgttgtgtggttctgtcttgtgtgtgcattggtacacctctgggcagagtaaaactattcgaatagccattcccgcggttatgggtgaacctaataataagatgataattggtttaactcctggattggaatgtttaattcttggtttggagataaggtctgtgcaatagggcatggttgttcagatacgattgggcctatgcaaacggtatgttgtatatcgttggattgaaattgctaaattaaatacattatagtttattaaatgctatttatacaaatgatcctgtattatgctatcctttgtattttgtgcatttgtatatttgttgtgtggtttgttgagtattccatgtacttatcttaaagtaatcatcatcaaaggaggagtattacagtgaaggtgatgctctcgaggattaggccatgttcaggtcaagctgcttaggattttattgcttgagaagagctatcaatgtttatattcgttcaataattagttaaagacttgtacttttttttatcaatttgttattgtgtgcctcagctgattcctggatgagggtttacacacatgtaagtgtttggaattttggatagaaatttcaggcttgatacgccggcagagaggaggagggggagcggcaccaacttggacctctccagcgctcggaagagaggatggggcggtagtgctagcgtcagggttgggcatgcatggacagaggaggggtgagtgggagagaggaggagagaagtgaataaggtagcatgaggaggacaagggcatgcgggaaaagaggaggttttgctcggcgcaactcttagctcaaatcagctaagctttttttgtaggtatcggtttttttaaatggacacctatatgtataagtgccggttgtttaaatgttggcgccaataaatattgtaggtatcagttcttttaataaaactgacacctatactattggtgctagtttttattagaataatagttgctgagaggttccggttctatactgttccatcccacctgttttaaatgaatcagtacctatcaggggttttgtagtactccctccatctacttttgatggtcatatttcatcttggcacacagaacaaggataagtaattctacttatcatctatttaaacatgctactagtcattcctcgtaaacaagcgattcattaatatttacatttctcaatgtccatgtagccaatcatgtgtggaagaatgaagagtcacatgttaaatccgagaaaatcattaagatgataggttgttggattgaaatatgcctatcataaataaatttttcagatttggaaatataactatcaaaagtagatggagggagtagtccgtttagattggaacatcagcagattgagcctcatgatcgcttctccaatgttgttagattagttatgggctgtttggttgggcagattcatgtagtataacaaatattttctatttttaatcaatataattaacgtttgcatgcttgaaaacatctttttacgacaatatgcaaactattttgcatgttagtgggtagaaaagatttgatgcatggaacttccagagagttaaattgttttatataagaaatattctgcatcaccaaatcttttgccatggaactgtgcttggaacctttcactactaaaaatcgatttttcatagcggcaccatttttttttcattggcggccctgtgcacgcttcacctgccagattgtaatgatgggtgggggctaagaactgccagtgaaaatgactcttcgctagcggttgagttacgtagaccgccaacgaaaatatagctattttcactagcggtccacttaagcaactatcagcaaaaatctattttccctggtggccaccaaagagcaccgatgtattaaacaattcggctcgatctcaaccgtaccgaactctttatgtctccttctccctgccccaccggcgcacccctcctcctcctctcctccatctttcttccccaccggcgcaaccctcctcctcctccttgctgcttcaccactgatgtgcacaccctctcctcctccttcccaccggtggccgcatccatgggtggcggatccggcggcagcgagtgttaaatatatgatccgaattttgggcccacaatatatttagattagttttctaataggctttgtattataggattagtttccgattaggactttgagtctttgtctattaggactcctagatttctcctatatatatcccttgtaagccgcacggggagggtgcgacagcccaatgtatcccctgcgtttgtatccaactcctctatagtgattattgtcggttggcgcccatggttttttcccgcaagggttttccatgtaaaattcgtgtctccgttgtgcatctattttcataacggtgagtcaagtgagaggtcgatccagaggcagcgaaccaaatgggagtggatctggcggcaacgactttcacgtgtggcggtggcgggatggcagcagatggagcactggcgtcagcgccctactcccctcccctcccggatctggccggaggggaggaactaggcagtggtggctaccctactccctccccttgcctccctctttctgatttgcccggaggggaggtggccggtggcggcgcgacaacaatagatgggagagcggcggcggtccctccacttctctaccagatctggccaaaggggaggaggcgaacaatggtggcagcagtagagggagcagtggcagtggtggcgactggcaggtggctccgacggtagcaacagagaggtagctctggcggcagctcattctccaagatccccggcaagcttgtccatggctgctagggttgctagatgtgaaattttttatgtgtttgtttttcgggttctcttacagatgatttgatccatttgatgcacatttcgtgtttgatatgtggaaatggatagctgcatgcgtgttaatatttaccattttttttccccaaaatccatcttaacgtggtgaaccatcccttaaggtaaagccttttttttaaaacccttaatccttgccgctgggcttaggttcccgcttagaaaaatgaattggccgtggtagttggcatccgctagtgaaaatagtgcatattcactggccattagtcactgaacgcacgcccggccgtttgagaaaacttaaaatgaccgtcagaaaattttattttatagttatgttttacaccactactagaaaaaccggctttagcgacgttggccatttatttttccaggcgggtagacacctaaaacaagcaacaccgcttacgaagccagctaccggggccatggttgctttccgcctgggaagatagttctttgcaggcggacccccttagcaagccgcctgcaaagcttaaacttcgcatgcggaccacataagggaccacctgcgattattccaggcggtctatttatgtggtccgcctgcgaagctccatcttcctaggcgcccattttttgccgcctacaaaactcaatcgtggccacacaatttaccgcctgtaaaaatctggccgactatatagtcttgttcctccctgagctcctgttcatacccgacgattttctctctcttaaaggcaccaaaatataggggggaggttttgaacttcaaatcttcgagggatttttctaaagtggttagatctatgcctttgcactctatatacataatttttttgtaatttatacccccttttgactatggatctatgcatgcaaaatagtgaggggaaaagctagctcccatgattgttttttttttggtaatttgcttttgatatgtgtgctagatttatgtgtgtttcttgatgctatggggttctctcatcctctagtgattttataatgtaatataatggactaaattatatactttgctcttatgtatttgcctagatctagataggagagagaaaacttcatgacatgaagaaactaattattatgtttaatttcgtatattatgatcttgttggatttatgtgtaatctttgatatcatgtggtcgtcccatcctctagttggttaaatataatatgttaacttcaaaagtgttacatgtttgttaaatttttttattaatataaattttgcagagatatttgttacaaatatatttgttaatttttttgattaaataaattttgcagagacatggacaggctcgaatggatgtatcattggccgatgtttttatcgccatatatggaacaagtgtctaaatttattgatattgccaaggagtacgttgagaaggagaataggaggggtatttattgtccatgtgctaaatgtaagaatgaaaaagtgtgggaaaatctgacgaaggtaaatgagcacttagtcactcgtggatttatggagaattacgttatatggacacatcatggcgaaaatgatgaagttagactcgttgaagaagaatatgaaccggttgttgaagacatggattgcacggatggttgtgctgaagacaatattgatctggaggaattgttatgccatgtagaacctgagttgcttgttgggtcggctagaggtttagataatttcgaagctttgaagaagacaacaaaggatattctatatgatgagtcaaagggctgtcacagtgacttctcaattttacggtcagttcttgaacttatgaggttgaaggcgagatttggatggtctgatagtagcttcgacagtcttctacaacttttgtagatcatgcttccgaggcctaacttgttgccatcgaacacatatcaagcgaagaaatcatatgtcccttatcccttggtgtggagaagattcatgcatgtgtaaaccactgcatactgtacagaaaagagtacgcctcgttggttaaatgcccaacttgcggtgctagccggtacaaatcaaacagcaatacctgcctagaagaggatgacacaatcggagagactaagagaaaaatcccgcagcttgtgatgtggtaccttcctgtgaaagaccgcatcaagcggttgtactcaaaccctcgagatgcggaactaatgcgatggcatcaaga

SEQ ID NO: 20316 - DNA, 24945 bp, Oryza sativa
cattgatgtatttctcgaaccactgttggaagatatggcagatttatggcatgaggggttgaaagtgtgggatgagtacttacgacaacacttcacagtgaaggccatcattttcgttaccatttatgattaccccgccatgttttcagtttcaaggcagatcaaaggtaaaactggatgtgtgaatatgcttgaatggaacgtactataggtacctcccaggttccaacaagcttgtttacttgaggcaccggcagtttctacccaagggtcataagtttcgcaagatgaaagcagagtttgatggtactgaagagaatgattctgcaccgaaagttacacccggggataaagtatgtgaggcaacagagaaaatagaatgcgtgtttggaaaagggactaagaaaaaatcaaaggggacaaagcgtaagaaaacatcaaagggggcaaagcagaagaaagaagatcgcaagcccccttccccattcaagaagcattctatattctttaagtacctgccgtactggaaagatctggagattcgtcatgccaaagatgttatgcatcaagagaagaatatattcgacaacgtaattggtacattgttggacataccacacaaaactaaactaaggatggtttgcaatcacggtccgacctagtcgaaatgggaattagggaggagctacacccgcaagaaggagaaaagactggcaaagtttatcttcctccagcctatttcacactaactccagatgagaagaaggcatttttcaaatctctctgtgatgtgaaagtgcccataggtttctcatcaaacatcagacgactagtgtcaatgaaagatttgtcggtatctggttataattcacacgactgtcatgtcttgctcaccgtgtttctcgcagttgctattcgggccattcaacgggaacatttaaagattgctatcacaaagatgtgctactttttcaatgctatctcccagaaagtcatcgatcctgaagagttagcacttcttcgtacattcccacatgagatccaatgccaacttgaaatgtatttccctccatcattctttaatatgatggagcacctcatggttcacatcgtgccccaaattgttgccctcggcccgttgtatctacatcaaatgtggtcctatgagcgttacatggctgattgaagggctatgtatggaatcgcgcccatccggagggatcaatggttgaggggtacaatacagaagaggtggtcgagtgttgtattgattacctaaaagatggaaagacaatcggaatacctgtacctcgacacgagggaaggttgactggtagggggacggtagggaagaaaagattcgtcgaccttgaatacaaatttgtttcagaagctcacttcagtgttcttcatcagcttgctatcgttgagccttacatcgatcaacacctcgaacttctcagatctgaaaataagggacgcacggatgattggatgataaaagaacacaagcgccgcttcgtagattggttgcaagaactaaatttacctgatggagataccaccgaggaaattacaatgaagcggttctcatgtggtcaatcaagtactgtaaattcctagcagggatatgatattaatggatacacctttagtacaagagcccgagatactaagacagttacacagaacagcggagtccgagttgaagcaatagattcactaggggaaaaacagacatactttaggtttattgaagaaatatgggaaatcgactatggactcacaattcaattccccatttttaagtgccagtgggtaaaacatcttaacggtgtcatcattgataagtttggtcttactgttgttgaccttgggaatgtgcgtcacaaggatgactcctgggtactcgccgatcgcgtggcacaagtgttctatgtgacagaccctgcaaatttgaagaaagaaatagttttatccggaaagcaaaagatattatgagtggatgggattcaagatgttgatgaatacaaccagtatgatagtatgcccctttatactcaatttcttcaaaaaattaagcttgtggaggaatctatcgacagtaccatcaagccatacatgctagaggatggagttgggaaaaaggtgaaagggtagcgtatgcatgcaatgatataatgtatttctgaatttttttatgtaatggtgacatgtaacggctatttgtactcactttgcttactactatgcatttaacatttttaagtgcaatagcctgcttgcaacattaattaataccaacatttattaagtgcaaaaacccaccaatatgcagaagaaattacactttataggtggaaaaaattctcctcaattttctgtaacaaactattagtataaaaaattacactttcaaataatttttaatggtttataattggaagttacaaactattagttttgaaataatttatatattcgaattcacaacactgttaaaaaattctccaagtgttgaaattatcttttcaagcggccggtccgcctgggaaatttatataaagatcacataggaattatcttcgcaggcggaccggccgcctgcgaagatttgcaaaacacatcttcgcaggcggataggccgcctgcgaagatatttggggattaacttcacaggcggtcggcccgcctgcgaagataggaggcctataaaagcgcgaccaccccggcgccaaattctcaaagtccaggcgggaaccctagaaaatttggcgccgttaggctaccgaaatttttggtgcttccgaccgccggctctcatccgaccgccgcctctcctccgaccgccgcctcccttgccggcgccgaccgcctgctaggccaccaccgctgggcgccgcctcgtaaccgtttggccgccggcgccgcccatctcctcgagccgggccgcacgccgcgacctctccatccggccgggccggcgcggcctcctccccggccagcgccgcctcgtcctccagcgccgccacccgcggctagcgccgcctctcctccggccggcgcggcctcctagctacgcccgggccggccgccgccgtgtccactcgaagctcgcggccgccgtccactccaacctcatgccgcctctcctccggccgccgcctccatcaatctccggccggcgcgcctcctctcctccggccggccgccaccatctctccgcgcaactcggccgatcgtcgtcatccccgactcctcatccacgactctgtgcatgtgtgtgtggcatatatatgtgtgtgtgatgatagtggctgacatgtggggccgggtttgttttttttttggatgagatgtggctatgtgctatgtgctcatacatgtgaatggggaaatgtgggttttgtttgtgatatataagggtgaattttgtatgcaggatgaatgtgttgaatgtaggaaatgtcggtttcgtttcgttcaattttaattaaataacatgttgggaagatattttcaatttttttatatgactttcagtaaatgcttgtatatgacattttcgttatatgctttcatatgacattgtccgagtagatagtgcttttatatgacattttcgggccatttcggttgatatgacatttagatagtgcttttatatgacattttcgttaatgctaaacgatggtgctttgatatgacatttagatagtgcttttatatgacatttctgttaatgctaaatgatggtgctttgatatgagatttcggttatatgacattgtccgagtggtagatatttttaatttttttatatgactttgagttagtaataaattcaaattcttttatatgtacgcacattaaataatttttattgtcattcctataatatagaacgatggcagatagtgcgaaacgagatgaggataaggcctctcctccggcatcacaggctattgtggttgcttcgcaaccgaacgtggaggcgtcaacggctattgtggttgcttcgcaaccgaccaggccaccggccgatgggtctagcagtgacgactctgacgagcccggcaaatattcctcgccaagtgacccacatccaagccctaaacggcggagaaaagttgatggccaacaagacgacgccgattatgtcccccttaagaaagcggtgggtcttccgtcatattcgtttgagttgctaattcattgtttgacttgaaagtactaattcatgatttttgtaggaaaaggccccatgcagatctagacgccgagccgaaaaatccacccaaatcgaagacgtcccagctacgacctctgacaccaagaataaaccaaagtctcctaaaaggagaaagggcgagaggagcatcaacaagataaacaacggggtgtacgtcatcacccacataagtcccaaaggggagcctctcgctcccgccactgcacgcgcaaagttcagctcacagtgtggggtaattgtaagggacaagatcctaatcacttacaaggactgggataaagtgccagcaggggacaagaaacttctgtaggatgagataaagaaaaggttccagttccctgacggatctgaagcaatggcaaggaattgcgcattgcaaacaatggacaaggcatggcgtgggtggaaaaacactttaaacagaaactacgtgaagaagggcaagacaccatacaagaaatatgggaaaataacgctgtcgcaatgggacgaattcgttaagttcaagacctccaaggaagaaatggagaagagtaaagtgatgtccgacttggcgaagcgtaacaaatggcaccatcgactaggttccggtggttacgcacccaagatagaacaatggaataaagaggaggaggaaatgaagaggatgggggttccggtgcccatggaaaactggaacgtacgatcgaagcaatggatgaaagctagaacaccgaagatcactgcggaaggcaaagtgcaatttgaagaccctgagctgcaggtagttgccgacaagatagatgatctatcaaccaaggaaaagaaaggagaattcactccacagagggagaaggatgtgctaagccaggcactggggaaccgtgagcacggaggctgggttagaggcgtatcctctaagctgagttggaaagaaggcttcaaacaggacgcctcctcgtaaaagaaacatgacgcctacaaggaaaagttgagggacgaggggggtaagcggtttgaacaagaaatgatagatttctgcatgaaatattctattccactacaggatcccaaagaaccggagccagaatatccgttcgaggatttacaagagactaaaccttgccggttgcacatcccaattggacgcgctaggaggacacttgaggcggcgaagggaattgctattcctggcagaaactaccatggcggatttattgaatctgcatatgcgaaagtgcagccgcaagaggtgaatccagggttcgagtcgtacgacctagacatcccaacacatgatggaatcacagtacttggggatgtggtcgaccttgtcattctatggcacaaaaagaatatcatatttagcaatgtcgccgctggtcctggaaaaccaccgagacctcctaagcatcgatcgttgaaggacaaggcggaagaggctaagatacctctgccaactaaagggcctgacacacctgacttgccacataaagaacatgaggtgcaaagtgtaccggatgtcgaagaaccagatgtggctctaccagatgtgcaagttctttcatccatcggtgtatagctagaagacgtaccaacattgcaatgggatgaatcagaaccgaccatccatgaggacccaaatcctacaagggaccctgttgaggagaccactgttgaagccacggacaaagataagtccgaagtgcctagggtgctcagaagccacgaccccaagaaaaaggatgaacacaaggagaaatacatggtaagcgtcttcagagggggcaaggaaagagcactactaagaggggatgatgcgaaaaaggccgctgcactatctggaccgaaatacatctggactgaagattgtctagaaaaatttgaacttgacaaagcttttctgccggattgggcacttgatgaggctccatgggagatgaaaaggctccatacatggtacatggatgccagcaagaaaggcctaactaacataactattcagtcaccggcaaatgtcttcgccggcgaaggattcttctggcttgatttcagtgacctacacgccatctatcgtcgggataagatggacgtaaactacgttgctgcttggtgcttgtgagtacgagtgttgtatttattgcacgaataagtatgtgatcaattattaacgaaatgcttttataggatgcaatccatgcctggagaacctatcggatttctgtatccaacaaggatctgtcaaacttagcatactgtcacattatcaccaaattccgaacagctcaagggcaagactcctgcagagatagcggaatacaagaagagcttgcacaagcaaaagatgactacggtcacacagtacatcggacgagccttcttgcacttccaaaataagagagtcatcaaggccgcgtacaactttaagtaagtcaagtagaattcattgcacatacctatgttaattcatatgtgactaactgcatcgccattaatatgtagggatcaatacatatgtttccttatcgacccaaaggcaggcgtggtgacggtcctggacccccttgattattctcacacgatgtatagacattttctacaaatcttacaatagtaagtgattctcatacttgcatgcctactaatctagcaatagtaagtgattctcatacttgcatgcctactattaattctatacagtgcgtacaattactacaagttcaagggtggagaacagactaaaacaagggagaagctactagtacatacgtattggccggtacgtaatactaatatctcacttaatccggtacgtaatactaatatctcacttaatgtatttcaattgttttacaaatttcaaaatttaactatttccttcaatcacatgaagtgtcacaagcaacctaggggcactatcctctgcaggtattatgcatgcgaatacctccgggttaatgggaggtacagggttaatgcagaggatgtaagtctctcgactcaatgtacaagcctattgaaccactacccttatagatcgtactaatgttttctcgttctttcatgtttacagttgcctagaattgaacgtcgagaaggattcgatgatacaagcattaaaaatgtacaacaggacctctgccacttcatccaccgcgagtgttatcatgtcataggcaagtacttcgaccaagacagcatcctggctacaagcgatgaattcaaggcccttcgggagtggagtaacgcgatgccatgacgtgttcattagttacatacgacagtgtacaaatttttgtataatactttgaatgatactttgaatgcaatacatgtcagtattcaatgctcattagttactatcattaattatgaattaattaattaattgcaacattattgaaaaaaattattaatacaaaatttgcggctattttcaattcttggtgcttttttccctggcggccctatcctatcattgcgggcggcctatactaatcttcccacgcggctcgaactagctcccagccgcctgggaagaacatgttcccaagcggaccggccgcccgcctgggaagataatctatcttcacaggcgattgcctacaggcggaacgccggtccgcctgggaaggccattttggcccgcctgcaaataccatttttctagtagtgcactatagtatactcatagtacatactgccagtgtaacaaaggctgtgtttggaatcagttattcccaacatgaacggtgagcgcggaaaacgaaacgagccattagcgcgcgattaattaagtattagcgatttttttaaaaatatagatcaatatgattttttaagcaactttcgtatataatctttttataaaaaacacaccgtttagcagtttgaaaaacgtgcgcgtggaatacgatggagaggggctgattccaaacacagcctggcattttagtagtttcacaaaattaaaagggcattctcagcattccatcaagtcattatggccccgtacacagtgagccaatcgttctgatcccttcggtgtaaaggacgatggggaacagtcatagcaccctataaacattcacgggtctacattataacaattatagcaccctataaatacaccattgtctattcctaatctccatcacagagcagagaaactagctccagttggcattcaagctctctctccctctccttgctagctgctcatcaacaatttgctatacttcccatggctacttacagtagctctgcacttttcatcctcttcttgcttccaacattcctgagcatggctgccagcacctactatgatatatgtcctgtggagtgtggttgccctgaccaaaatgaggttaccatgcacttgtacctgcaccagtttgttgctggagcaaatcacccaaaccgcaatgaagaatttgtgatagcctcgagctatcctaatggattcggtacaacactcgttgatgactggtatttaacagctacaaccaatcccaatgataatatcgttgcacgtgtacaaggcatgcatgtccaggctggccaaagcaatgctaacatgtggtacacttcccacaacattgtgttccaggatgacaggttgaaatttatgctagcataactagatgtataatttaaatttccctgctatagtgttgagtaccttattgacttaattaattgttcaattgtatgcattgtcacttctataatcttctctgatatatatgaagctttatattttttatcaaaacaggtttaagggatccacacttcaggtgatggggattattgctgcaagcagtggtgagtggtctgttattggtggaactggagaattttcaatggcccatggcagtataaagttcacaacggacccaagctctaccagcgaggatgctgttcgagaacttaatattcgtgcaatctatactgcagataatccacaagctgtaagtagctttttattctgtccaatgttttcaaccatgtgtcaataaatataaatgaaatttttcatcaagctcttaatgcagaggttaggaatacctacccccgacacggtattaatgaaggggttacgatcttaatgatagcaggaattttaatattttattttttttcattgttcctatatagggtctacctatttatatagcctagctagtttttgttaatctaaacaaattttcgttgtagtcaccatgatattttagtggactacagcttgaataactgttattcatcttattatgtcataataagcatcttactttacttgttatatgaagaaaatgaaactgtgcatgtaatggcatgtataacagtaattcattttatgtcattatgttcaggctcgtggtacagcatcggtcgcaaatgctactcgtctgccatgaaaagaattgatggaaataatattgtggcgtctcaccactactgcagcgtcaagatatggtgttatcaatgttctttcctaccgcctttctctgtctgatcagttcaaggataatgtgtggccttctctggtggtattatatatcatcagtcctgaatagatgatcaattattttccagtttgctgttgtgtgtatgtggttttttattccttccatatgttatgtgaagtgtttgtccgcggaataatgaatgaaccaacgaattttatcttgtagagaattgaaatgactcgcctcaataatgttttacttgtatacggtcaaaaaaattccacatgatttgctcgtacagacactagtacacaaacatcacatagaggcctgccggaaccatatgtgccgatttgcttaacatcggagcctattaggtgtttcctgcttaccgaatcttttttttttctcgaacactctccttaccaaatccatttgggcgggatgcaattaaggccctgtttgggacagcttaagattctgattctgagaatctgctggttggtagccaatttctagagaagcttggtttttcaacttttgggttataattcatttccagattaagtaactacagattcctagaatctaggtgataatctggactgtttggtggagctagagattctgagagaagctgcagtagctagaaactcccccaaacaaacccttcaatacaaaagtagtatttgggcgggataaaaattaagaacctgcctgtaagatcccctccccaacagtcctcaattctcaataagtttcggataatatgtaagaatcggcacctagaacaaaactcctaataggtaccggctcataggtgccagctcatttaaagccggcacctattgatcatttcccacctccgcgggatggaaaaaaatatagaactagctccatggagcagatacagatgcttattctaaataaaaaccagtacctatagtatgagcgactacccgacgcctaccttatctacttgatcattcttgtgtccattcgtctctcctttacctccctctccctctccacctctcccttcctctccatctctcccatcacaggagacacctacccctgacacggcggccatcgacgtggtgactcgctccctctgtaagccgcttattcaccttcaccgtcgtccgttgcccccaccttacatcggcgggcgacaacaacccccccccccccgtctccccctctcgagaccaaccttcaccacattatccctctcctccctcacaatccctggccatgtggctgaccatggcgacctcgattcctcctcctcggccagtcggtgaaagcagggaggcccgaagctgtgcctcgctaacacattccctccacagtcttacatattcctccgggcaacctgccagtgtttggctaccgggtccggtggtggcctccgacggcaacgacctagatgagtattggattttccagtgagcagttgatttggggatttcttctagtcgatgtccttattggatttttgtgtttcaaaattatggtaaatagcataatcaaatgatatcggtatttgatttggatgattttgttcttgtcaaatgattttttgtgcaccggggagcaacttgaagcatcggctcgatttgagccgatgcatcgaccctatatttttgggtttattggatccatgccattgcaactaccatttattttgagtttgtcaattttgattgttcttgacctcgatatttcacaattttatattttatagttactaaaaataattaaattaagaacatatagtgccatggaaaattaataccatgttatttttttcactccaattttactaatgtgtaaagctttactataacttttagcttgaatatttgtaaatctttatatttgtgtaatgctttaccataatgtgcaatgctttactacaacgttgaaaccaagatcggcccctcgtcactcatgcaccatgaccacaccctcactttacattctcatcaaagataaagaaaatagtaacaagttcttttaacttgataaaccttagaacaaaatataaccttttttgtcaattatttattaacataccacgaatgttttaacatgcctcgatctatgggttgataggcagatagggtaataatccgggtgtcatcagactggagaaatgtatcacgccacacaattgctcagggagcaagttctctttattacctggttaattgagagctggacaaaatctttttacgcacttgagcctacattttcctctcacgtcgccctcccccaggggtggctcgcgaggcgacgacccgaccgctccctctcccccaccttcatcctccacatcgccaccaccccgagtggccgccggcaaagccgtgcggccgcaaggacagcggcggcggggcttctcgcttctcgctgacctcgtgctcagacagctggggagccgctcagggcggtggcgacggtgattgctagatccgcgctgctcctgcctgatctggcgaggagtcagctggcgacggggacggcgatggtggtggggatggcgacggcgacggtaagggcgagctgcgccgggctgcggaggccgatgacggcggggatggcgaccgcagagaggcggcggtggtggagaccgtggatcgggcgacggcggccggtgggaggagccgtggcgcatgggcgacgccagcagtgggaggccggtgtcacgcccagaaatttagcccaagtttccagactatttcgtgtattaaatccctgtccaggaccagccagggtacacaaaacgacaagtaataaacagttccaaacgtaaataaagcgtaaaatacttacagaagaggcacttagtcctcacaccgaaacaaaagcagcagcagcggaaaaaggcgatcctagcggggtttcagctccactccacaggcaaaactcaactggggtctgagccttggtcttctaacttcgtcttcagctcagaagcactacacttctgaaaaggggtaataatagcaagactgagtacaaccaccgtacccaacaagccacaccaacgatgcagacgtgcaaggggatacaaggaggggtttgtggctatttgcataaaggcggttgtaaaacattttattgagcaaaacagtaaaacggttgagtaattaaagtaatattaaatctccactgatcaacgctacaccacgttgaacaggcccaaccaacccacctgaactacagtgcattgggtcgatttattaagatgggactaatcacggtgaatctggtcgaccgcccataaccgcgggcacggctattcgaatagttttactctgatcagaggtgtacaactgtacccacaagacacagcctcccgacacgtttccgtgcgccgacatgccaccacgacataccggaaagaggccgtgacaggacccttcgcataaccccctctaaccaagcacaccacacctcaggtttcacccccactcctcgcaaggcagcgggcagtcccttctcgtgcctaggtgaatccggaagccgcataggccgtcgcagggcccatccaaactccatcacgcccacccttgcctggatgcgttggctagaggaaagctacactacaagcccagccgttgcccacgctggcttgtggtaagtacgataagttcttccagggcatcccgcgaaccggtccttaactgccatgggtgcgaccagcaaaaccatgcacccacagcccaccattcagtcgcattttagttggataattacgaccatgaagcatggccagatgtctcgagcacgcagctcattctgatattaaaaggtctaatactgtaattgtcctatcaactgagctagtggtaattaagcatggctaagcatatagttctagctaggtcatcaaagtaacacaagctaggcgatttattacccatggttgacaaaggacagatatcaagtaaacatggcacaagcgagcagataggtaaaaccctgaccccatgtaattagcaaaacatgcatatttatttgcaaacagtaaaacatttgtaaattgggatcaacatgctcaaggggaatgtgtgacttgccttgcttcttcactttgatcttccgaactcttatccttgcgaccgcgatcttccgaaacgacggattctacacgctggcacgcaaaacgaggaaaaactctaataaaaaccaaggaaatagtatataaaaagtaaacaaacatgtagagctcaattttagatgaattttgcaagttgaatggcccaatttggagttcgtatgaattagatatgaattttagaagttttgagccatttaaatgaattcttagaattaaactcgatttattgcgcaattattatttatttttccaaaggaaaagagggttgttgacgtcatcaaaggggaggggcggcgccggcaagcgggccccaccggtcagcggcacaagggcgtcggtccaccgtggaccgggaccaccgaggcggcccaccgccggtccacgggaaccgacggcccggatcggcccaaagccgatcgaacggccacgaggcggcgcggctggggcacggtgtcacaccctaaaaatcctaaatatataaattgttgtttaattggaattattagaatttattttaaaagcctagaagagaagatctaattttaattaataaattccaatataaaatggggccagataaaatttcattaaatactttgcttaattctataattcctagatttttctgggatttatttgagctaaggaagtatttttaataaatggaattacatttaagaaataatttaaattgaaaaaggttttaaaagtcttcttttggctttgggccgaaagtcggcccaaaaccgctctctctctcctcggcccaagtcggcccagtccgccgcgcgcgcgcgcgtccgcccgctgacaggtggggcccacctgtcagggtcgtcgtctacctccagccgccgccgcccgaaaccctagtttcgcgccgccgccgttcctttccaaattcggtcgatcctttccttctccggccgaattgatagagggaaacaatctccgggatctcctctaccttttctcttttggaatcatcggctaattctttttggaaattgttggattcgagttcgaatcggattcgtctctttcctccgaaccctaaaccttccttctcgtcgccagccgccgtgggccttcgccgtcgcctccgagcccctttaaaaggttccccggtgtctcctctatccgccgccactctcgccttcgcctctcgtcgccggaagagttctagcgccgggcaacctagcgccgccgtcgccgccgtcgctccagccgtgcgccgccgccgtctcggtcgtcgtcatcgctcgggaaggccaccgtcgtgatcgccaagtcgccgccattctcgtccgctccttcgccgccgccgaagaccgccggagcaccgtcgccgccgtcaacccgaagtttgccgccgcttcctcctcgtcgccgtcgccgtccgttcctcttccgccgtcgctttggtcgccggtgagttcgccgtgccgtccgctacccgttggtgccctccgttcgtgccaaagcgccgccgttcgccggtgagcttgcgccgtccgagccgtccgagccgccgagccgccgccaccggtggtgatgtcatcgccgacgtcatcgtcgccctctcccgtgagccggtcgtggaccgatcgatctcggccgtccgttttggatcaagtcgatctcggccgtccgttcgcgtgaaccgccgccgtgcgcccggtccaccgaaaccctagcccgctgacgcaataaatccctttttccttttcaaaaataattcattattgcgtcataattcaattaaaatcaatataagtgttttaatccgattaaatcttcaaaaattcataactaattcatcttagctcggatttagttggttcaagtctgtaaatttttctaaaattgagatctacatattaaaaatatccacatgtaccgttcatgcttgtttatgtgctgttttggtgattttgctcttttctgcttagatttcgtcgtttccggagagtccgttttcgccggagaagagtttgaagagttccaaggccagcaaggcaagtcacacagatcccaaacaaccctttgagaatgttgatcccgtttaaagctattgtttctattcaactattgcatttattttcgaatgtcattgggtggaattaacctattcattgttatagcccttttgttcttgattactttattccttgataccttgggttattataacttgactagttgggctttatatattggttcagctagatattaggtataattgcttagccctgcttagaaacattagcacatcatcgggataacttatgactcactattatttaatgatggcttaatgatagttcacgatggtcaatcgtgattgattaattaattaatgtgccaactaaaaccagataatggtgggttgtgagcacatggttttgatggtcgtgcgcgtgacaattaagaaccggttcacgagtttcggttgtgaaacattaaccgtgccaaccacaagccagcgtgggcaacggctttatcctttgtatagcatggttcattgcggggcaccagactgagaagtgacggagataagcccacaggggtcgctggggagtccatgccttgtttataagggggtgattatgatccaggaaggtgcgctgcagtggattgtgttatgcaaggggtattgtcacaactcctttccgaggtaccgtggtggtattgaggcacatggtgacatgatgtggggttgtgtcttgtgggtacagtggtacacctctgatcagagtaaaactattcgaatagccgtgcccgcggttatgggcgggtctaacaatgtctttcgtgattagtctcacccttctcaccatagtaaatgatgctataactggtaataatttgattagctcctggtttggaatggtatattcctggtttggagatagaactgtgcagccgggatggttgttcagaatggttgggcctatacaacagggtatgttgtgtagcgttggattaatattgtttaatacttaactgttttattaaattctgaaatgtttgctaaatgctgcttttgcaaatgaaaccctattatgccatcctttattatcctgtgcacttgcatatttgctgcgtggcttgctgagtatgtcatatactcaccttgcaatcattcatcagaggaagagttctacaatgatgctgatggtgtggaggattaggtgtagccttggtcaagctgcctgtggagtggagccgtctacgccgtttatttttttttccgctgcttagatctttattgattgagaggaactatctacctctgtaatgacattttattcgcttattaattagagtaataattgtactctattatcaatttgttattgtgtgcctcggctgattcctggacgagggttcacacacatgtaagcgtttggaattttggatagaaattccgggcgtgacacacgggcacggcacaaagccggcctagctgagccatggcgcggcggtggcgcggtctccggcgacggcgaccgacgggcggcgcgggagaggcggcacgcacgggagatcgacgcgacgcgacaagggggggtccgggcggcccaggcgagcggggcggcagcgcacggccaggtggacgccggcggcggccaccggcgcggcagcgcgcatgggagacagaggagggatgcaaggagggagaggaggggctcaccaaggacgcggcgacggagggagcggccgcggagggaggcggtggcgctccacggggcgaagacgacggcggcgattcagcggtctccaacgaaggtggaggagcggccggggtacgggggagcgcggcgaacgcagtagaggcggtggcgtggcttggtggtggctagggcggcggtggcgcgctgccggagtcggcaaagtggcggtggagctcgggttcacggtggaatcggtgcccgggtggtttattgcggaagcggagcggtggacgggatgcggcaaagcgcggcgaggccggcgatgcaagcggcgcggcacggggacggcggtagcggcggcagcggccggctggagtcggcggcttcggtggaaggaggtggtgcgcgtggcgacggtgcttcggaggcggggaggggaaatggagcggacgccggggtgtggcacgacgcggcgaagccgctggtggcggtcacgcggaacgacggtggtgggagcggctgtggtgaccggctggagggtcgtcggcgagcggcggcgggaggtgcgacggtggcggggtggttttcgtgcacgggagggctcgggagagaggggaaaatggagagggaggtgtggggaatgtttttataggggaggggaggcgggatcgagcccgagagaggtagaaaccggccggcaacgtgggaggagagagagatgcgggaggcggcgacgtggccggattttgcgggggaagagtggggggaaacggcgcggacgtgggcgacgaccgcgtccacgcacgcgcgggagagggagtcgcgcgggagaggcggcgacgtgggaggatttggcggccatggcggcggttggggatggagctggaggtaggagaagaagatgacaggtggggcctcgggtcccacctgtcggggagagagaggggaaaacgggcgagggaggtaaagcagacttgagagagagagagagccgtgcgggccgagggaggaggccggcccgagagggagagataaggggcacgcgggccgcgggagagaaaggagggattgggccgaaaaggggcccaaagagaggaaggaggatttttttttctttttattttaattgatgcaatgatttttgtgctattaaaactatttctcgagctccgaaaattcacggaaaattccggagagtacattagggcacaaagaatattacaaaatattcccggccaaagattttttttaaaggaaattttaatttcctctataatttcacttgattaaattgatttaacttttaatataatttctagaaatgcattattaattgatttttaatcccgaacgaaaatcggggtgttacagccggcgaggtgcacggtgaggtaactcagctatccagcatcgtgtggtgcggcagagtcagcgtcggcggggaggccaccggtggtttgacggtgctgcgggcatggtggtatctgtaacgatggcgagagcacggtgatggagggggcatcggcgtggcgtggagggtggcaaggcgatgacgggacggtttgatggcgaggatgtgggcaattagacaatgacggtttcggcggttgcactgctaaggggagtgctgtggttcttcgatgggccctattctggacattgtcctcttgcgatagcgcctttgccgacaaaagatggccacgtcgagcaggctagtgtggggagagaggagatccattgtcctctctcatcctctccccatccaacccaactgcatggatggagctggagcgcatcgggggggggggggaggtcatgccccttcttgacggccgaccaacagagaggcgtcgcccgtggtggccacgcgttgaaggttttcgaaaggtggttgcagcaggagtgtgacaggaaactttcttgggaggggtgaaataattatgggcgaaagctttgccttcggggcagcaacgatgatgcctatgggtgccgttttcctctagcgttgctgcataatctcgtttctcccagttactttcttctcgtttctcccggttactttcttcaagtgaaaatcatgtcctgactccctagagcaaaaggcagcggcgctttcggtgtccttcccttattggatgcatcacttcaaagatctttcgttcttgttttcgctctcatggcaggtgttgtcgtagacgcgtgacgtggttgttttttttcttgactatagtcttccaggactagacttgtatttttatcctactttatcaatacataaaactcgcactatcttgtgcgattagttttaaaaaaataagagctggacatttctatcttgccaaaaagacatttatttctggattgtttgatttactattttttggatggtttggatcttatgcaagcccaccatgttgctctggatccttgagggaaatattatgctaatttggctgattgtgccgccactaaaatgtccatatatgcataaaagaaatgcatggatcggcttcttatcaagcctgtagagaggaaaacaccttgtgcgtgtaagcaaggcgatatatacttagtattctgccagagaaaaacagttttaatggttgtccatgacttcacggacaaaagaagaatgttttcaactggaagatatatgtttctagactatcgaaaattgtaaaaaaataatttctataataattcttttgttcgtttggtcgggcaaggtgtgcacattggaatggacaacttgtaatgaactacgtacaaatgtagaatactcatgtgtactaggaaaaaagacaaatatattgtttcttcagtaaaggctagctgggcactggtggccattgtctttgctttctaaaattattttcttcatttcacgaggatttggaattgatgaacacatcggcctctttgtgtccgtaggcagagtattcttattaatctttcgctaatatatatgctagcacaaaaatgtccgtatgcattaaaaaaacccagcgttaattgcaagcccttagtgagttagttgatagctcactgaaattatactgtgagctagttcaacattctgcaattaatgtaatacaggacaattttaattgattagttatgacttatggggaattgatttttttattcggtcacgatatggagaattatactactactacaaccggccatcatgatacgaactggccatgtcgtgctggccgtaattcggtcacgtatcatgaaccagacatggccttctcatcagaccagccagcacgacatggtttacatgtaacaggaacgctatttagcgatcagccgccgcgcgagcgcggcgcggcacgtggcacgcgagacgggggcgggacgcgctgggataggggacacgtgtccccgtttcggtttttcttttttttttactttagttttcaccttttttggtttttcttttttttctttttttatacgtacgatataaagtttgtatatgtgtatgtaaagtttgtatgcatacgtatgcaaacttcgtatacgtgtatatatacgtatatacacaaagtttgtatacgtgatgtattttctagttttgtcaaatttttaatatgtagtacatgtgtataaagtttgtatacatcgtatgcaaatgttaatataccacacatataaactatgtatacatcgtatatgaactttgtatacgtgtatatatttttttatacatataaaaatatatttttatagtagcagtagcagtgtagcagtaagtactagtgtgtgctgtgcagacgactaaacgcacgcccatctgcgcattagcaggcccatatttgtaacttcagctggcacggaaaacgtgaaaaccgaactgaactggtacttagatatatccacacttaaataggacatcttattactcacatatagccactcttaaatgggacatctcataagaaaggatagagcttatatatggaacgaagatttagagcttgattcaacccgaacaataattaatgtacgcacgctgtcatgatgaaacaaattaagaataacttgacaaattttctcggggaggcacaaattttcaacaggcttttctattcttctaattagccatatcacctaataattacttgacccagtattaccttatatacattgctagcaaaccaattcaacctaggactcaactaaggtacctagatatcaagcatatggcatacacgtacacatgtcatatggggattctaagttaatctgacttccctaaagataaaagtttctctcacccatatacatgtgcatgtcatacatatgtatgcaccataaatatgcatctaaaataattaaacaataacattaactctaacatatataagatataattttgtagctggtgacttttttcattcgcatatatagtttacatgcctatatgtatgccttataaatctattaccagaaaataaacttttagatttttcatatatgacttcaaataaagataaactttatatcaaagtttgttctagatattcatagatcttacgactttttatttaacaaccatttgaaataaagttattcagagatccaaattattacaaaaagagtatactttagcataatgatttgccccaaaaagattgtagctttagatatggggtccactagacttctttattgtttcttcttttttatcattttctccttcagttggaccggagtttctactctctccttattttctcgacgacacttcctcaattttctatcgccactcctgtagccaatctagggtgcagcttgggggcagctagcccaaaagaccatgcaagcctccgatggagccgagcatgcaaaccacattaataaagagcatactatagtcttttctcgaccatgctaatatagctcaaccaagcaaaatctacactctttaaaatggttttacatttttagaggaggattgttaggagaaccgcctgccgcctgaaatattaacatagcacatgcaattttgtagtcagttcgcttgtgaaattcttttttagatgaccaaacaattatagaaaattcattttaagtttagttgatttgaaccaaagttctttcagtgatcctacaatattttcatatgtttgttcagttatgtcaagttgccttatataacttagcatcagagaaactaaaaactataacaaagaaaatattgtaagaatatttggttcatgtcaattggacttaaaactaattttatatgaattttcaaagtttggacttcctaacaaaccacatgcgagaattaccctatttacaaaaacatagatgtaaaagcttgtaacaaatacttgggcacacaaacaatctcaactgaaagaatattcaacaggtctcatcaagctctagaattgagactgaaaaactgaaagttatttctataaatagatttaacagcttataacggatattttagccactaaattatctaaaaaaagactttcaactataaaattgtagattttgttgagagctataacattcatatgaaagagttattacatttttctcttaaaaatatattgattgctccaaatttagtctagttccttaagacaaccacttgtgaaaatcaatttctacaaacagtttcatacacatacaaatcaatagaacataagccgaatcaatagaactacacatacaaatctcaccctattttcacaattccggtttttcatgtggttttacactatatatggccatctcaccactatcacaagagagttttcttatagtttgacaataaaacataagccgaagcatctgctcaaacagttatttatagtgctaaatttttctaaaacgttcatgttgccaccacacaaaatcaatttgtagcagaatatatgtatcattccaattgaaattaaacatgcatcattcgcactacggccttatagtacataacatgttttaataaggaaataaaaatatctatggggaatattgatctgtttagaacgaaacttcacttatttattctcatgagtcatgagatccgcagagaacatatatatcaaacaatacacataacaacgatgataaactgaaatatttttatacaaatacaaacaaacgtgctttattttcatgcttgcaccaatagcatgagacatgacatcccatttctgaagaattctcgctgttgtcccgtgtcatggctgataaagagcatttagaagcacacacaacatgcatcaatccacacattattttcatccccggtggtttgcattttcttgtccgcatcgtttgctggttgcattattcagcctggcctgttgtacactttggagtgatcaatgtatcatgaacctgaacaaacagtcaaaatttgttaacgttaatactgttatcagatgaaaatgtcgcatttaatacccatacagcatcgatgtagctagtattgaccctagttgcctatcgttctgtgagttctaaagtgcatacaactcgattgttgctatcactcaattcaaactgccaaatagtatactctttgtatatatataaaatagagtaaagtccatcaccggtccctaaacttggaccgctgtgtcatcccggtccctaaactcgcaaatcgaccgttcatgtcctcaaacttgttcgactgtatcatcccggtccctaaacatgcagttcactcgtttaggtcctccaacttgttcagttgtgccaccccggtccctaaacaggacggtctaaaaactttatatcaaaaaataattcataactttttcatgttaactctaatgaagacaaactttatattaaaattgtagcccttcgcgacctacaactttgtagttgaaaagttttttaactaaaactgtttagggtcccaaaatattgttgcatgtttatagattttgtaattttaattttaaaattacattttgggacaaaaaatgacttaaaataaaaaaaaattcaactataaagttgtagatcgcgtcgcggctacaagtttgatataaagtttatcttcattagagttcacatgaaaaagttatgaactatttttaaatataaagtatttagaccgtcctatttgacccagatgatattcaaatccaattttagagaccggggtgacatagctgaacaagttgcaggacctaaacgagtgatctgcaagtttagggaccgggatgacacagtcaaacaagtttgaggacctgaacggtcgatttacgagtgtagggaccggaatgacacaacgatataagtttagggacctgtgatagactttactcaatagattattcaagtttgtaatagttaatactcaattaaacatgtgctaatattttttcttgttttgtgtgtcacagaacattctggttggttatgcttttcaaaatggaacat

SEQ ID NO: 20317 - DNA, 2554 bp, Oryza sativa
aatgaatggattcatgaagaaatatacctgctggaccaagcatggagagcaagaggcgcatgatgtcgtagctgaagaagtattggatcaggatgtagagaacaccaccgtagcttgagaaggcatgttcgtaccttctcctttaggtggagagaccatagatttggacactcaatgtctatctacaatgttgcatgacattgaagatgcagaggacaacgacagagattttgagaagtttagtaagttggtggaagattgtcagatgccgttgtatgatggatgcaagtcgaagcatagcaagttgtcatgcgtgttggaactcatgaagcttaaggctaataatggctggtcggacaagagttttacagaacttcttgaggtgttaaaggatctgttgccagaggggaacaatttaccgcagacgacatatgaagcgaagcaagtattatgtccgttgggcctggaggtcagaagaattcatgcatgtccgaacgactgcattttgtattacaaggaatacgctaacttggatgtctgccctatctgtgaggcatcaagatacaaaagagcaaagagtgaattgtgaaggaagtaagtcaaagaggggaggcccagcaaaggtggtgtggtatcaagcgaggcacatcgcctactgcaacagcggaatgagcacccgcatcggctgggcaccgcagggtacatcggcaaggaggcaatatgggcccaagaagatgcagccgctgcagcagcgaatgtccctgccccgttttcagacatccctgaacaaagagctcgcaactgggcgcgggcaaggggtaaggtcaacccggacggctctgtcacatttgagaacaaaagtgatgccgtcgtcaatcaggaactggtgagttcactacttaacctaactaatttccgttcgtataaagtacaagttcgtgtaaacgactattttcttttgtagttgggcttgattgctgaacaagcttcacaaagcgaggttgagtccgcgccgaggaggcgcgaagatgacatcctcacaaaggcgctcggaaccaaagaacatcctggccgaactcggggaattggtagcgatgtgccctggaagcatggactccctcagtacagttcccaatacaggaaatggaaagtctccaaggaagagagggacgctcgttgaaggccgaacttaaggttgaggtcattcaagaactagaagctagcatgaatgcaagggtggaagaaagggttaacaaggtcctcgccgacatgaatataccccgagtcacaacacctgctgtgcaaccaactcctcgtgcacaacacgacgcgagtccgtcacagcataggagtagttgtgcatccacagaggtgccggcccctggtctcccgatcgcaccactagctgcagtggatcacatcgaggtaattgttgttatccgatccatatgtaataaaagacatttacacgttccaatattaaattcaaactttcaccttatgcagggtgcagcacagtgtgtcatactagcgagagtccacccaacttttgctcctaaagtcgctgagggcatggctttcaagccctcggttacagacaaggtccacggcgcagacctgctagctaggtatgccaaggtgtccatcgatacagtaaaggacacctggtcaggctatccgctgcccgtgcccccaaatgatgaactcatgactttgggcgatgcgcgcaagacgttcatacaatggcccaaagaagacatagttgtgaagatgactcctcgtccaagtcgaccgacggagcttacacctcccaagtctaagctatcaattgaggctccccgtggaccggcattgtcagtacctcattctcccggtggagctgatatggacttggcagatatagctcaaagcttggctccaataaagaccacaagaaaggccgatagctccccaccacttgtcaagggccagaagcgtgaacgcggcaaggggaaggtcggggagtggcgccggagccaaaaggggcaaggctgcgacgtcgatgccggtgagcaaagcggggaaggtcgtgagggcgccagcccaatttgagctaggcatgccattggtggaggacaatgtgttagccgtgatgggtattgcttgccgagagctacataagcaatacatggagctaagcaatgccaagcagaaaatgagagagtcatccatagttggacgtcgaccaccagccgttcctatcgtcgcctgcctatataactataggctttgatgacctcttcgaccttttcaggatccggaagttgaacactggtcttctaaaatgctactccttgtaagtgcataccttctatacttgtgatatgattggactatatctcctaattaaattagttctaatacataaatgttttatggttgtgttggatcgagagtcgtcgccttggtaatcaggttgggttccttgatccatccatggtgaacgaggttaatttacgacagagcttcactgaggtggttgactatgtcaaccggtgtttatgggcccatcaag

SEQ ID NO: 20318 - DNA, 804 bp, Oryza sativa
ttagttttggagccattaaagactacatcatttctacaaagccaaaccgcccaacacagagtttctataccaacaaaaaattgatgtttaagcctaggttgaacaccattcagccaattacaaaaaagattagcaatgctagtaggcggatggattccaaaggttatagacacaacattccagattaatctaaccaaatgacaatcaataaaaagatgttgtatcgtttcattagaattatagaagcaacacttagtgctacctttccaccttctttttgcaagattatcttttgttagagtaacctcaatggaattctaagctcccaaaggaaatatttccttggaattactccgttaaacatgagagttctgtacatggagttgatggtaaatgtttcctttttattggctttccacacaaagacatcattttgttccgtaagttgagttgatataacttttgagaccaagttataccacgctgctaggttatcccctacaatagctcttctgaaagagacgtttaggggcaccttttccaacacttcggccaccattacattttttttcctaacttgattatacaacgaaggatacatcttatcaaaagaggaatcaccactccaacaatcctcccaaattctcaattgtgtgccattacctacttgaaaagcgccacaagaaagaaaagagttttcttaacctccatcagccctgcccaaaaatgagaatcccctggttgttttcctacaagtgtaattgttttcttagccacgtatgttttttctaagtagcttttgcc

SEQ ID NO: 20319 - DNA, 2258 bp, Oryza sativa
aaaagattctcgtagtatttagtaatgtacttttttaaatcttcatcacctttaattaaaccctcctcttgttctaactgaaaaattttagtcttcctatgcttgccatttgcaatcatatgatagtattttgtattccggtccccttcaattaaatgttttgttttttatctttggtgccatctaatttcctcctcccttaacagatgagctagtctatttttcaagtagttcttgagatctaactcctgcctagtcaatatttgcacctcggctttttaatctaactgatttgcttttgcacttagttcagccttctcttttctatatgtttcacttgtgctttttgcccaacctctcaagaactgtcttaatctatggatcttattttgctatctttccatcatcatagaacccttgttctcttttctccaaacttccgctactaactcatgaaagcctttcccttaacaactattcaagctcaaacttgaagaaagattgtttggtagcatgagtacgtacaaatagcatatatacttgcagaatgcaagattaaatggcaggagatgattggccatacgcaaacttttgttctttaagtatataatttgtttcacgaggacttggatctggcaaaccaattgaattgcatatctggacatcgatgtgctaatttggttttatttccacccatcaataatggctgtatatgcattaaatatttagatcagatagtacatggaatatgcccatgtagaggaagatactatgtacatgtgaactaaatacatattctgttcgctatcacaaattgatcagcccggacaattcagaatatgaaaatgtattcatgccaacttgaatatgtatattgattaaatataaggtaattcaaaactacaaaaatgcatgttcccataccgtcaaaacaaattttcgcatgcaattgggccgtctgcctgctcggaggtgtcagtaaaagtagctatttttacaagcagatggcacacccgtccatgaaattccacttttcacaagcggtaaattatgtcactgcactgctaaaagaaaaatcatgaaaaaaaaaactaaaacttgaaacccaaaacctgaaaccctagcggattcacccttccccgtcacggggctgcccggcggccgatcctgtcgtggtgccacccggcggcagatcccgttcgaagaggaggcggcggacagatccatgcaggaggggagttgagagagaagggatcctgttgtcgccgccaccgagccgctgccaccccgctcgaggttcttgccatcgcctaggtccccacctgtcgatccgcgtcacgaagctcgccgccgcctgcgcgctcccactcgagcccaccgctgcccgcacccgcccgctagcaggctgcaacttgggaggtgtagacaagggagagagaggaggtgagaaatgagagaggggagatgagagagataaagatgaggagaggattggggtgagagagaaggtgaggagataataattaggacttggaaaattttgaagatgcatgctgagaaggacgagagaacggtaggacttggaggcagacctcttaagtggctgtttgggataatgtattttcacatgcagccttgaaccgatccaacagagccatttttgcatgcagatgcagttacagccatcttcagcctggagagggtcttgtctatcaaaatcgatttatgtaatagtgatttaaaatggaattgcgacaaattagcatagcttagtaggcatgaaaaaactactaattggagaatttgtcacttttacagccaaaaaaagatgtagaacatattctatattcagtatcactaattattttttttagaattacacagtacaacgcacacacttacaacgcacgcgcactcacccctatgaacacacacatgcaaaccctacccctatgagtatcttcgaatactgggccggtaaatcctggagagattgacaaagtcaccataggcgcctcgctgtcgacgggtacgtcgcctaccactgaaagcacaatgccgttaaatcctagaaaattcgcttccatggggaggatctcaggtactactgaggctcttgtaaccaataggttacagaccctttcgccagtatcactaattatgactgctattttgttctcaaaaagaaggtgaaggacttgctactatattttttaagacaagcgtgatcaatcatcctttcttcccacataggcaag

SEQ ID NO: 20320 - DNA, 805 bp, Oryza sativa
ttagttgtgtaaggttgccaaccgatggtggaatctccccactcaaattgtttccatacaacaacagccggtggagactagatagctgaccaatatcaaaaggtatgttgcatgtgaaaatgttacctgccaactctagtacagttaatttgcgaaacctccctatccctgcaggtatggtcccaaatatttggtttcctccaagtccaatccatatgagctcttgcgagaggttgacaagtgtattcgggataaatccagaaagcctattgaattgaagatctagtgtcactagttcactacagttggtcaaggatgtgaggaaatccctgtcatttggtgtcttagcttcaagaatattattacctaggtttaatcttgtgattgtgccggagctccagatgttcggtggtattcgtccttgaaatttatttccatggagttgaagatattctagtttggaaatatttgacaaagagtctggtatcgggccttcaaattggttatagattgtgctcaagaaaactaagttaggcaacttggggccaatatccatcggcaaaaagcctgatagcatgttcaggccgatgtacataatttcaagggatgtaatattaaacagctctgggggaaacacaccttgtagcttatttcctaacaagctcaaagctaaaaggtttgttagcccagctatatttgatgggacatatccatggaagacattaccagcaacgtttaaatctgtcaaattagtcatattgccaatccaaggaggaattcgcccattgacatagttatcagcgat

SEQ ID NO: 20321 - DNA, 5656 bp, Oryza sativa
cagcgagctttggcaggttgccgatggaccatgggatctggccagacagggagttgacactcaagttgatggcacgcagtgcgacgcagctgccaaggtcatgggggatctcaccttgtaacctgttgtttgacagatcaagggcttggagataggtgaggttgctgagctgcggagagatggcaccgacaaggccaagatctcgcatgcgcaaggcagtgacgcggccggggtgggcatggctgctgcatgttacacccttccaatggcagaaaccaaacatggtctcattggagctccaagaagacatggctcccgatgggtcctcagtggcaagagatttgaaggatagaagtgcatagaggtcggtgctactactgatgggctggacagtagtagctttacccaaatgcagcatgtagattgtcgtgaaaacatgaggtaactggagtctttgggcgagttccatattaattggatactgatgcaggtggctttggccattcgactcaaggacacatgcaacttatatggatgccactaccatactgttgtgccatttactagattgttaatttctttatggaaatacctacccaagatgcacctgtgttatcctataattaatggcacatgtcaactttatcactataaggcctatttgtcaacctggctgcgtgctctagctttagattctcatatttgtcaaggtgaacaagtaacatcttcctacttgatagccgtactactcaagcgcagtcgatgcattcagattgtactagttatttctccacattgtacctgaaaattttgaattctagaaatataattgtcttggaaatttgaaaaccatcttggagttctccctggtgtttttcaggatttattggtgtttttgcactattagtgcatgaaaaacaattcaaaatacaccatgcttaaaggaaaaaaaagagagaagtatattgccgatcactagacttgctcttatgtgtcatccaggtctctgaattctcaaatacatttttaggtccccgatcttagcaaagtgtgttattctggtcccaaattaccacgaccctccaggatcctacgtggcgcttacgtggaatgccacatgggcgttgagtcattttctttatctctttttctccctgtttttcatctctcattctatcttgttcgtgtgaaaataaaaacataccaaaaaaagttggtgaacctagaggggaagaaagaaatgaaaagaaaattttggaccggaatgtccatgtcacaagtcaagtattgactgttccttttgttcttctcttgctatgcagcatttatgaaattggcaatgctagtactaaattttgggcccattcgatcacttccatacatccaacttctgctcatgtgttggcggctgttaaatgccgattctataccgccaacatctgcataaagtttagataataaaacattcaacatagtgataggtgcttaatctcacatgttccacaagtgttggtgtatagttgtatgcagatgataaaccctgaagttgggaggaaattcagactaaagtgaggaaaattatgtatccatacaaggaggggttgtgaacttcattgaaacaccagtggatcaacccaaaactccgcgaaatggatagaagaaggtctagggaattcaccgaccgaaggccaggccaggagggcccagcccaggttcggccgaaaccccctgatcaccgttgatcctggggtttggcgtggacgctcctgatgttctcccaatgacggttgcggggcagttcggagatttccccttcttacaaccgtcataactgccctataaaaggacctcacttcattcactctcacacacacttccaagcttgagctgaattataagaggttctattgtactatattgtatactagaataggaagagagtagagtagaaggagtcggatgaattccggagttgtcggtaatcttctcctatttcttttattctgtttattactctgaatttaatataatatttttcttgagtaatttaaatttatcttgtgagaattatctctttgttagttcctaaatggcatacgggattattgttcactataatcaactaaaatatagctattgctttggtgagttatcaacactaaagtagatattaattgcttaaacatggtgtttaggtaattattatccagtaattgctgcgtatcccacattacgtttgaggtgggtgtagaggtggtgacagccctcgagatcacttaagtcctccctgtccgggtacgtagtagagcgacatctgggaacagtgggttgccattgcctgaagtattgcgttaggattaaaattaagctttccctagacactgtttctcactagtgaatcatctctatcctagcctatcaattgcttggtgtccttggatgaaccggaggaagatctgaccacacacattcccttggattcgatacccttggaatactccgtaggggaagtgctacatcggtatatccgtgcgcttgcggattttatccgtaactgtatcaaataccaacaagcatttctggcgtcgttgccgaggaacggttgttgatcatttccgaacctagttcatcctcgtatcctttttcatttttgttattctaccttcacccctgctatcccagagaagtattcctgtcaaactcttctcgaccatggagcaacctctttttgagctgtctgctcctcggggcgaattctatgagccacctccttcatcggagcccatttatacaactggctatgaaattcgtcccgaactaattagtatggttagggaaaatccttttttggctttgatctagaaaatccctaccatcatctgtgagactttgaacaagtctgctcatgccttaagactcgtggcatgagacaagaaactgtgcggtggaaattgttctcattttctcttcaagagagagcaaagcaatggtacacctctaccgttggatgtgtaaacggtagctgggaaaagctgcgagacagattctatcttgccttcttcccagttacccgtattactgcccttcgagtagaaataaggagtctgcattgatcaaaaacgaatcaatcggtgcagcttggtccagattcactaatttagtccagtccggaccaaccctgtccttacccgagtatgtgcttctcccacatttccatacgagtttggataaggagtctgcattctatttggacataaccgctggaggatcattcatacacaaaatgccgtcacaaggaaaaacgattttggatcgcattctagaaaacacttccttcatgacgcagtccaatgaaccccagtcggaggcatccgtgtccaagatagaggaacctctaacgatcgagccacttgctgaaccatccacttttgctagctcggttgatgagaaggttcctgagcagccgtccgtcgagaatgaagaaattcagactctggatagtgccgcaattctgtttagggacggttttgacgaagaatacggcaataccataaactattttagtaagaggaaaccacccgttcccttgtcacctcccgatcctatggaactcgggttcctacgagaaactgtccgggagttgacatccataatgagcgatgaatggctaagggaggcagagctttcatccgaagtaattcggataaataccgctccctgaatcattccttgtcacctggaagggaacgacctcgtctctgagtccaactgtcggggccaacctcgtctctgagtcttttgcattcgcttatttaatcgacaaggcagtgaccccgacaaacaaattcttcaagcatccaaacggaaatatcatcgaaggatttgggattgtgcaagatgtgcctgtctgctttgaaaacagggaggcgatcttagatttccacgtctttgaaatccaagactttgatatcctaatcgggctgcccattgagcaacttatcatcaacacaccccgatttggtagcctcaaaataatactaggagagaatgaattctcaattccattctcgcgggcaaggatcaccttgaccgaccctctcccagaaattgagtcagtggaagaggttaccgcagttcctcctcatgagtctcccgaggcccttctggaagatgaggtccccccgatttcatcaaagaggaagcggatcccggcgagactctcgacctgccaatcatggaaccaccatctcgacctccgcttgagcttaaacctctacctccaggcctacgatatgccttcctacacaatgacagagaggctcctgtcataatcagtgacaagctctctgaagacgagactcaacgtcttctcaccgtgttagaaaagcatcgttctgttcttggctactcatttcaggaccttagggggatcaatcacgcgctttgcactcatcgtattcctattgaccccgagagtactccctctagggaacctcaacgacggctcaataatgcaatgcgagaagttgtaaagaaagaggtcttgaaactcctgcatgccaggattatctatcccgtaccatacagtgagtgggttagcccagtctaggttgtgcaaagaagggaggaatgacagtcgttgcaaatgctcaaaatgaactaattccgcaacgaaccgtaaccggatgaaggatgtgtatcgattacaagaaactcaacgaggcttaaaaaaaggatcatttcccgctacccttcattgatgaaatgttggaacggctggcaaatcattccttcttctgtttccttgatggatattccggatatcatcaaattcccatccatccggaggaccagagtaagactacgttcacatgtccgtaacccatcccaaattgctccaggccaagcacgcttaaccctggagttctttggagattgacttccggaaaagaagttgcaacttgttgatatgagtattctattaatcctattaagccctaggccgggatgttacaccctcacccccttaagagagatcgacgcccccgtcgatctaccctaggccaggaacgtcctctcttggccacgtccatgtgtccagtgccagcgcatgtgccatgctgtgtaaccactcccggtctacaccagacatgcgcaccatgcctgcgcaactgcgacacacgcgcccgtgaaaccgcgagagtcggctctgataccattttgtaacgtcccgccttcccccaggccgggcccgcttacatctgatagctttcataggtcatagactgccctcacagaccaacacatgtctcctggagttctttggagattgacttccggaaaagaagttgcaacttgttgatatgagtattctattaatcctattaagccctaggccgggatgttacagctctcctctacccgccgccaccctcgccttcgcctctcgtcgccggaagagccctagcgtcgtgcacccttgcgccgccgtcgctccagccgtgagccgccgtcgctctagccgtcgccgtcgctcgagaagaccgccgttgtgctcgccaagtcgtcgccgtcctcgtccgccgcttcgccaccgccgaagaccgccggagcatcgccgtcgccgtcgacccgaaggttgccagcgcttcctcct

SEQ ID NO: 20322 - DNA, 7933 bp, Oryza sativa
agccaatattatgccatcctttggtatccttgtgcacttgcatatttgctgtgtggcttgctgagtatgtcatatgctcaccttgcaataatcaatcaacctcagttgaagaaaaaggatccagaaggagaagacgtttggcttataccccagttgagctgcctgtgggagtggagccggagcttcgctagattttattttccgctgcagttttcttcatgatgaggactaagtgcctcataagtaagtatttatcgttttagttaatttgatgaatctgtatattaaattgtcagtttgtgtacctcggctgattcctggacgaggattttatgcacaaataagttcggaaattactagtgaatttccgggcgtgacaagttggtatcagagccatctcgactgtaggataagccaaatggtcaaaccttaaggactaattttccgaaaacatgatttgtgaaaatttctcctttcttccttatctagaattctttgcaaattgtttcattgtctactcccctctctctttcaacttgagtagttctgaaactagttgttgaaactagaagatgttgatgtgggcaacttatggaggttaagtcaagtggatcgatgaataagaaggtgatggtcgatctgaagtgcccagatgtcaagatggaatgaagttggcatcctaccttagaacctatgccgccaaagtgtctttgaagaatagttagtagggtagaacgtttgttgtttgctttgtgtgtaggtatggttgcattcccgtcattggagtggttcaatgatgagtgtgtaattatactaggttgcttgcttaatcaacttaaacaatataatggtctacacacatcagatcagtgttaacctggttaaggtcttgtctttagtgtaacccttatcctcctatcttctctaatctgcaatagatggtgaacactcgcgccagtggaagtggaaacaataacaatgaagataacccaactcttgctcaagttctggctcaacagactcagttaatgaacatgatgatacagcagatgcagaaccagcttaaccaagggaacaacaatgctccaccgccgcagaacaagttagctgattttcttcgtgtgaggccacctaccttttctagcactaccaacccagtggaagcaggtgattggttgcacgctattgggaagaagttggaactgctccagtgcacggatcaggagaaagttgttttcgcttcacatcagttgcaaggacctgcatcagaatggtgggatcatttccgaatgaacagagcagaaggacaaccaatcacttgggcggacttcacggaagcattcaagaagacacacatacctacaggagttgtctctttgaagaagcgtgagttcagggcattgaagcaaaaggatcaaaccgtggcagagtatcttcatgagttcaatcgtctggcacgttatgctccagaagatgtgcgtactgacgaggaaaggcaggagaagttcttggaaggcttaaaggatgaactgtcagttacgttgatctctcatgactatgctgattttcagcagttggttgacaaagcaattcgacttgaagacaagaagaacaggatggataaccgtaaaaggaaaatgactgttttccaggaggcacaaggtagtagtcagagacagcgtatcaagccactccaaattggtgaacctttttctgctggtcaaggacagtcgcaacagttgaatatcggtggtgagatcaaaacagagactaatgaaagcaatgaagttaatatcgagcaagctaatcagccggtgccaattcagcaggatcagtctcaagagaataacagtagtggaagggagcagcaggtatgtttcaactgttacaagccaggccactttgcaagagagtgtccgaagccgaagcatcagcagccgcaaggtcaggtcaacaatattgtcgtcacaggagccaatgcagtgccagttgcgtcttcaagagttgcgtcttcaagtgttacaactcagccaccagtttcaaagaagcagtagttttctttaaagccttagaataattatcggagttatggaataagatagactgcagtttacctattccctttttctttctagccgttccgattctcgggacgagattctttgtaaggggggtagtttgtcacatcctgatttttgtttcaggatttataaattatttaataaattaataatataatttatattaagtgttctttaatttacaagtgaagttaaatgtgggaaataaaatttcctaaatataaagcatggatggatttaatttttattaaattctccatggttaattcaactctctgaaattttctcggatttttcagagctcaattcctaaatgatacaaagaacagttcagtaattatttgatcattaatgatctaattataattgttaagagcttttcttgtttaaaaatccttaaattataaattgttgtttaaaaggaattattagaaatgattttaaaagcctagaagagaagatctaattttaatttgctaaatctcaacataaaattgggctagataaaattttgttaaatactttgcttaattctataattcctagatttttctgggatttatttgagctaaggaagtatttttaataaatggaattgcatttcatgaataatttaaattgaaaaaggtttttaaaagtcttcttttggctttgggccgaaagccggcccaaaacctctctctttccttttcttcctccccggccagtcggcccaagtcggcccagtccgccgagccgccgctctcctctctctctcagccgctgacaggtgggtcccacttgtctgggtcgtcgtcctcctcgcgccgccgccgccgcccgaaaccctagcgcaagccgccgccgtctccttccaaattcggccgatcctttccttctccggtgaaatcttttgaggggaaataatcttctcgatctcctcttccttttctcttatagaaactccggtcaattttctttggaaaccggtggattcgagtttgattcggattcgtttttccccaacctttccttctcgtcgccggcagccgtgggccttcgccgccgcctcctagcccctttaaaaggacccccgagctctcctctacccgccgccaccctcgccttcgcctctcgtcgccggaagagccctagcgtcgtgcacccttgcgccgccgtcgctccagccgtgagccgccgtcgctctagccgtcgccgtcgctcgggaagaccgccgttgtgctcgccaagtcgtcgccgtcctcgtccgccgcttcgccaccgccgaagaccgccggagcatcgccgtcgccgtcgacccgaaggttgccgccgcttcctcctcgtcgccgtcgtcgtccgttgttcttccgccgccgttttggtcaccgatgagttcgccttgtcgtccgcttcatcccggtgctttccgtttgtgccgtagagccgccgttcgccagcgagcgtgcgccgtccgagccgtccgagccgccgagccgccgctgccggaggtgacgtcatcgctgacgtcatcggagtcgtccgccgtgagccggtcgtggaccgtttgatctcagccgtccgttttggatagggttgatctcggccgtttgttcccgtgaaccgttgccgtgcacccggtccaccgcaaaccctagccgctgacgcaataatccttcttttccttttcaaaaataattcattattgcgtcataattcaattaaaatccatataagtgttttaatccgatttaatctttaaaaattcataactaattcatttgaactcagtttaatgtggttcaagttgcaaaagttgtgtaaaataaagatctacatattaaaattgtccataaattgaattaaatttatttaattctttttaaatgggctttaaatagatttaatcttgtaaaattcatttgaagtcagaatgaggccgttcaagactcataattcatctaaaattatgatctacatgtttgtttactttttatgtattgtttatttggtttttattagtctttttcttcgttttgtgtgttagcttgtcgtttccgtcgttgcgaaggttcgcgagtgcgccggaagtattcaagaagattaattgaataccgattattgcaaggcaagtcacacagatcctaaacacaatcctttgagcatgttgatcctatatttaaattctctatttatttcaactgtgcatttattttcgaatgtcattgggtggaattaacctattctttgttatggcccttttgatcttgattactttattccttgataccttgggttattataatttgactagttgagctttatatattggttcagctagatattagatgtgattgcttagccatgcttagaaacattagcacactattgggataacttatgattcattattatttaatgatggtttaatgatagttcacgatggttaatcgtgattggttaattaattacttgccaactaaaacttgataatggtgggttgtgagcacatggttttgagagtcgtgctcatgacaattaaggaccggttcgcgagctactattgtgaaacattaaccgtgccaaccacaagccagcgtgggcaacggctttaccttttgtataacatgattcattgcggagcaccagactgagaagtggcggagataagcccacgggggtcgctggggagtccatgccttgttttataagggggtgattatgatccaggaatggtgcactgtggtgagttgtgttatgcaaagggtattgtcacagcctctattcgggtactttccagtatcgcgacgcatggtagacatgatgttgaggctgtgtcttgtgggtacagtggtacacctctggccagagtaaaactattcgaatagccgtgcccgcggttatgggcgagttgagcaatgtttttcgtgattagtctcacacctctcataataattatagatgttatacctggtaataattagcttagctcctggtttggagattagatctgttcagccgggtatggttgttcagaatggttgggcctgggcagcacgggtgtgctgttcagtgttgattaaaatttctgattaattactccaatgttttacttctcttaaatgttttgctaaatgctgcttttacaaatgagccaatattatgccatcctttggtatccttgtgcacttgcatatttgctgtgtggcttgctgagtatgtcatatgctcaccttgcaataatcaatcaacctcagttgaagaaaaaggatccagaaggagaagacgtttggcttataccccagttgagctgcctgtgggagtggagccggagcttcgctagattttattttccgctgcagttttcttcatgatgaggactaagtgcctcataagtaagtatttatcgttttagttaatttgatgaatctgtatattaaattgtcagtttgtgtacctcggctgattcctggacgaggattttatgcacaaataagttcggaaattactagtgaatttccgggcgtgacagacatgatcgaagatatcatggatgacttctcagtttatggaaagaatttcggtcattgtctgcagaatctaaacaaagtcttacaatgatgccaagaaaaggacctggtgcttaactgggaaaagtgccatttcatggtccgtgaagggatagttcttgggcatcgagtgtccaaacgaggaatcgaagttgatcgtgctaaaatcgatgtgatagatcaacttcctcctcccgtgaacatcaaaggaatccgtagcttcttgggacatgccggcttttatagaaggttcattaagaacttttctgcaattgccagacctctgaccaattgttagccaaggatgcgccctttgagtttgatgatgcgtgcctaaaatcttttgaaattctcaaaaaggcactcgtctctgctccaatcattcaacttcctgattggactctgcccttcgagatcatgtgtgatgcaagtgactttgctgttggtgcggtcttaggccaaaccaaagataaaaagcatcatgcaagctgttatgctagcaaaactctaaccggagcccagttgaattacgcaactactgaaaaagggctgctcgtggttgtttttgctatcgacaagtttaggaggagccaaggtgataatttatgctgatcatgctactttgaagtacctgctcactaagaaagatgctaaacctcgtctcttaagatggattttgctgctccaagaatttgacttagaaattaaagatgaaaagggagtagaaaattccgtagcagatcatttgtccaagctgcaaatcactaacatgtaggaacagccgatcaatgatttcttaagagatgacatgctgatgacggttcgcgattccaacctgtggtatgccaacatagtaaactacatggtatccaagtacgtaccaccaggggaaatcaatgaaaactgaagtatgaaagccgccgtcacatatgggatgagccatacctgtatcgggtctgctccgatggcttactacgaagatgtgtgccaactgaagaaggacttaagatcatagaacgatgccatgcctcaccctatggtggccattacggtgcattccgcacccaggccaagatttggcaaagtggcttcttctggaccaacgatgtacaaagacttaaaagaattcgtcagaagatgcacaagctgccaaaggcaaggaggaatcactgctcgccatgcaatgcccctcacatacaatttgtaagtcgagatattcgatgtttagggtatagacttcatgggacctttccctaagtctcgcaactgcgagtacattctggtggcagtcgactatgtctccaagtgggtagaggctatgtcgtgcagcgctgcggatgcaaggcatgccaagaagatgttcacagaaatcatcttcccaagatttggtacccccagaatggtcataagtgacggaggttctcatttcattgataaaaccttccgagacctcctacgagaaatgggagccaaacacaatgtggctactccttaccatccacagaccagtggacaagaagaaacatcaaacaaataaatcaagaatattctgcaaaagacggtcaataaaatgggaacaggatggaaggatagattgccggacgcactgagggcataccgtacagcatacaagacacccattggaatgtccccatatcagatagtctacgggaagccatgtcgactacccgtagaacttgagcacagagcatactaggacgtcaggaattggaacatggattttgaggaagcatgagaatggagaaaaatgcagattgctgaacttgaggagtggagagaaaaggcttaccacaacgcaaagatatataaagaaaggacgaagcgctggcatgacaaaagaataaagatcaagaaattcaaaccaggagacaaattacagttgttcaactccagagttaagcccttcggccacggaaaactgcgcagcaaatgggaaggaccgttcgacgtcatcgacacctcttcgcacggggcaacctgtcacaccccgaagttctttcccaagcctaaattggagttttaaatggtctcaagaaaatacctgtgtcaagcaagagtaaaccttaataaattaatgcaaataataatcggaattggcatgtggaatttttcttgagttttacatgccgaaatacgctaacaagatttttagtggaattttcagagctctcgatataattttaaccaattaaaattgagcacatgcaattttaatcccaggaaaaatcctttttccttctttttcctttttctttcttttcttttctttttttcctttgaatg

SEQ ID NO: 20323 - DNA, 547 bp, Oryza sativa
gttgtcctccagtggctcgccgtcaccgttcgccgtcgttctcctccgcgccggccactctcggtgaggcatacctcctcctctattcccctccctctccctcctagccgcgccgggtcgagccgccgccccggtcgtgcgccgccgcttttgcgccgccgcctcccgccgctggttgccgttgccggcaacacgcgcgcgcgccgccgaccttgccatggccggccggccggctttgtgccgagccgagccgagccaggccgccgccgcaccgtccgatcggccccgggccgatccgggccgttgatcccgtggaccggcggtgaaccacccgcgtggtcccggtccacggtagaccggcccctgtgcgccactgacatgcgggccccgcctgtcggcgccgtccccccttgatgacgtctgccctgggatttatttcgcaataaatgatttaaggacttttgttatagtaataaatacagtgaatcttctaaaattcataactaattcatccgtgctccgtttaagcccattcaagtcttagtaa

SEQ ID NO: 20324 - DNA, 722 bp, Oryza sativa
cttctgttggaaataaattctagcacaattgctttaaattcgttaccattatagtctaagctgtcacacaccgtgacaaccttaacaagtttccgatgttgtatcctcctcaaggcatcgcactcagcaaaaaagccctgtgtttgtcccttttggcgaagatcaagtactttcatggccaccgtagctgaattcacaccagaagttaaattccctttatatacatatccgaaacttccacggccgattaagttttccgaggacaaggaatctgttgcagcatataactcaacatatgatatcctaggatatttctttatgagaagcgatgtgatatgctcttcatgatcaatatcttttgggattgttcgttggtccttaatgaaatagaaagtcactagacatgcaaatatggtaaatcctccaacaacacaaatgatcaatataagctgcacttggtgctttgaatgactattatgagcaagagatgatgggcattctgaaatccaaagtataaagggcctccgcatagcatatcattactcgagagtgatacagcagtgggattacagaatattcctttatttggcacaagaccagagaggttgttcaaggaaaggtttaaatgcttaagaccttggaaattcccaagaaaatcagggatgggtcctgataagttgttgtttgatagatcccagtcttctagtcctctaagtgtactg

SEQ ID NO: 20325 - DNA, 630 bp, Oryza sativa
aaattgatctgtaaacccgcaagtttctcaaatgtacggggtacaagtttgagattttttgcttcatcaagatcatgttccatcaagagaattgtgtcatcaccatattgcaaaattgagaagccgttgtcaactagatgaggtatgactccctgaaatctcctctgatccttagccctttgtattaagatagatagcatatctgccactaaattaaatagaattagtgataggagatctccttgtctcaagcctttttttgtttggaaaaagttcccaatgtgatcattgaccttaacagcaacacttcctccttaacaatttgttaaatccagttacaccaagtttgcgaaaatcctttcatcctcaaggtttgttgtaaaaaagtccaatctactttatcatatgctttctcaaagtccaattttagaataactccactcctcttttttctatgcatctcatggattgtttcatgtaaaattaccaccccttacattatattcctccctggaaggaaggccgtctgtgaagatctaatgactttctgagctactagagctattcgattagtcattacctttggaaagattttgaagctaacattcaacagacatataggtatgtatt

SEQ ID NO: 20326 - DNA, 1161 bp, Oryza sativa
acgagcaaagactaatacataccatgacttcaatgatgccactttgactagaatctgcagaaacttttaatggttcaaacaatcccatccactgctccttgggagcattaaagatcatattagttcctgacatgatccgaatggtacgctcatcaagcaagtacgacaaacactttgctttccattgcttccacaggataaacttgtcgatgatttgtgttttcctgtgttaataatagttttgagtgagttcaaactggagcctgctatggtctcaaaaaaaggacacagatatatatggattaacaattgtaacaatatagaaatttgggggattaagggattacatactgagcagttgctgaggtgcacaatgtacttcctgcactatcaaagctgtcctttttcatgctttttagaagtgtgttcagttctctctcagccaaagaaatacacgatcctgaatccagcttcttctgtagttctttaagtagaatctgtgaattacccgtaaacaaggattcttcacaaaattcatcagagctagtggaatgtccaacatcacgggcattcttggttcgcatcaaactaggtaaattcatatctaaaatcgattgcacatactcttggcacacattgcattcaccactagcagaaatgccatccatatccatctcaacaactgcttgaagtacagcacctaaattctccgcattcgttgttttcagaaaatgcttcacaaccaactctcttgccatcgcaagtgtttttgatcggatatcctcaataccctgcatgacacagggtagaacatcactacatgcaaaatcagaatggatgcagccaagaagcatcttttcagaagcaccttggggaaattcgggcttgaagcgagttgaacgagtgcagcatcgagctcacttgcagactcatcgtactgaccatcgtcacgcaggttcttgaaaacctgaacacaatgcaggaacatgtgttaacatttcagttcttcacaacaacagaaattcttcatgtggtcagtgtctgtccattaaagtaggaaaacccccctcctaagcagcattgagaacgatgaacttccaatctacacggccttcccccgagatgctgagagaatcatggcgtcggagggggcacgacgca

SEQ ID NO: 20327 - DNA, 7549 bp, Oryza sativa
ctggcattggttgcttctggggatggttggtgcatgtaatagctggtaggtttaatatttacattacagaggagtggtccttgtggtcccatttacaaaataaaatggagataatttttaagtagtaacagatcattacgtttagtggttataaaaaaattggatactttagcagattaagtacttctctagaaccataaccccacccaccaagatacacacaacaaactaaacttcttagcccccaagaggatcatagactcttagtttcagacctttgtttcatctttcatttcattctgggaataggctggtaagtagcttcacaaagttcaattaaccatttagatttagcaacacagaattcaaatcaaattactcatttctgtaatcttttgtctgatttctctctaagattttcttttttgttgttctgtttccttctatccttcagtgtgtttctttgggaatcactgtaataggcgggacttgttctattcaagtctttaatgcattcattttctttgtttctgtttgagcagtggtttaattctgcaaaattatgttccattcatgcctcaatcgtgcccctccccgcccctctttttttttgcttcttcaaatatacttctctttaccctctattcactcttcacatcagtatattttggtccaattacaattttctttgctaagatgtatagcagcatacttgatgttcacccttctaagtgctcaccaaatcactatttgggagtcatagaaatatatctagctgttgggttacgaattgttgtaagacaaatctttgctctatgtggaaaaaaaacacttttaatatctgaacaagaccagggaaaacttatttcgttttcaagtttgatgtaatagacttctgcatttggctgatgatatgaccagagctccactttaacagattgaagtgaatcatcttaggggtacatgaaacaggcctacatcaactatgaatcagcttcgcaatggaaaagttccccaatatctttcgccagctataactgtagtaccagaactctctgaagttacatttcctagtttttcagagcatagaccatcctatatcgaaagggagcagtgtggtagttctatcaactcatttgatgcttctactccaatgtgtatgttagcttccaactttacatcagatctttatatcaacaaaagtgaatcacctaacggcaagctttcttctgaatcatatgctattgatacctctggatgtgattcttccttgccgccaacacagtcattatacaagggtaatccaagttctttaaggatggtttatcctaaagtatctgaacagaatagttggagtcaagaaccactgcctggaccatttgtttgtccaactagtgttgatttcttcgatcaacaagatatgactatttttgaccaacaaatacaagataacattgcagcaagtcctagcaccaaccttgcaaagcaaaatgagtggttctcatctggcacttccttgcagtatttggaaagttcggtgtctgctggttctgtgctgaaggtatctgatttgacccttttggatggtgcactaactatttcatgatttcttatcctctctcacagcctgtacggcaatttagaccagctcttcattggtctacttaaaattttagataacatttcccctcatttccaggctgttgatgcgacaagtacaacaccttcaaattatttgcattgtcatgcacagagaaatacatcaaatcctcccaacttcaatgaaatttgttctggtaatatcgcttcttcaaacattgctccaaccaaaccaaggatgcgatggacacctgagctccatgagcggtttgttgatgctgttaacaagcttggtggaagtgaaagttggtccctgatcctctgtttttcttatcatattttcatcttgaacttttacggaacagtgctgttttcacaagaagaaacaagtacaagtctctgttttcctagatctattttcatttctgtttacttttctcttgcagaagcaactccaaaagctgtccagaaagttatgaaggttgacggcttaactatataccatgtaaaaagccatctacaggtctgcatttgttgcttctgaattttcaatgctttttatacgactcttcttgatttttcctgatggccatgggttattcttgtgcagaagtatcgcacagttcatcatcgacctcaactatctgatggtcggtgtgtttcgatgtttcaattttggtttaatttcaccataacaagatacgtggtgcactatgccggtcattgtactaaattagaatgttgcagtgaccgtactatgttgttgatgctattagagtttatatattgatctttaagagactgaattttatcatgcgctgtgcctatttaaatttgaagtaaatttgaacgatctggagctttacacaattttctttatttttttctcataggtgaatctgcgaaaagtggccaaacggatgaagtttcttctcagcccttgaagtgagatgatttttatgtgatatatatctctgagtcctagaaattttataaatatcatgtgttggcctagatgagtagtggagcataatatcacatctatgctccgacctggatgaatttgcattttcttcctaacttatctctggatgaatttaagttcaaatatatgtcgtgtgccagtgttttctaaagtcttgactgtgtacctactacagaggcatggaaaccacctgtgaaggattaagggtccagattggcttgcagaaacaacttcacgaacaacttgaggtgcccttattctttcaataataagatacttgatttttgttttgaactgcaaaagggaatgaacacgccagattttgtgcgtttgactaatgtatagggtcccttgtattttcctctccacagatccaaagaaagctgcagctgcaagtagaagaacacagcaagtacctcgccatgataatcgagaagcagagcgagagcctaagacaactgggagcattaccaagatctctagatgcacccactcaggttttggataacagggaaacgtgcgagggacaaacaggagatgctgattcagcagagcaaaaacctgagaaatgaatgcataatctggaaatttcagaagagacgccttatgctgaatcattggctgcaggaagtgagaatcagggccaattttattcagacatgatttgctcattggctgtagaagatgagaatcatattcatatcccaaatactgggagtatgagctgtccacttgatctgaaactgcgttgctgttccttcggtacacaagttttcgttcagggagatccaaagctgctgcttttttgtgaaaaagtatgactatgctgtagtgtaaccagtgtcagattgtagttgtagttcaggaacaaactcacaataagtcagtgccaggcatggttagcttatccatctctcgatggtgtacacttgtaacatagcacgagtacctttttagaagttccagactaaagacaccactcatttacatgtaaatgctgcatacaaaaccatatcatttcccccaatttattttgtgtcttcatgttattattgttacagcaggatacagtgagcaaaacacaagatgcaatacgtggtgatatatccattatccatacgagtggagtgatttatttcagtgccagaagctacaagcagaagcagtgctgtaactgctgatgccattagtgcactgcttgctagcttcatggagcaagcagaaactacagccaaacggggctagccattgcccgcttcttcagctcctggcacgctgcggcggcgccggccaacatcctcggcgccgcggtggcgtagaggttgccgcgcagcccctgctggatcagatcatcggcaaaactatcgaacagtaagctaaaataggcaaaacgatcgaacagtatgctaaaatagctattaggctctgtttagatctcctggcaaaattattcaccctgtcacattgaatgtttggacacatgtatagagtattaaatataaacgaaaaaataattaattacacagattgcgtgtaaattgtgagacaaatcttttaaacctaattgctccatgatttgacaatgtgttgctatagtaaacatttgctaatgacgaattaattaggcttaataaattcgtctcgcagtttacaggcggattctataatttgttttgttattagtctacgtttaatatttcaaatgtgtgtccgtatatccgatgtgacacgccaaaactttacacctttttgatctaaacacagccttagcagggttggaaatttcagaccaaaatttcggtcccctccgatacgatattaatttggccgaaatttttaaattttttcatgaatttgggtaatatttattcaaattcaactaaattttgttcaaaattttggaaatttcggaccgaaatttcgggatttcggtgatcccgatcaaaaaccttcaaccgatagagttaaccctgagccttagtacttagtgactaaataaagcttccattatagctaccttggtgatgagggtgaggtccggagagttcgcgccgccgttgacggtctccgccgccggctgccgcgcctcctccacgacgacgatctccgccgccttgggctccacagccgctgcccgcgcgcgcgcgccgtcgtcgctgaggccggcgtaggggagcgaggtgtggcacgcggcgcagtcgctctgcatgaacaccttgcgccctcgctgcactctgcatacatatgctcacaaaaagctccaccagattagcgccccgaaatgcggtggccaacggccggaagcgagaacgaactcgccggcgtccacgcggtgctcacccgtcgttcggccacgggtaggccgggcaggcggcggcgccgccgtcgccggaagtcgcagccattgattccgacgagagagctgcagcaagcaagctagctacctggtcgagtgggcgcgtgtgatcgactgtgaagcagcgcagcggaccgacgcctctctctgcagataacgaggagctccgattatggatggcgtcgtgctgacgtggatggtagcggatccacgggccacggccagctatgcgaatgcgacatggtatggtggcaaagccgttttctcccttgcaaagcgtattagagccaccagaaatgctattcggtgcacgcgcgctagaaacacgagtagagctcaccctaaccatttatatcgcatcgcatcgtctcctcctttcgtttgtttatgttattgaaagagcatctatgtttttttaaatagaaattgattatattttcggtctctgccggtagccacacggccagaaagtctaagtaaacagaaaggaatttaaaaatgacagccgacgaactagacgactgataggcggcgatgtatccatatgagcggagtaattaattttatttgagctccaatggaggaagctactgctacaagagatcatcgatcgatggggacattatttgcagaagcagcgctcaactgctgattatgcaggctgcattattcagagttgagatctagtcagatcgaagaaactagagccagacggggctagccagtgcccgcttcttcagctcctggcacgccgcggcggcatcggccagcatcctcgccgcctcgctggcgccgccgccggagtagaggttattgcctcgcaggccctgcacacgggatcagacataatttggcaaaacgaacagcaattgaaggtaactagctaatgccttaatgcgtgtgtgcttgattaattacctttgcaatgaaggtgaggtccggcgccgggtagtacgcgccgccgcggagtgtcgccgctgccgccaccggctgatgagcctcctccacgacgacgatctccgccaccttgggctcccacgccgagtcgtcgtcgctgatgaggccggcgttggaggagaacatgccgtggcacgccgtgcagtcgctctgcatgaacaccttgcgcccgcgctgggctctgctcacatcacatcagaaaattagctccaccgggttaattaattagcgcgcgcgacgtgggtaatttcatgcaaaattaatgtgatcaagcgaaagcaatcgacatgcattcatgctctcacccgtcgctcggccatgggtaggcagggcaggcggcggcggcggcggcggcggcgtcgccggcggtcgcggccattaattccgacgcgagctaggtaggcagcttggtcgagctagcaagctcccgatctacctgcaatggctatagcttggtctagttgatctgtgaacagcctggctctgaagatctcgaggaacacgttgcctcgtttatggcgcacagattctcgttcacgtggggctgaagtggaagcttcggccgtggagacggcggtatctcatccttcgggtatagttccaatttgggcctcagcattgtggcccaaataaaaatagacctagataagcctggcccaaaacacatgtagtcgtcggccatcttcttgctactactttcggcccgaagtatcccgctctttttttttacgatccggcctatggtaaatttacgtgtgacatgggcggcccaaaggggggccatcaaatcaactagtcaagtcagcttagaaaaccagctgcgccaaccgcggaaattagggagtgtttttttatgtacgtgtaaatttttagcatattacatcaagtattatatagggcgtcgtatagggtgttcgagcactaattaaaaaactactatttccgtcctagaatatagcaacctagcataggatgacacccatcctaggacgatgtatttggatatgccttatgtttacataatccgtaagaaaatcgagagacaaatttattaagtctaattaatttattattagcaaatatttattatagcaccacattgttaaatcatggagcaattagatttaaaagattcgtctcgtaaattagttgtaatttgtacaattagtttttttcgtggctggggtgcagtggggctcaccggcgactagagccagacgactcgatcatcagatgatgagatacaggaggaggaggagaaaccgcgcgcagggagtccaccgtacgtacaatgggcgccgcagggatcggagacgcggtcccgcggcgcccgcagcagaaacgcgcattcgccgccggcagccgtgctcgcctaccacccacccacctacccacgccgcagttatgttgctgcgcgcattcacgtgcagtcacttgcagccaggagcaggactcgtccggcgcactacccgccgtgggctctcacgctgcacggctgtaccggacggacggccagtgagagcagtagagcacgacctggattcgacgtttcgatcgccatgaacagtctcagcattgcaacatcgctcactcaactctcaactccatcagcactaggagaccaccaatggcgtcgttcgtatgcaccagct

SEQ ID NO: 20328 - DNA, 32176 bp, Oryza sativa
cccccccccccccccccccgggtgctcgatcgaggcttccgcgcagctctatgttctaataactgcccttggcctgaatctgaatttactctggacgcgaacccgagcaatatcgcatcgccaacaaggaaatctgtcagtaattagcttcagaggcaatcagacctgcctgcgccatcctcttcgatcttcttcgtctagctagcttcatcgagcctacaaccagtaactgctactgtgtggtacgtaaggttgagttatttgggggagggagggagtaggcgtgatgtagctagctgatgttaattataatcgacagtgcataagccgatgtgtactgctaataggctgtgtttagttcacgtcaaaattaaaagtttggttgaaattagaacaatgtgacggaaaaattgaaagtttatgtctgtagaaaagtttttatatgatgaaaaagttgaaagtttgaagaaatattttagaactaaatacggcgtgtgtgtatatagagagagaggaatgtactgctatattcattttgcaaactgcagctagctactccatcttcaacggccagcatcagtttgcatcgagagagaaaattagcagtagcatcaaataatatcgtttcagttcgtcgcaattaagctagctagccatttaaggagttagctcgatcgtcggcgtcgaagagggaccaagattaggcgatcgattccatttgagtatctgactcatcggctgaatcataggagagcaaggctaataatacagtcgatctgttggctataaaatttttttgtagttttctcttagcctatctatataagagcatgtaaactataaaccagctataaacatattttaaagagataaatgaagagagataagagtagcgggctgcagatctgtagctagctacagcacggactctaagacgtaatgtgtatatgacaggtgggaccaggtattaatagtatagtaagcaactattgtatgaattggctattacattggctatagatgatttggagttagtagtgggctatactattaaacttgctctaatagttagctctttacgattagtacagggcccacttgtttctctcacagagtttcttggttcttgtgtccaagccggctgtaagtttacagcccacttctcctctctctctctcctttcttctcttctccacctcagcatttagtcggcttatagcctaccattatactttgctctgagtactcgtactaagttcgcgtgtaaatgccactgactgcacgagagaaactgtgcatatcctgcgcttacacagtgtactacggcctaggcatgatctagatgatgaatgcatgggagtaatttacagagtttatacactattgcattgcaacttgcgaaaaacgcagtgctacactcttgagaattaatgctggctatccgcagctagtgatgatctgtgagcaattagcatccaattaaacaaaggatatgtcaccgagagccaagtgatgcattgatctgatttctcagtggcagactggcagttggttgttgtaatttccctcaaacaagttggtacgttgtagtaacagagtggtatacagtgctactatacattcagaagttgatcgatcttaataggcgttgtaacgctactatacattcagaagttgatcgatcgttactgacgggaggtgagtaggtaaaggcattattagcaagaactgcatcggaatataatgcatctaggaatacttttgtgtgtggggggtgggtgtctgaaattaaggagaactatgtgcaagagcgtgtatacactatacattagtccaccctttcctggattataacgagatatgtagagctagctgagctgcatattttcagcttttagcggcagcaactgttgctacctcagttctgtggtgactggtatgatttttcacttgcaaaggcaaagccaaacgaattgaagcaagtaatagtattacgcatgcagtttatagcgtgcttagtagtaacagatcgatgatcattcgaacgatgtgtttctttcaacgtatgctttaatttgggccgttagaccaggaaaggaaggtagcaggcatgcagctggtctggtgacccacattttgcactgctccttgaatgtgtgcacgcaaaagggtcacaaaaatatcctcccagcctcccaggggcatataaattaccacgacaaagttgaaatggattttaaactctccagcgcatgcatctgtcttcatttcctacgttcggtctgaataagaagatattcttttcaaaaaatagattactactacttcctctgttcccatttacacagctgactgcagcattatttaccatcacagttttaactctgaacagtattttttttttactaaattgctcgattatgattaaaaaaattgtatcattttattaacttatcttgcatgtactttaataatacagtgcatgttgcatttgcaatgtgtattaataaaaaaaatgttagtggccaaagtctgaaagtgagcactcattgatgcaaaaagtgggaacaaagggagacatataagattaaatgggaccaacataaagaagaagaaaaaaaagaaagtagcctgatttcattcctctatattttaatcgaatttgactgtgccttactttcttttttgagaatatatggcacaatctcactctttccggtcatgaataagtgatgttttgggacttgttttattactatgttactatattatactaactctatattttaatatatgacgctgttggttttttatccaacgtttaaccattcgtcttattcaaaaaatttatgtaattatcatttattttattatatgacttgattcgtcattaatgttctttaagaatgacataaaaatttttatatttacataaaagttttgaataaaacgaatggtcaaacgttggtcgaaaagtcaacgacgttatacattaaaatacggagggagtatatatttgttttgaaaattttctttacgattaaatgtaaaacgcacatgcacacaactactactcccacgcggccacgcgcccgcctactcgtgagcacggatacaactcgggaatttcatgttaatggtttggagatacaatctgtgtatgcgtaaacatgtgtgttgaggccagctggtacgaatcgttattctttagggtttcatcttcatatataccttttgtaagtcactgttcggcgttataacctcaccttaatatagtgaagatattttgctggctagtgcccttggtttttttctcttctgttttaggtgggttttccacgttaaatctcatatctttgtgattgatctagtggtttttatcgtttatttgcttatcgtttcttaagaacgtgcgtgtgctcaagattattcaaactcttaaatggtttttcgcttttattatgaacttacaattatcgatatgttttagctatcaaaaatgggagagaaaagtgtctacgtactagtcacacaaatacggcaaacggatttgttggtggagcaatggtcctaggcatggatgctcgcaatcaagtctgctggcaggaggcagagagagcaactctcagccacaggtaggagtagctctcatcgctagcagacacgtacagaaaagcactgtaattccagctcgaattccccttcaatgcgctcaagatgtgtaccggccgtccgcagaatagaccggagcatgcatgctgtagctttcaacatcccaaccaccttcgacctactacgactgctatgtacacccgaccactacgtacaaatatactccctacttccctaaatatttgacgtcgttaatttttttaaaaatatttgaccgttcgtcttattcaaaaacttttgtgaaatgtgtaaaactatatgtataaataaaagtatatttaacaataaatcaaatgataggaaaagaattaacaattacttacattttttgaataagacaaacggtcaaagatttttaaaaaagtcaacggcgttaaacattttgagatggaggtagtattagttagcatcaaaaagggaacgtcgtggtctctcagggtacatcgatttgccctttcaatacgataaccatgcatgttgttatcgcctcatccgtgagtatgggactactcctaacggctaatacaaacctagggtgtgtttggttcacgatcatatatggatgagatatgctcatccatattttgttgaatatagtgatttaatattttttttttcatttggtttgtacgcatatgatgattcaactttttgtttgggtggaacaatgtagcatggataggagaagccaaaatttagtaggacccatttattatatatactctctatgtttcatgtgataagatgtttgacttttttcgtagacaaattttgttaagtttgataaagtttatagaaaaatatagcaacatctaaaatattaaattagttttattaaatctaacattgaatatattttgataatatgttttagataatattaaattagttaagagttctcttctgcagtcatctaaaaagagttcttctacaggtaattaatttggtctatagttctatatacgcatgtaggcaatatgggagaacaaaatggcaatgtataacaatatatgagaatagaatataaaacacttaatttttatttttatcttcatctccggaggattcaaacaccacctaactgatactgttatagtaagagattttagatggacccgcatgcggactcctattttaagctcatgattttctaaaaaataaaatatccaatcaaaatatcaaccagcgtcgctgggttggacgacaggagtaaaagctagctatcgtcttttgatccggccctgatcaatggatttccactctctcagctcggcctatataaagctaacgagtacactccactcccacagccatctcctctctactgtcaatctcaagtgcgtgcccggtatcagctcgaccggtctcgcacctgcaaccaaaccacacacagctagctatcatggcctctaagccagggcctctcactcagtggccgtggcataaccttggaaactacaaggtactaaattatgttttatcgtcatcatcagatttgatttgatgccatacgttgtttgtaagctgattgcaacaatgtgagtaattaacgactgttgcgtacgtggaaatctacagtacgcgctggtggcgccgtcggcggcgtacagcacgtacaggttcgtgacggcgagcagcgcggcggagcgagacctcctcaacttcatggtgttccccatgctgctcctccgtctgctctacggccagctctggatcaccgtctcccgccaccagactgcccggagcaagcacaagatcgtcaacaagagcctcgacttcgaacaaatcgacagggaaagaaactggtaattaatcgatcaaattgagtgtacgtctaagggactgtttagtcggtgaaatgaaaatttcgggtgttacatcttttgagattttgcttcagtctagcgaaaagtaccttaaggtaacggtatatcacagtactaaatcgtttttgttcgttgaatcaaactggacaggatggacaatattagatccaatcatcagaaacgacacctcgagatacttttcgttagactagagcatatctctaagttttttgggttttcatatttacatatatggatgcagggatgaccagataatcctgacggcgctggtgttctacttggtgagcgcgacgatgccgcaggcgcaggtggcaccgtggtggagcacaaaggggatggtggtgacggcggtgctgcacgcggggccagtggagttcctctactactggctgcacagggcgctgcaccaccactggctgtacgcgcggtaccactcgcaccaccacgcctccatcgtcactgagcccatcacctccgtcatccaccccttcgccgaggaggtcgtctacttcgtcctcctcgccatccccatcctcagcaccgtcgccaccggcaccgtctctgtcgtcacggccaacggctacctcgtctacatcgacttcatgaactacctcggccactgcaacttcgagctcgtccccaagtgcctcttccacgtcttcccccctctcaaatatctcctctacaccccatcgtacgtataaatttacctgtttaaaaatataccattacaatttaacgggattgctatttagcgcaatgttggttattttagtacacctttttttctttctgaaaactttcattcaaaaaacttatattggagaacttttacatgaaaatactttatatgaaaaagtgtacagtgagaaatatgagtaataattaattatactaattaactgctaatagagatcattaattagtgtatgtatgtatgtaggtttcattcgttgcaccacacgcagttcaggacgaactactcgctgttcatgccggtgtacgactacatctacgggacgacggacaagtcaagcgacgagctgtacgagaggacgctgcaggggagggacgaggcggcgtggcggccggacgtggtgcacctcacgcacctcaccacgccggagtccgtcttccacaaccgcctcggcttcgccgccgtcgcgtccaacccgcttggcgccgcagcctccggccacctcctccgtgccgcctccgccgtcgcctcccctctcctctccctcttcgcctccaccttcaggtcggaggccaaccgcctcgacaagctcaacatcgagacctgggtcatcccaaggttcacctcccacgtacgtaattttgactaatttttaaatacaaaatatactcatacaaaatctccatttctttaagtatttttttctcgtacaaaatatacgtatagtttggaatgtttgtttttgtgtatgaggaaatagtgaattaattgcgtgcattgatggaatcgcagtatacgtcgaagagtgatgggtacaaggtcagccgtttgatagagaaagcggtgtcagacgcagaagcaagtggcgcgagagtcctcacgctcggcctcctcaaccaggtaaatgcattcgctgacccacctgacagatccaattcattgcatgccttctcactgttcgccggctttaatgtaacagtaccagcagtaggtgcaacttcgtagcatcactctttcctctctgcactagctccccaagtagttacatgggaccgaattcacctaccaagatttacaaaatttattaggctgtgtttagattcaaacttccaactttttccatcacattaacctgtcgtatatatataatttttcagtcatattgtaccaattttaactcaaactttcaactttagaaagaactaaacacagccttactagcatcagacagtataagaatttttttttcatgtttctcaaaatatatctggacatcagttgaaaacgtgcataaatgcttatacaccattttggaatggatggagtaataaatttcagcagccagaggttcatatgacagtggcactttttacttcaagaaaaaggaacagtgtttagcaaatgttcgccccataaatctgctttggtcctgcacgggtatatgtcaggcgatgctaattaaatcgatccaattgtacgtgcaggggtacgatctgaacaggaacggggagttatatgtcgtcaggaagccaagcctgaagacgaagatcgtcgatggaacaagcctcgctgttgctgccgttctcaacatgatccctcagggcaccaaagatgtgctcctcctgggaaacgcgaacaagatctctctcgttcttaccctgtccctctgcaagcgggagatccaggtataataccaaaatgacagtactcgaccagttaatattcttaacagtatcgatcacggtgattaaaaaggttactggctgtaactaatttcgaacaaaaaaacaggtgaggatggtaaataaggagctgtatgaatgcctgaagcagcagctgcagcctgaaatgcaggagcatctggttttgtcatgcagttacagcagcaaggtaattgaaaattggctctgtttggatccgaagggctattaaatagcccttcaggattttgctatttaagagtattaaacgtagattactgacaaaactcattccataactcctaggctattttgcgagacgaatctaacgagatatattaatccatgatttgctacagtaatgctacagtaatcagccgctaattatggattaatatatatcattagattcgtctcacaaaataggctaagggttatagaatcggttttgtcgataatctacgtttaataatcctaaatagcaagatttcagagcgctatttaatagtccgaaggatccaaacagggtcattgtgggtaactggacgttgtggcgtggatgaaataaatcgaaactgcgtgcgtatgcaggtgtggctcgtgggcgacggggtgacggatgaggagcagatgaaagcccagaaaggatcccatttcgtgccgtactcgcagttccctcccaacaaggcccgcaacgactgcgtctaccactgcaccccggctctactcgtccctgaatccttcgaaaaccttcacgtttgcgaggtactccctctgtaccacttacttcgtccgtctcagaatatagttatctttagctatgaatctgaacacatatgcacgcagaattggttgccgaggagggtgatgagcgcgtggcgggcggcggggatcgttcacgcgctggagaagtgggacgggcacgagtgcggcggcagggtcaccggcgtgcagaaggcgtggagcgcggcgctggcacggggattccggccatacgacgaccaccaccaccccggcatcacccatgatggccgtggcgggctgtgaccggccggtggccggatcgaagcaacctggcctgattgtgtgatcttgtgtgtgcttcttcgctcggttgatatataggagtatctccgtgtgtgttatgatggggccagattaatatccagctataaaatcccaagctgtattgttaattctctgccggtgtcataatctattgtttgagcataacttaaatttgagcatgattaatttggagatactctctgtttcccacttgctactgtaatgagtactttcctacagttttatcgctacgattgtacttgtagcggggtagcggctgattatcgatgtatatatccaccattcatcgtcacaagcacggttgattatagagcttctagctccattcaagagaagcggtccttttcctaatatccggcgaagcttccttaagatgtggctgatgtggttgaatctagtcgagatgatctcaacctctcttgcaaggaggccccttttgggtatggtcgctggttttctttgcagttcacaatgtttattctctctttcattagtggtttggatctaaccgtttttcttgcaatggttgttgttgggttgatcttgcgaaagaaatttggcgaaaatcttcggtggtgtggccgaggatcaaattgtttgctagtgcctcaaccttcgtatacgagaggtcccttcagggttcatgaataggctctacctgttgcagctcgccttgttttaagccccgccaaaatcaagatcaaagcatttattatcagcgtcgtaggcaaacaaaggagaatgacccgattacctttttattctctttgtagattttttctgcagaatgttgatctaaagtataacttgcctattctagatgggcttctgtgcaaaactggatataccctactgaattatgctcgacgcactactgcaactcatgtatcttgttcttctccctctgttgtaaaatgaattctgttctgaatttgaatctgaacatacgctatttgtttaaaatctaaaaccttaatgtttaaatcatgctcagtgctcaatcctatcaatttcattgtataatatgacttatatagagagagaaaaagaaatatcgttaggaagtatggtgatccgttttcaatagttaatgtgtaaaatgaaccaataaaatattttaaaggagtaaaatgaatcttttttttaagaaaaaaaaatggaaccgatagacagacagcgtctcggcctcgactcccgttcctcccgttcctcccttcggtcggagttgaacgacacgacctccaccttagggaggggagcacacgcggccgatttccgaccgtccgtttgcaagagatctgacctgtcccgtgcgacacggacggtccagatcgatccacgacctcccccttggaagcacgcgctggacacatccagctcctacctctcctgaatcgctcgtcagatcgcgtcagttcttcgcgatgcctcggcggcggctccggcgcggggacctcgcctgttcggtggcggtggcggtggcggtggcggcggtggcggtggcggccgtgggggcggtgggcggaggcgatggcggcgcggatttcgactaccggaagctctcggggataataatccccgggttcgcgtcgacgcagctgcgcgcgtggtctgtgctggattgcccctactcgcccttcgacttcaaccccctcgactccgtctggctcgacaccgccaaggtcagaaccacccctcgttccgtactgtcctcctgatattcagaaagctacttttgctagtaactgttgttgttctggataatatatgtgcttttgttcttttattaggattcgttggtctgttcttgtgaggcattgatggattaaagtaattttgcaatggcccatcaggcagatgcgtgtgtgcgactgcacatctgcttgatttgagtgaccatctagttataggttttggaagtgtttttaggactaaatcggttgtgtgtactacgtaaccatgctaaaactagtgacacgttcagttagaagaggtttgtcattacttcactggaaaagggatatttgttaattgtgtgatggttgggactgtttcctgtaaggcgtcatacggcttaattgggtgaggttgttacagaagcattcaatctgtgcaatgaacaggctgtaacgattatatttgttacatgtagggggtcatatttaagtattatctttcattttcatacttgcgacttaatcgggttcatggtgcagctcttatctgctgtcaattgctggctcaaatgcatgctgctcgacccttacaaccagacggatcatccagagtgcaagtcaaggcctgacagtggtctttctgcaattacagagttagaccctggttatataactggtaaattatatgcctcgcttaattctccttggtattgattggattattgaattttgagtacaaatatgctgcacgattcatcagcaatgtgatagattgtgatttatgcttcaactcccatgcaatggaaaaaaaaaaccatcgatggcaagtgagagtgataaaatttgacatcaagcttttgtgagttaataatggatattgccatgagaataatagcattagctaggttacattgcaaattcatgttcatcggtaagctgtagaattccccatctcgttcctcaaagaataaaaaaatgattagccataaaaaaaatctttcttactaatttggttttattggccaagttttcaggtcctctttcttcagtgtggaaagaatgggtcaaatggtgtgtagaatttggtattgaagctaatgccattatcgcggttccatacgattggaggctgcccccttcgatgcttgaggagagggatctgtacttccataaattaaagtttgtaacacttcacttcatatcacatagcaatcaatttactcactgcccattggctttcgatagtatttgatgttattactaataattggtgtaaaaacacttctaaattgtatcaaccagaatatactcactttgtttaccttccataccctcaaaaaatcacgcataactaagtagtactagtatcagaaatacaaaggtttggttgcctttggtgtgcatgcaagctgaaattgataattttttttgcgggggaaattgataagcttttacttgcttcttttcatttttttatgacatccttttcacttgaattaaaagttgttttcttcaagtttatacaatacttgataatgacacggcgatatgtcggaaattcattgttgcatgcggaaagatagtattttggtgctcatagtccttttaactgcaggttaacttttgaaactgcattgaaacttcgaggagggccttctttagtgtttgctcattccatgggtaataatgtgtttcgctactttctggaatggttgaaactagaaatcgctcccaagcattacatccgatggcttgacgaacatatacatgcatactttgcagttggtatgtaaaccagaaggaatttaattcatcaccatcgttatttgttagtgtcatgccatttttccttgctttcaggtgcacctcttcttggttctactgaagcagttaaagctgctctttctggagcaacatttggtcttccagtcagcgaggtcagcctttatgaattatatatttttcaataatgtgtcctctgccctcaggaggctatatttctgatatttatacatttttcctccaacattgttagtgttgaatttaagtatgttgttggttgtccaatactgaatagtttttatttcctttttggattcactaggttttgtggtgattcttttgccccttgttctttgtccctgccctttctgagagtactgttctggtaacctctcagcccttctacacgtgcaagggaaccttttagtactgttggagtcttggagacaacaatgccttacttctcatagccgattcgcacggccaggttgtgtgccacaaccatgctagttttagagtcagttagggaggttgttttggtgcatgtataaattctctaccttcgagtgatacacatgtgttgaatctgtacttagctatatattgccaaaattgttacattatatgccatcttataattatattgtctcttatgcatctaaaattgcttttattgttttcagggaacagcacgattgatgtttaatgcatttggttcatctttatggctcatgcccttctcagaatattgcaaagctgataatatatactggaagcatttctttgagggaaagggaggttgccaccacagacagcaatgtgatgaaatggaatataagtctgaatactcaggatggcccacaaaccttgtcagcatcgaggttcctacagttcgaggttctttgttgaaatttcttcccagctttaatctatgattaagattttgcttccactgagcaggtctaccttttcttttctttcattttctgttttcctctggcagatacggaagcatacccatccattatggatacaactgagaacataacatccagcatggagtgtggaaagccaactcttttgtcattttctgctagggaggtttcagatggtactctgtttaaaaccataaaggattgggaccctcagagcatagggcttatccatcagcttgagaagtgagtttgcaattttgtatgcgccagtgctgctactttgtaaattgtaattctcagtttcacatacatatttatcttcaaagtaaaccaccaacttacatgtttttatatgcttatggaagtaaatatgtgtgattttgattaaattgtatctaatacccccacattttgatctttgttgatctcaggtactaccagggtgatccagttcttaatcccctcacaccctgggagagacccccaataaagaatgtgttctgcatatatgggcttgattcaaagactgaggtatgattgggatttttctttgattgttaaagtttctactttagcctgctttgaaccacattaccattcaccgatttatggccttttttgttaagcaggtaggctattattttgcaccgagtggaaaaccatatccagataactggataataactgatattatttatgaatttgaagggtctctactatcaaggcaggtatcatgcatcttgtgttggaaagtctcgtgtccaattctttcaaattatccattatctgtctttatgtatgtctgcttctagtgtagtttcctggaacagtatttttttttgctttaatatgaaaagatatttgtagttcgcagactcatttttcatggctaatttgattgaatgaagatcctagtaagttgcactggtttctaatggtaattaccacagataatagcttttcgtgcatttgttttctcgaaaaatactgacctttgaacctttggcttttgatgagttcaattctggtttggacaactgtttatctggccacatttttatgtcttttgttttagaataaaatagtaacacaatttattctttccagatcaggtaattctgttactggaaagcccaacaattccagcggagacggaacggtatgttctactgtagtatctttataggtcaattcaatgtcttgagttgaacaaacaagactttgtggcaggtatcctacaattctctctcatggtgcaagaactggcttgggccaaaagtgaacataactagggctccgcaggtattttaccatgtgcctagtgatatgatcctcagcagaggagtttgaggcctgtttattaatttgttttgttgtggctaatagaattattgactgtttccttgtagcatatcacaatgttaatgtgcctttcctgctttgtacatcctactgtttttgcaggcagaacatgatggatctgatttacaaacaaagatgaatgtcgaccaccatgtaggccagggcatactcccaaacatgacgaggactccacatgtgaagtacataacctactttgaagatgctgagagcattccgggatggagaacagccgtctgggagcttgataaaggtgggtgcaaatcttttagttgttttttctccatttttttcatatttatgtcgtaatgtttgtccttatgccagctttatgcatttctttgctacaagggaataagaaatccatgtagaagtttatgcttagaatatacatatatttacagtgattcaggcggagtacttgtgcgtgtgcccacatactccagatttaacatgcaaccccctctaaagtttaatcattcctttgctatacaacactcattttgaaaattattattttaacagcaaatcacaggaacattgttaggatgccagtactgatgcgtgagttgtggcttgaaatgtggcatgacatgcaccctgatgcgaaatcaaaatttgtgacgaaaggtgtgctcagtttcaactcctattaccagatatatgaatccccctgcatctgatttgactttcaaagccactaacagaggtgcatgaacagctttccgaggtccattgagaaatgacgattgtcactgggactatgcaaaagctcgatgtggctttccagaacactgtgaatacaggtctgcaactcatctttcattccctttttcttgctattatcctttttcattaacattgaattttatggtgaccatatgccaggtacacttttggtgatgtccatctaggaatgagttgcaagctgaaaaattcgtcgactaacctcctgcaacaatatctctgaagtatgtgcccttcaatttaatgacgtttggtgttttacggtattctaaggctctaacttgtactgctgtattgtggtgcagaattcttttggatcatttttatggttatgatattattcagttggactgaaccaaggacaaaaaaagggtccagtcagaaacaggtgagcatgtattgttgctcttatagtcatcatgattatcatcttggctagtagttgatatattctgttttctttttctctttttgaagataagctgatggatactgattgaagctatacattgtttttaatctgatttatttttgggctgaagatggagattacgatatttttaggactgtatagtttgtgtttctaacagatccatagtggatgtcagttgtagaagtatctttccaatattgtgaaggccccatgaccatgaaccgcaaagatgtatatatattacgagtaaatgttaatgtttggacaaataaagttctcttgattcacggtctggggaaagtctaccaatgctgattaaaagaaaacttcttacctgatttcgtttccccttaaagatgcatactgctctcctatactgatgcatggcgattcattggtgacatgcctgcctgagtgatcgataaacttcactacgtactcacggttgttatggattttaaatcagtgaacttcagtgcatggggtaaactatattttcttttcctcttcacgatttacaccgtttatttcgataaaaatcatttaacagttgcttttttggagcgcatgtgttccctcttccctgagaggctgagattgtttttaagtagccggagaagagtggagtatatctgtttggctaagttgtgtgaatgtaggaagcagggtttgttcataccaaaattaacattaacaaattttgataattctaaaatttggcaaaattcgataatgggcttgatcggttgtgctggctgctgcagctctttggtttggattggggctgactggctgcagctgctgcaaccagcacttccgatcagggccaatgctaaattttggtaagatagaagtatatggatgttgtttatagtttgttatcataccaaatatccatatatatatatatatatatatatatatatatatatatatatatatatatatatatatatatatatatatatatatatacataccgttgtgtgaagaagttttcagaaaatcaccgaattttgacatggtaagatattgtggagtatttgagatgtgtttagattgcttcacaatcctaaagtttggtgtggttgaaaatggtagtaaactgaaccgcctctaagtgagcaatcttagggcctcatcttttcatttattcttatgcttatcaaccaaaatttgatttttttaaccttaaatttgaaactgattttgaggtttgtttttatcgaaatttattttctagcctttatttttagatcactaagaacacgtatataaaagttttattcgcaaattacttttcgtttgcaaatatgtcgtttcgcttattccgcgaatatgatggctccctcactactcacataaattctgcttgcaaagcttatttctaatatacattttagaagaaaaacaaaacagaagtgggataaaacggcttaaaaaaattccgcatgtctgcagaagtccagagagagccagagacgagaggacgccatcatgcattcatgctgatgctagaacaaattcgaaagtcgtataaaaaaagcacgtttattcggaagtcgaagctgcctcaaacactcgaggacccagctgccagctgagccggacgcaaccgattcccaaccaaccacgcgtccggtacccgagccactccccttctagaagattcccgtcactccgcgacgcgcttggaattttcaacgaaagcggcctcgcacctgcctccatccgtcgccacgtcaccccctatcccccgatcggacggccacgaaaacccgcacgcctccgtttccgtctcccttctccccacccggaggagcacacggctccagaagcttcctccattaattctttttgattactcatataatcaccttgttatttctttatatttctccctcgtctcgcccgcctccgttccgcctttggtccagatccacgcgtgttgcggacttgcggttgcttttgttcgtcttctcccggagattcggcgtgttcgtgctgcgaaatccgaactacttctgctgctaagatttctgccgcgtgctaatggcggaggtaaggctcgtcggtcccctacctgaactcgtcctcttcattggctgctgctcctgtaacaatcgctaatggcggagagggatttgggtgttgatggtgtggcaggaagggtacaaggttgttcttaacgtgtacgacctcagcaacggcctcgcgcggcagctctccacctccttcctcggcaagccaatcgaggccatctggtgagtgaatcagatctggcggcttaatctggtggatttttggatttgggtttgggctaaattaaatcggatttgatttgttgggtaggcatacgggcgtggtggtgtacgggaacgagtacttcttcggcggcgggatccagtcgctggcggcggggaggacgccgtacgggcggccggtgcgggtggtggagatgggcgagacgcacatcccgcgggaggtgttcgaggactacctccgcgacatctcgccgcggtacacggcggagacgtaccggctgctcagccacaactgcaacaacttcagcaacgaggtggcgcaattcctcgtcggcgccggcatccccgactacatcctcaacctccccgccgaggtcatgtccagccccatgggccccctcatcatgcccatgattcagaacctcgagtccacgctccggaccaacgccgcgccgcaggccacgcagttcgtcccctcgtccgtgccgccgccgccgccgccgcagaacaagcccggcgagggctcgtcttcctcgaagcaagaagacaaggcggccaaagcgaagcagggctcggcggctgacccgctcggcggcgcgagggggaaggtgcaggaggaggtgatgcgggagttcgcggcgatcatggcgagcgggacgctgcgggcgagcgaggcggcggcgctggcgatgcggcgggtcatggagcggcacggcaacgccaccatgcagcagagctagacgagagagacacacacaccaccatacattcgacgcgatgatgcgtgtcgcaatcgcaattaccgagtttttacggagtagttaacttctttatgaatgagaaggtgatttctgtagcgtattgattgtttgttactgtgtgtgaacctggactgttctgcttaaattcgataatctttctcttgtctactatccgatggatggataacgataacccattctccattattgaatagacaaagcatgtttgtggtgtctggtgatcagactgttaactgtgatactactattgtcgatttcattcatcgagtcttttgtttgtcgatgtttagggccttgtagccaacataatcaatttttgcgatgtcaaatttttgataatctgataatattgctaagttttgatatgatttcttatgtatttatagtgtgtttgggaccttttttagcatcggctgcggctgaagcagctcaaagtggctgcaatttgcacaatttgcagcaattttgctcattttggtcacaatttgcagcaattttgctcattttggtcagaagtgtaaaaagaaatcatattcttacgatccatcatcctacaatccaagaaaataagtggttaacacatacaacgaaggacatagctatttatttgaattatttaaaaggacgcgactacaccgagagtgctagctagatagtgctaaaaagagacaccattctttccaaaaaaaaaaagctactacactcaatatctatatattttttccttcttagagaagtttctcttaaattacttatccgatttataatccgattacgccgttgtgttcattgcaattaaatctttacaacaagatctcacatgattatattttgatgaaaaatcacaaattacttttatgatatatgtataaattacttttagatttcactaagttacttcttaaactataaaagtaagttcagtaagtctaaaagtaatttatatatactgtagaagtaacttacaacaaaacgaaggtaactttggcatgtcatttgaagtaaatccgttgtagagataaaaacatgactctatctagaaattaaattaatcagcacaaattatggaattaactaaaaagtcatatttttatccctacaacgaatttacttctaatgtcgtgacaaagttacttccgttttgttttaagttacttttaaaatatatgtaaattacttttggacttttattgaatttacttttatatgtctaagaagtaatttagtcaaatctaaaagtaacttatgtatataataaaagtaatttacaaatataaatattttttcatcgtaacataatcatgtaagatcttgttgtgaagatttaattgtaacgaacacaatgttgtaatcggattatagatcgaataagtaatttgagaggaaactttatttgaataggaaaaagatacccacgtgaactttatttgaaaggaaaaagacacctatgtggatggatatcatgacgacgtgcacagttagatggctctgagatgcgtcgcgctatagagctaaaccgagagcgctctcgaaatagatttcgcgtatttaaaagcatgcatgccataataacctcatcactctctggtcataatttgaattattttaaagcatgcatgccataagaacctcatcactctctggtcataagggaggaacaaccaaagatgatatatatgcatatagttagcctcattggtggttatataacatgagcttcagggtaaggaaatcatctcaactccacaccaattacgctcaatagaaacagtgctaatgctaagagtaagaccattgcggtggctctgctcctcgccacccttgtggcggtggttgcggttgaaggagccactgtaggggaggatttctttcgacctttttgtgcaaaggattgtaagaagaaggaacaaaaggaccccattgacaacaagcattgtatagacatctgcatcatcttaaacaagcaacttcttgggcctctgagggagaaaaaaaatcccactatggaaaaattcagcgttgtgtgcaatgaagggcgtagcaaagaatttaaggaggatcctgccaccaacaacaagcattgtgtagacatttgcatcattttaaacaagcaacttcttgggcctctgagggagaaaaaaaatcccactatggaaaaattcagcgttgtgtgcaatgaagggcgtagcaaagaatttaaggaggatcctgccaccaacaagaagtgtgtagacagctgcatcggctaaggaaatcaatggattcttagcgaaaggtgacgcttccggtgttcctgcgcgtgcatgattttgtagagttgcacatctgttccgtcatccatggtcgagtgacaatccccattaatggttctcacccattgtcatgttgttccttttgcgtcttcagttgtttcactatttggtgtttataaattctatgtgattgatctgatatgttgttcttcccaatgttaccggatgcattagttatctttaattgattaaataaatctagttgttctttggcttttaacactcattaatctacggtttcatattccacattgtgtacatgtaatgttaatatatagatatagtaagaacacagaaaagagggtggcgatacgcagagagtagttgtattgatcgagggataatttataatgatcctaggtgtacatatttatatccattggtaaatactagtcccgatcggacacgatataagtttcgtaaagataacaaaaaagatacaagtcctgatcggacactaaacacacttttctaaaatcaaaaggaaactaactaactctgtctagttaatagatagattgccacgccgcatcttcttcgaactcgacatcttttggataagctttctttaattgattatttttctaactgaatccgttgagaatccagctgttggcgactagtaattctcatcagccaatttcaggactctaaaactgatactgactctaggctgacgacgacttcgaggcttatcaaattttagcgttaacaaataccccatcatattttaggttggtttattttaagacgaatgaagtattttgaaatttgtatgctaaattatagctgtctaaacttttaaattttatttagaatgaaaaaaaataatttattcaaatattatcaatgtaatggcataactaaatttatggatttgtagagatatgaatacccagctaaaaaaaatcttaaatccagagttgtgccaaaagagggatttattagcaacaacctgataatcaaaatttgaactttagtttcttcggtattgacttttaaactactttgcattacatatataaattttacccataaattatttattatttatatttcttttcactcgtcatctccacacgtttgcatcagttcacacagccacacgttgtgacgcagccaaggcaacctcagaggaacccaagtgtcagagacatcgtcactgtgtaaaatcaccacctcaccctctgacctctgtctttcacaaatcccctcacacacagcagcggatccgggatgcaatggcttagcgccacgtcagcgagtccctataccggattggtcacttcccctgtttggtgtttggcacggggtagcgcaaggaccatggtaatccggacctaatcaagtgctccaatccccgcgcctccgaccctacacctccggctccgaacctgatggatggatgttagagaaagtttaatagtacagcccactactagcttcaattcatttatagccaatctaatagctaatttatataatagttgcttactatgggcctgttcagctgcaatgtgcagcagctgcaacacagtggtgctgctgcagctgcttacacaaagcactgttccggccgactgcaccacagccatatgagtgcagtcgaacatgccctatactattaatatatggtcccacccgttatacacacattgcgtcttgaagtccgtgctgtagctggctacatgtctgtagcccgctgctcttctctctcaacttttatctcattaaaatatgtttacagctggctatagactgccattgcacctgctcttatagcaaggctaataatatagccgacttattggctataaggttttttttagtctgctcttagcccacacatataataattagctatttacaattaatatatggttggtttggtttgtggcctaaataagccttaccaaattttgtcaatgccaaaatttggcaaattttggcatgactaattttggtaaggcaaagttgtatttggattgaagccaaaacagcctaagttcactattgaaatggcttattttcttagacatgccaaaatttggcttcaaaccaaatagacactaaacactattgaaattgccaaatattggtaagcctaatttaggcctcaaactaaaccagcccatagggcccacttgtctctctcacataatttcttggtttttgtgtccaaaccggctgtaagtttacagcccacttctcctctctctctcctctcttctctcctccacctcagcatttagctgacttacagccttctattatacttgctctcagagcagctataatagcaagctataagccagctataaatacatttcaagaagataaaaaggagagagaatagcagcgggctacagatccgtagccagctatatacatcacgggctctaagatacatgtgtgtatgataagtgagaccaagtattaactgtgtactatatgttataagtattttctctgtcccacaatacttatctttctaggttgtttaacacaaattaaggtttgagaagtaaagactatattgccccttatttgaatagaagcacgagagtggtgaggatagaatgggtaaaaaattgaattggaggtgattgatgtgacaagtaatactaacaagtgacaagtattgtgggacaaaatttgaactccaaagcgacaactattttgaggcggatggagtaactattttataaattggctattaaatagactattaagttagtatatgagttttttttaaagagatttcttatacagctctttttgtatttccaaaagcgatcaaacttacaaatcaactcatacacaaatgacgtaccaaagtgctgacaaaaatatattcaatttttataataatagagatagagaagagatagagatagagatagagatacagaaatccatattatagtatgatatcacgaattagagtgaaagtcatggattgtttgaatgctagtatttgagagtagtagccgatagcacggagaatcccacattagaatgatctagtatacggcgatgcttattctaggttatacttattggttataccttttaaattagtttttaaactttggtagtctatgaacatatggttttttagtcacatatgttaaaggatagagtcatgcctttaagatacaaacacttcaaaagtaccttcgtcgcaaaaaaagttttttaatctagctttagctattagttattagtgttagattggctttatggctttaaaagaactatttaaaactaggaaactttgagtttgtagctaataaggctaaaataaacttccataaagtgatagattgaatatggcaatatttatagtagcaaaagaaaggcgtgatcatatgtttcatggaaagatatataatgttttccggaacctataaatactactcctgtatattatggacattttccttctaatcttagctggtaacgggggtctcatagatgattcgtaggcaacatttaacgagaataattaagggtgtgaaccgcagataaccaaacttgtttcaattaaaaaaaacaactaaaagttgttaaatacaacatccatcctaaaatatagcaacatatatagttcatagctaaaaactgcatatattttaaggcagaaaacgcaatactataatgtaagcataactttggccatattaagatatgactaacattgaagttcattaatccattgtcgagccattaaagtcatagttctctccgtccaaaaataataaatgcatccatgtaattcaaatttgaactacacgtctactacaattattttggaatggaggaagtactccctccatctacttttgatagtcatatttcatcttggcacacagatcaagaataagtaattctacttatcatctatttaaacatgctactaatatttcctcgtagacaagtgattcattagtatttacatttctcgatgcccatacagccaatcttgtgtggaagaatggagagtcacacattaaatttgagaaagtcattaagatgataggttgttggattgaaatatgcctattaaaaataaaattttcagatttaaaaatacgcctatcaaaactagatggagggagtagtatttagaagttgttcggattgataccatttcgaaccataccagtaaagttgccaaacatgtgtatctatttagtttttttaccaaactctagtaaatacaaaagaaatcctgtcaaaacttggtaatattgctaaattgctaaaatttttgtaaggtttattttagctacaatctaaacagacctttagatataaaccagtgcgagatataggggttattcatattataatggtaagttggcaatattaccaaaaatttgatatgatttcttatatatttatcaaagtttagaaaaaaactaaatgcatatatatttttgacaactttataaaaaaataatatgatttaaaatgatatcaatctgaacacccatgtaaacgggtgcgaatgataattggcacattattgtccatgaaccattgcgcaaaaatgcgtgcggccgtctgccatccgaaccttcccgaaccgggttcaccactgtaagaaccaagccgcactcaaaacccacgtacaccccatgccttgcctcatctggctccctctcttcctctccctccctccctcccttcgctcgctttctctctcctccccttccctttcctccccttccatctctctctctctttctctcatctcctcctcgcttcttctcaagcaaagctagcggcgagctcggagtagcggcgcgctctctcgtacgccaaccgcccggctcctcctcctcctccccttcgggaccccgtgcccgagctcgccgccgccgatcgggcattggatccttccaccaccggtgttcgttcgtagcggattttatttttgcggggtttctcggcatcccctgagtcgcgggatcgcgcccaatcggtaatgtgggctctgatcccttcgtttcacgcgaatttggggctcgattcgttgctgatttctgccgcgtttggttctggtcggtttaatctgtttttgcttgcagatggcgcagagcaactgggaagcagataagatgtaagctactacttggatgcgttttttgggtgactgtttttgttgtttggggttaattccttccttcccgtgctggttgtgcaggcttgatgtgtatatctatgactatctgctgaagaggaacttgcagtcgacggccaaggctttcatggcggagggaaaggtcgccgctgatccagtcggtaatcatctcatatccgctgcttctctagttgctgccccttttgtttttttgccgggtttttctctcgtttcaatctccaaagtaagtttgtggttacggtgatttgaggttttatgtggagtgtcagagttttgagattaaccagggcgaattctgggtttcgaactggaaggggagggccttctagtgctaaaatgatgaaggaaatttgaattttattttattcagggagtaattttcagccaaattagaacagagaactcggaaaattggaagaggtttgcagattttggggcaaaatttaggtatggaagctgaggataggcagagattcaagctaaaataggaggatattttgaaatttgttgatagtaacttggagaggctcgtttatttatttatttatttatcctgagatggcagacttgaggctacttgtgtacatggtataatttccactgtatgtattctgctagctatgtaaatcgacctattgttatcaagtggatgagaggatggcgtgattgtgttgatcgcttttttcatgctctcaagcatgctgggttttgaggaaggtggcaattatttgtttttgccgtgcattgtgtaactatttctatttttgcagtgatttcatttgttgagattatttagttgaattgaagcataatcaattcgatatcctgaatgcaatgttacattgactgataatggtagcatttgtagtggataagtacatgggtgctatatatggatttgcagtacatgcaaaggagaaggcgggaagctacattgcttatttggttgcggttgtgttcatatatctagcacaatgtatcttgacatttatagccactaatgaaccattaatgtggaattgaactaaacttagtatattcagtgcaaaaccgtgctgttgcaatttgtgtgttgtggggcctgtctagattcgtagtactaagatatgtctaatccggctttaggttgctatattttgggacgaagggagttcctttatagttctgcgtatcgcagtaggtactattagtgataccagcaaactggactggaacacattgtcaaacacaggaattgaactaaacttggtaaatggaatgcaaaactgtggcattgccctttttaactttgaaatgaatttcttccttgctaaaacctgtcatatgagaaacggctaattggtaaccttctgtctttgtgggcattatccgagtgataacgtgtcatgtctcatccttccataatgtttgactctaattggttttcccgtcctaaatggttcttcagctcttctatgtggatgacatattgcgaccgctaagatccctaacactttgagaaatgataccatcacttttaagtcccaaatcaacttcttgattactgaaacctggcaagttagaaaggggtaggtcgacggtgtataagcgaggcagccctgtgggcggaaattctaaacgctgaagatagaactgtagtttccttgtggaaaggaattttctcttcccctctacgaattctaaatcttatgtaattctctgtgtaaaccttctaaatgtttgcaatgacaaaattcaggtggggaagctctccccctggtgatttagtcaaaaaaaagaaagaaaggggtaggtgagtttttttgccttgctgggcagagtatatctccaaagattccaaatacccttccttacagaagatctttaacgttaatgcaaaaataactagacgtatatccactccaagaagttctgcatgtggtttcctggtagagacccttccttttacctgttcaagaatcatgattgtaaattcttctcatgcagcaattgatgctcctggagggtttctctttgagtggtggtctgttttttgggatatatttattgcaagaacaaatgagaagcattctgaggttgcagcggcatacctagaggtatcctgggaattttttaagtcgccatgcatctattactcttgatctgatccacgtgtatttctgtcggaaacataggcacagcaaatcaaagcgagagagcaccaacagcagatgcagatgcagcagttgcaactaatacaacacagacatgctcaactgcagcgaactaatgcaagtcatccttcacttaatggtccaataaacaccctaaattctgatggcattctggggcattcaacagctagtgttttggctgccaagatgtatgaagagcgcttgaagcaccctcaatccttggactctgagggatcacagcttcttgatgctagtaggatggctcttctcaagtcagctgcaacaaatcatgcagggtgattctcttttagtttttgataagcttttatataagagagagatgggagaaattgaattttgatatgttactggcatgatcactaatcatatatcttaatctcataggcaattagttcccggaactcccggaaatgtgtctacaacgctgcaacaaatccagtctaggaatcaacaaactatggtgagttgttgcttcttgtgctcatcttgtgtcattttgtttgctccattaaaatgtaaaagtaaaaagatagatgttctttccaacaggatataaaaagtgaaggtaatatgggtgttgcccaaagatctttgcccatggacccatcatccttatatggacagggtattattcagccaaaacctggattgggcggtgcaggttagtcctttcctatgtatattgtgaggtcacttttgttgctaaagtgaaactgcaataatgtggagttacttgccttctctaacaacaatcgatttactagtctgtcattcttgtaataacagtaacatctaaggttgcgaatagtaaatataaattgccaaaacaaatggatattaaacaagtactgaattaattattatgctgtttctggttggcttttgtggtgaatattgcatggatatatttctagtctaaaaagcaaatgttgttgttctcaatgtagaaaaccatcctgttctcgttttgtttgttctgattttttggatgtcctttttgtttgtcaattgttgaaatttcttcttctgctgttaacaggactaaaccaaggagtaagcggtctaccattgaaagggtggccattaactgtaagttcatttatctattgtcccctttcttcatgtttttattactatctaatcaccaattaatgccagtgctgccatcctacagggaattgaccaattgcgaccaaatttaggtgctcaaatgcagaagccatttctttcaacacagtcacagtttcaacttatgtcaccacagcagcagcaacaattcttagcacaggcccaagcacaaggcaatcttagcaactcaagtaactatggggatttggatccccggagatatacagcactaaccaggggtggcttgaatggtaaggatggacagcctgctggaactgatgggtgtattagttccccaatgcaatccagttcacccaaagttaggtcagaccaagagtatctcataaaggttggtttatttttggaagcgcacttctgtttgtgttttcattgtctctagtgttcaaccatctgactgtacctgcaagttattcaggtacaacagacatcttcccagcaaccgcaggaacagcagcagcagcagagccagcaacaacagcagcagcaaagccagcaacagcaaatgcaacaggtactgacaattcgcccaggcttaacctctggatttgttttcttttcttgaaagttagcagatgtgtgcatatattgctgcaaacttcaaactttaaatctgctcaacaaaacatcactttgtgcctctacaattgcacttttgcaagcaaattaagcatagtagtttattatgagtgagttagatgtactgattgttcatagctgaataaaaaaaatgatgtttgaggctccgttgggcactgcattggcttttctcaattggatcgaaggagttagttagaggtgtttaaattagagacgtgaaagaaaatgttactgggatcagcaaagattctcctaaccgactagatccctaagcacaggaatagcaaccacaaactaactataaagcccaaagactattttctgttggcgatgtcctgcagctttctgattcttttctatagatcttgtgaattatagtttagttagatgtattgtgtgtaataggaatcatattgttaatcttggggtgataagactagattttgtgttgatcattcgctgcagcctttgtattgttttctatgatttttttggtcaatgggtttctttaaaaacaattccaagggtaagatcgcgtaaaggcaatattgaggacagcagaatgactgggatataaaattggtatgccagattattgtagttacacacatccaatattaattacagtttcatggctttttttttttgtgaacatgcaatagctttgcatgtcaatatattagacgaagattaatacaactgtggtgcgcctcaatggctactggggtggcagggagaggagctagggaaatacactaacaacaaaggagaactaaactaagagctgaactccaaagcagaaggtaggcaaggaaaacaaaacgggctaagctatgtgctgaacaaagctcccacagggttagcggtcgctgccacccactgtcatcctatttgctatggatgacgtcttttttttttctttttacctgtctactaaaagtcgacagattttgctcctgttttctctttggcatatacaagagaccaatttgtcatacaacctacatatctatttatctactatattattaaaacaaccttgaaataaggcaccaagtccgttgtaggggctagaaattcccacattaatcggagaaaaagaaaagaagagtccaaatagaaatacaatttaaaaatagctgaaattcggaattaaaaataagtaatattgaaagaagaatccatataataacccaataagagattaatcaaaattcggaataaaaataaaataaaatgcgaaattagaaaagaaagaagagtccaagtaggaatacaatttaaaaataacagaaattcggaattaaaaataaggaatattgaaagaagagtccatataagaacccaatacgagattaattaaaattctgaataaaaataaaattaatcctaaattagaaaaaaaaaagaagagttcatgtagggatacaatttgaaaataactaaaattcgaaattaaaaataaacaatattgaaataagagtccatataagaaaccaatactatattaattaaaattgaaaataaaaaatcaaataaaatccaaaattggaaaaaaaaagagagttcaagtaggaatacaattttgaaacaattgaatttggaaataaaaaaataataaatattaaaagaatagtctatatagaacacaatacgagattaattaaaattcgaaataaaaaataaaataaattcagaaaatagaaatagaaaaataatagctcaactagaatacaatttataaataat

SEQ ID NO: 20329 - DNA, 3805 bp, Oryza sativa
agtggtagatcgagtaagcaaataaaaaggtgtcaaaggagtaagaggtagcgactgatgtgacttttaagaactatgaaattattagaatcacgggaatgatagttttaaataaaatcatgtgtaaaaatagattattttaaattgatgctagttgcgcaattgcgcgggttgcccaactagttttttgaaagtagaacaccatcacataaatttggatgctttaatacacgtttctatatttttaggagctacatgtgaatttttcaggggatacatatgaaacggtcacagggaaaactaatttaagttttgaaccatggctaactggctgcgtgtatgttttccaaattttcattttgcttattttcacatacttatcccttaccatatatccatttttttgttctacaattattattatttatctccagagcaatagaaaaagaaagcaacctacatcttcaggagcagcaaatagtactggaacagggaatacagttggcccttcaaccaattctccaccatctactccatccacgcataccccaggagatggacttgggatgcctggcaatatgcgccacgtcccgaaaaatttagtgatgtatggtgctgacggaacaggactagcatcctcttcaaaccaaatggttacaggcttacaacttttctcatttcattcaagatgtttagttggatgtatgtaacgattatttgtgtcagatgataagcatcgtattttctgtacttaacaggatgatctcgagccatttggtgatgttggctctttggaagataatgttgaatcattcttagccaatgatgatggagatgcaagggatatttttgctgcacttaaaagaagtcctgcagagcctaacccagcggcttcaaaaggtaataccctgatgttttccgtattctgtaaacatgaaataacacaccttttggtttttaggttttaccttcaatgaggttaattgtttgcgcacgaacaatagcaaagttgtctgttgccatttttcttcagatggcaagatattggctagcgctggacatgaaaagaaggtatcagtaaatggacttcattttacactgctggtttttgtgggtttagtatggtaacttgtttgttgtctcttaggctgtactttggaacatggacaccttccagagccagtatacatcagaagaacacagcctcataattactgatgtccgtttccggcctaattcttcccagctggcaacatcatcctttgatagaactattaagctgtggaatgctgcagatgtaagttatgtttttgtatatgtatatgaaagtggcataggagattattcttcctggagcaatggtacccacaattagtgacatgcactttcttttaatgcactggtcattgcaataaaattttcacaaatataccatatcactaatatctgacagcacaaagtatatatttgtggtcacgattattagttggcattgagagttgagtatgtccaacctattaatctgaagttccgtatatgtacttgcatttaattttattatgaaaattgttgttttgcagcctggattctgtttgcatacgtttgttgggcataatgtccaagtcacatctttagattttcatccaaagaagacggaccttttgtgctcttgtgatggcaatggtgaaatccggtactggaatctgacccagcttagctgcatgcgtgccatgaaggtttgccatcttctttttgtttgcttaagacgttttcggcaccttttgtcttatgaagaattcatggtttgtatggtctaggttcatccatctgattctgtttttgttggacagggaggtactgcccaagttcgattccaacctaacactggacagtttctcgcagctgctgcggagactatggttgccatttttgatgttgaaacgcacagcaaaaaatacacactacaggttctgttcttgaaaatcaataacacatctatgattcagcactgtttgttgtgtaacccgcagtggatgttttcagttatttttgtcttttcctgtagctgaactagctttttcttaatggaaaggggaggagctattgctcttctgttttttttttaaaaaaataaaaaatctatgattcaaaacatgcacatctttatttccatgttttgtagtatacctcttgtttcagaaggggtgggaacctgttgtttatccttttttgcctgtgatcttgtatctgaagtctttattatcacagggccataacacagatgtgcaatcagtgtgttgggacagcagtggggagtaccttgcctctgtcagtcaggacttggttaaggtctggtcaatatcatcaggagagtgcattcatgaggttagctccaatggaaacaagttccactcttgtgtgttccacccaagctatgccaatctccttgttattggaggctaccaggtaactactgattttctttcagtttagccatatgtatgtaaaatttaccctttttttccctgaaagatagggagagacatgtttctaacaatcaattttagacatgattccttttttttttcatcttgcaacatcccatggtcatttttaacaacgctgctggtttaccaacgccacaaaaaactatcctagtgccagacctgccagtgacgcaatttcttgccatatcccacgttatgcagtggcatttcattttttggcattgagttctccgccacaagaactgtggcatggctctcatcagaatgctgtaatatccaagccaaggcatagtctgatatttggtttggaatctgagaatcgttacttctgatgaacactctgtaccttgtttgctgtaaatttctcatggacactgtaacaatgcagtccctggagctatggaacatggtaaagaaccagagcatgacgatacaagcccatgaaggtctaattgcggccttggcgcaatcgccagtgaacgggacggtggcttctgcgagccacgacaactctgtcaagttgtggaagtaacaacaataacgtacctagagataagaatagctgttccaggtaattgatactggatttcttcagcctaggctagtcatagaatggaggtgagtttgatgtactggttgagttgtgttactatctcagaggcaaataaggaagagtaggagccgggcgattgtcgcggttgagctgttcagtgcgtattgcagtgagtttgtgggaggggctgtttctttttttttttttttttttaccttgatgatagatgttgatgtagcacaaaaggaagataaggaacgaaggcctaaagttggctctctgtttcatgttgttaatgttctagtatgagatgtaaaatgtaacaatattcggtgttttaatgggaactcgctgcaatttgtccggcggttgatagatgatatataagcccccgagtcttgagattatgttgtacagtgatgttaacaacaagggactatcgcaggcagttgtaagtttctgcaggcagctatgtacgctgatgtttaacagtctgtacgtttgttctgtaaagtccagcagatagtgtgacggatgatcgttatcagaacgcttccatgtgcattcaatccgactctatttttagcagacgtgtgaaagacagcctgtgtgatggacagcaagggaaacaattgaagaagcaaatcttggcatttaagcagatgtcaggagcgttgatgccgctagcatgcggctaaatataatatcagtatgtatacaaggcagactaagaaggcaggagcaa

SEQ ID NO: 20330 - DNA, 6098 bp, Oryza sativa
atatatatatatatatatatatatgaaaatcgctagtctataatagtagctgatattgatcgacgcaatatcatgactagctacgaaaaattacgttctctttgttctaaaccattggaagaacgtcattaatttacgaccgaagagcagggatagatatccatggatgaacagaggaactcttttgatcctttgaatggatttcacctcgtttgatcaaacaccatctaactagttactccatattaaaaatatatattttaatgaacagtctaccaattacttcagcttgcgcattcaaaacacacacacacaaaaaaaaatttgaaacaccattacttagcttagctgtgtatgcatgtaccatgtaccatagttgtccttgttacctggcaaaagtccttgcagagtgccattgttattgcacaccaactcaaagcagcaagagagccatgcatattaatggaccatcatatataaaatcccagaaagaaaatcaatagatacaagctgctggggtaagctgtagtacacatgcatgcagatacagtaccacttcaatgtccttttaaaaagatatgttttttttaaaaagagagacaattttctcaaatttcttgtatacatttaaaatcttcctgtaaaagtggaaggccacatgcatgcatgcacatccaaataccagatcctcttcctttttcttttggaggttacacaaagtacacacttgctgttacttgtcatatatatgtacaccctgagcagtattccttctttctgctgcagtgtgccatatacatatatgcatgcatgtggcctaaacatgtacaggtaagttaatacatatccacaggcaaaaatatataccaaagggataagagatacacaaaaaaacgaaattgtaataacacataaaaccacaaaaaaataccgtataaacaccgtacatacagtcccttacacacagcctgtgtgacgattgttttcaagttttaacagttgagtcaattctgactgtagtttcttaattttgacggcttaattaactaagaaaccacagtcagaactgctatatgtattatacggattcatggtagtaataataaattgagtataaattaatcagtactaccagtaatagtaataattaattaaaagaagggaaatgcgcctccctgaccctggctgggaaggtcgttgacccagccgaacttctccatgtaagggttgaccaagttcgccggcgggtagtcgtggatgcaatcttcccaggcgccggcgtcggcgaggtccttggtcaccacccagtagctgctgttgcacttgaaccccgacccgaaggtcaccatgagcacccggtcgccggcgttgagccgccgcttcgcctccatgtaggacagcacgtaccagaggctgctcgccgacgtgttcccccaccggtgcaacgccatcctcgccggctccacgtcgtagctgtccagcccgaggctcttcctcaccgcctcgatcaccgccgtcccgccggggtggagacagaagtggtcgacgccggtcttgaagttgatcttggcggcggcgccggcggcggccttgcggcggagaagcttgcggaggaggaggcgggcggcgaagcgggcgagctcgccggcggggaggatgcgcggcgccaggcgctggaggttctcggtgaaggcgcgcacggcggccttcgggagcgccttgctgaggctgaccccgaggcggccgtcggcgtcctcgcggtgcacggcggcggcgtgggcgtcgtcgtgggcgccgatgtgcgcgcgcacgaggcagcggagctccatcttggcgcgcgaccggaacgccgggtcgttggtgagcagcgcggcggcgccgccgcaccggaagaggcagttgcccagcatcatggacttgtcggtccccgtgtaccagttgggggcgcacgactcggaggtgaggacgagtgccatggtgcgcgggcgcgtgagcatgacgttgcgggcgaggtcgacggagacgagcccggcgctgcaccccatcccggagaggttgtacgccatgacgtcgtcccgcaacccgaaccgcctgacgaccctgtcggcgagcgacggcgagggcgagaaggagccgacgttgatgacgagcaggtcgacgtcgcgcggcgagacggcggccctggcgaggacggcggcgacggcgtcgtcgaagaagtcgtccatctcgtcgagggcgtcgcgcagggtggggcagtcctcgcgggcgtcgaggacgttgcggggggagtaggtgtgctcgccgatgccggagttgacgatgaccttgaggaggaagcggtactcggggaggccgaggcgcttgttgcgctcgatgatggcgccggcgagctccgtcgtgaccttgcggtcgtcggagggcttgtggcacgcgtagtcgaggaggtagcaggtcgcccgccgccgccgcgccgccgcctgccacgccacccacgccgccgcgtgcgccagcagcagcagcgtcaccagcggcagcaaatccattacgtactactgataccgtgatactccacgtacgtgcaattgtggaagaaaatgcgttggatcgtggtggtgtgtggcggggggtggaggaggtatatatagagtggtcagtggtggggttggggttggcacgcgagaggcgcgacacaacggctacgtattcttctggggggcggacggggagttttggagaaaaaagcgcgtgacgatgcatggatggatgggcgcggatctgtacgggcggtgacccctggatttctcatgtgttttgctctctggtcgatctggtcgtatggcggccaacgcccaaccagattggtcgctcgctgcagcctgcaggcaggcgcaggcagccaatagttacgatagaaggctataagacgaactgcaaacatattttaaaaatataaataaagagagagaagagagcgagctatagatttatagccagctgtagcacggattaccagacacaatgtgtgtatgacaggtgggaccaggtattaatagtgtagtatataactattgtatgaatgagctattagattgactatagatgaattagagctaatagttagctatactagagtattaaacttgctctcacggagtattagccattgttcgagaatcgagaggacattattggagaaaattgataaagatgcaaaactagctgaaccattaacttaggattaatctagtattagttattttaaacttggaaaataaattaatatattttttaaaacatatttttttaaaataaaatcatactccactatttaactgttcgagaaactttcacgttaaaaacgaaagggactgactatacatttgtcgacaaattttctcttaaaactttatcaaatataaatataatataattatattataattacactgtaaatttatttttttttcactcaatctacttctgcccatcacagcctaattatttaagttttttgcctttttgtcgtagttaagctgcatgccccgtgcgagccgtgcacagatcgaaatgaaccgaagtacacacctctgctccatctccgtccgtccgtaatccaaacggcaccaatccggccgcagatttctacaccttgatgattgatacgacgctaatgatttctatattcccagttttcaccttcaacttttaccggacacacacgtgacgtacctgacgtacctgatcgatgtacttgtgcttaatttttctgcttttcaccgtgcactcacctgctgactgatgcacacagctcacacgagattagagagacgactttcccgctaactctacgttcactcatatttaaattttttccaaagttaaattttagaaaattaaacactaaattagttttattgtatctaacattaaatatattttgataattcatttgttttatattgaaactattattattatattttataaatttgataaaagattgactaagaaaaaaaaattcaaaacgactctatggaacggtgggagtatgacactgttgctctcaattatatatatgctctctttgtccctaaattaacatacagtacgttaattaacaccgctcatgctagctagctagctagttgcgcttcttcaatggatcaacgggacaacaattctacgtgcgcatgcatatatattggcagaacttaattgatctctggctggttatcacgctactatatgtttgggtatcggtagtttttttggtaccggtttaaaaaccgttacttctttttcacagccctgatgaggacattaatttctttcttggcactaatgagggagctcactagtgtctgaaataaaattgcaagagtaagaaaaaaaaaacaacgtctcaatcaatcggttttgaattcattaagtcaatgcttagagcggccccaagagaagactcacatacatatgccaggaatagatcaagaattcttcaacagaacaataatttcaatatcaaacagattaatactccctccattttttaatagatgacgccgttgacttttaaacatatgtttaaccattcgtcttattcaaaaattttatacaaatgtataagatataaatcatgcttaaaatactttgagtgataaaacaactcacaccatgataaattttaattacgtaaattttttgaataagacgaataatcaaacacaagataaaaagtcaacggcgtcatctatttaaaaaaaacggaggtaggaacaattcatccaacacgttatattgcagttgacgtttccgtacgttcctcttgctgtgagctgatctccgcacaagtacacaacgataccggcttcaccacatgcaggctcgccgggttttactgttgccactccactccacagcagtttaccatcgtgccctccttttccccttctcctttcaaacgcagggtcgtcgtggctccaaagctccttccattggatccgagcagatggagctcaggagccaccggatctactggcccctatatatgttagagatgaaatggagaggcgtgcgagtgcgaatgagaggtaggtacgaatgttataaaagttagtcgatatagtggaaagacgactaaccctcccgatcgcttcagtcattgatgacccaagacatgccagatgacgacacaggaacacatgatatttgttaacgaggttcagccgaatcctacatccccggggctctgattatgggcgctcctccccaaccaatatagctcctagccgctacgagtccatggctacgccgccatcctctccctgcgtgtctatgctacattgtagtcgccattcttacattgtggtgcccccctctctatttaagagagatgacgggttacagagtccgactctaactccaccccctaacacctattacaactccaagtccaactgtaactaaataggactagtatattcgacacctattctaacaacgaagacaaaagggagaggctggtgtccatcggtgaaagaataaggttgtttagagaggagatggaaatagtgatcgaggagacaactgaaccagcttaaagatctttcatcgatcgagagagcaagggggctggtctttttggctaaccggtagatgtggtgttccgtggaccgtgcatgatgtatttttgtcaagaccgtatgtaagctggatatatctgtgtttatgtatatatgtacatatatttagcaggcacgcacgtagtaaaaatgaactaattaagacctgcatatatatacgtatgcacgtacacaacgcggtcagatattgatggcacttgacagtaagtaggtggagataacattgaattaattggaaagtaataaggcatgtgcacgactattaacaacgtgggcttacggcgagctccctgtacatatatacacgcacaatgcatgttacctgctgcgatctcccacgtctggctagtactgtattactgtattcctttcaaaatttatcacttgggtacgtgtaggaacagatgagctagctagctactccctccatcccataatattgcaacctagaatgggatg

SEQ ID NO: 20331 - DNA, 873 bp, Oryza sativa
ttaggcgatatatatatatatatatatatatcgatattgacgatgtcaccacgaactctcgttatcgatgggtgtgttccctatcgctgaaagaataattagtcgtaaatattgtaaatgtaagcatccatgctaaatttataacttgaacatttgtggacaaatccatcacaacaaaactagcatgttgaatcaccctcacttcacggctcacaaaatttattttttttgaacgactcgcacgagacgatgcgaagttctattgatagagcaggaaaaaattacaagattacaaccctggagggtcgtaaccaggaaaaggaaaaaaaaccacctcccacacaccgacagcgccaacacacaacccgggagaaggctagcaccggaccggccgccgctaagcgtgaccgaccgccgctagaccaacaaaggaacacagataagatcgccctctctgcgaatccttggctgacgcaccgatgctccaccacctctccagctctgtcgacatgcgggacccctacaccggcggcctccgccggccagtctttgtgcgccgaaaaccgcaccacacccaccggcaactcctcctcgcaccgaggtcgcctcctccaccgccggccgcgcctctcgcgccaaaccgattaagttcaatgaacagaggtggagaatgaaatacctcagtactcatcatcaccttacaaaactgacaacaacggaagctagctaattaattcccacttctaaaagaatgtaaaagctgaataaaaagtgtggaaacatccagatcgaaacagcgctgcagctaggtttctggtcatctcacttaacagctgggtttctggttgcaggacctccatctcatgcaaaatt

SEQ ID NO: 20332 - DNA, 8234 bp, Oryza sativa
cgagaacagtagtcgtccttaattaatttgtctgcagctgagctggttgaaatcgattgtctaaacaagataggataaacgactagttaacttctactagtagctactacttgtagtcttgtctgcattgtacgtgtttttagccaatcgatcacacatctagctagttagatagtcatgtacgttactgcttcaactgcttgtcatacaggagtattcatgaaattcatcagtgctgatgatcaatctgcagtgcattgttcagaatattggatttaggagaaaaaagacatactcctatatatgcatgcgtggttggaaattattaatagtggcgtcgaaatgaagggaacgaactagctagacaacctctacgacgactcatgatgacaacgtagatgtagtcatatctagatcatcattaatccatgcatggacattatttctctgaactaataaatcatgcatgattaagaagttaggatgaattaatccaggccggcaagaggctgcaggttggccgtgagttccctacttccctagcttagttccacatgtacctgaaagctttgcttctgcaggtaggcaagctatcagctgttgtgctttaagttgcctcacgaggaaaagcaagcctttttaggccaatataatttgctcatgcgcatttgctccgccaaccatactgttggtagcgagcaagaacaacatgcatgttcaattatatatattgatgttaaattgttcatcgatcgtttcatctctgtacgatccgtcggtgatcgacgcatggatggccgttgtgctttttgcagtttttgcatggtacttcactgctttgcatcacgcatggcatatgcatcacatcggcaactatctatagtacatatatattggacgatatatctcgtcaattaattattgctccctattccgtatttctagctataaatctgaacacatatttatatagattcatagctattaattattatattttgagacgaaggtaggactaatttgctggatcggtcgttaggcgttaggcctggcatacatgcatatacatcgatcattgatcaatgcctgcattgatgatcgatgagatcgatcgaagcatatggccatatgggagatgtgatggactgtacaacgaagaagctgcagtagcaaaattttcagtggatctcgtgggagatcgccgaacttttctggtcggtcgagctaatagatcgaaatatgtataggaaatgagtgcagatctctagctagtttgcaattttcagacgagttatgaaattagttttttcattcgtgtctgaaaactttttccgacatccgatcaaacgtctaatgtgacacctaaaaattttcttttcgcgaactaaatacgcccgatcagcatcctcaccaacctgctgcttgtttattaatggctactagtagtactgtaggactagacgtactgcaggctggcgtgcaagcttaattcactaattatctcttgatactcattccgtcctaaaatataagtattttttattactctgacatagtcttcgagatacactttgaccaacaatatctataaaatagataagatgttttaaataaaaagagttacatattatgatagattgtttaataataaatctagtaacatcaattttacatgattgatattttttttgttattaatagataaagtttaaaatatttgacttgtcactatgctaaaaattcctatattttaaggcagatggagtatataattttcgtcatgtatgtaggcatctgcttcatggaggaattttatttgaacacgcatagctaccgagtactacctctgtttcaggttacaagactttttagcattatctacattcatataaatattaatgaatctagacacacatatatgtctatattcattaatatatatatatgaatgtaggcaatactgaaaagtcttatataatataaaacggaggaagtagctagagtagtatattgaacacgcatattattgatcgatcgtctttttctataaaaaaagagagatgaaaatccggcctgtagatagcttaaggcggtttcccgctaaaaagttacttctacatccgatctaaaaatatgtacctaaattaattcatattcagatatatattttggggtgacaatagctagtacaaaagttcagcattcaagctgtacatcacacaacgtgatggtgaaagagctaaacccaatagtaagaccacattgtttagatgcaaaaataccatgcatgcatgcaggccttcttctgtggttaattatacattatatactggcatctctatgcactggtataatttagattcctcataatcaacatgtaaaacaatctctctttttcccctcatcaattaacctagaaacgtacgtagctttttcgcgttttatatgttgttttaacaatatatagtgtattacattattggcaaacgagagtacacaataacgactgagaaaaaaaccgtggaacaataattgacaggtcactgtcaactgtgttgaccagcaaaatgggtagtaagacctcctgattaagttttgctacagtcagtatatataaaaaaagcttagctattcatccttgcatacgtaactaattaattgccctgtactcgatccagggggcaacgactgtgatatgtacataatctccattgcatgctatattaattattagttttatctccatgaatgcagtgtttgtatattaattttttttggaggaaatatttacatgttaacaatgttgttcctatctatcagcagtgtggcatttacatattatactgtctaaagttcagtttttctttttgcgatggtccaaagtccaaatttgctagaactggaacactcaattattgcttgtcaaacaaagtggtcacagggactaaaattataccacatgctaaagtcaaggcaatttaatactttccttttcatgcatggcttaatttattagttatctaccaactaaaacaacgatctaaaccatgcataatatatcgtggctaaaacgttcatatatctccagctgactctgtttgactttacgttttcatagctgatgatgcgtcccccatatatatatatatatatatatatatatatatatatattaaggacacgtttccttctctagagtgaattagatcaaattaagattttcagtgagttgcttatatacgcgcacatacgaattcaaaaaaaaaaaatctactgttcctgttaggcatgttccaagcacgtttttgagaatttttagtaaactttgcttgtatgcgactgtcttgatgatttcttttactcctagggaccaaaaatgcatggttagttgcggctaccaagagttccagaaacagaattaaatgtgctacccaaccattgttaacttgaccttttttcgttgacctcatatattcatgcctaacgcgtacgactatcttagcttgctcagtgtactcaatttgacaatttgagtgtcttgacaactctttacttgtacgctaggtcagccagatcagcttgaggagcattcattcgttaatgcagtagggccgggacaatctaattcctactcttatctctctcgatcggatctcgtctactgctagcttaatcaagtatacagtacagttagagtcgggaagacgtcgtctcctaacttatataactagagcaaatacaatagtgaactaataatctgcttacatcacattttaacatacatagtagagagagagaaagagcggagagagaaaagcgaacgactatattatcgtcggctcatgcgctcgctctgacgcagccctgtgcaagggatgaggtagctgtgaacagccaataaaaaaacagaactttatgttgggtaaagcaacactatagacggttactgtatttagcgtggtttaattagctgttagatgacgtgttaattttttagccctcacggttgactgtactattaaacttgctctataggcagccacactagttctttttaataagagtaatttggaaccatgccattataattttttaaagtttgagatatgccatcgatatctcaatgacatgtaagacccacatgagtcaatgacatgtgggtcaggatggcatatctcaaattttgtaaaattataatggcatggttacaatttttccttttaatttaataatgggttaaaaaaacccagcctccacgagccaagccactacggctgtgtttagttcagcgcaaagtttggattttggttaaaattggagatgatgtgactgaaaagttacaggttgatgtgattgaaaaggactgaagtttgaatccaaactttggatctaaacacagcctactttaaaaaaaatctaattctaaagatatatctaaacatgtatcttgttcggatacgtttttagaattggatttttttttaatgaggagagtagttaccatgaactaattacaggcacagtacacattttcagtaaaaggaggtcagagtccggatacatctcccgtggaagtttcagcgaagttgagattccaagatgcatctcccatggcacattcaaggttcagaaagatccatacggctttgcattgctgccagattcagtggcaatgagcggcagttgcacgggtaaagcgaggagacgcacaggctggtgtagctgcttgaccggagctgcggcgtaaacgcgtatggaagttagtgagcagcgtgcagggcgtacagagtaggcacacgggagccgtggtgagagagagagctccttacgattacgagacaggcattcactcatgacagcctcgccacaaacgagaaccatatgaaagatatagcaaatcttgagtgggcaggtaggattcaaggcagcacagtagtattcgtaaatgcgcgaggcaccaggcagagattgaagacaccaattggcacgacaagatgatacccttcttgcaaaatctgctgtgcatttggtgtccggtcagggaccatatgctattgccgtctcagggaaaaggaccattgctacattgctgttgcacacctcatactcatactcatcatacctggtgccgatgcccaccggaacacacaatccggcggcggacaaagatctcatctcctgtcccaaacctgtatgttctcaacttggcaattacaatttacagtgagcaatggatgatattcagagagtttgtctgcaggcagaacgaatgatgtcccgcccgcttatttggatcagaaaaacgcagaagttttactctctgtacaggctgatatgcagaaaccttatttcaatcaagtatacattgtctcctttttaccgttccaggtagaatccctaacgtgaaattaccagatgcaaaccagagtacactttgccacaaaatataaatcaaaacgggtatatatgtttctttatccaaaattactcatcttgcctacaagtttgtctttggcttggatgatgggctcacgcgcctggtcaaggtccgcattgtcacaaactcttcagcagcagacgggtgaataccaacctgcaaagccaatggataatattagaaactcgagtgccaaatgatattaacaactggtttattgttgtgtccacgtacagtgctgtcaaaggtcgccttggtggctccacacttcagcgctacagccataccctgcaattggtggaaagtcaggtgcaaaatactagtgaagactggaaaatgccacgatttttttgtgtgtgaaataaacacacaaactttgcttacctggataatctctggtgcatctggtccacacattgatgcaccaagtactttatcagtctctgaatcaaccaccagtttcatgacggtcttctcctgccgtctaaaaaaagtgagccgagtcaggaaacttcaccagaacaggaactataaagaatgacgacactgataggctccattactagaatgtttatggtccatgagaccatgacaagtgaaaataatgaaatacccagaaccttcaagtgataaagcactcaggagtcaggtgtaactatgacgtaacagatgatcttgcaataaacatgatacttacttggatatgctgttcttcattgggttgaagctggaagtgtaaacaagaacatcgctcttggcttcctccaaagcctgctgttcactcaagcccactactgatagtggtgggatgctaattcaacaaaaaaagaaaccatgttatgagtgacacgatgattgtggaaaagcagataatctaaagaaagcagcagcagccataaatgcactgaataatagattggtagaagcactggcaaaagcaaaaatcactagtgaaggatccttagatcttgtctattgaaatgactaattttttttctatctagattctagtccatgttttgttaatgtagaatttaattgttgcttacttcctaatgtaccctaaactacataggcatcaattagaattaagaaacatccagcataacaaccgcacacaagtttcatgctgctcagtcaaacctggaagaatagaaaagttaccctatatcacgtcatgctactctctttcactgctaagatctaagcaaataaacattcgaagtgcagacaagaaaaccaaaccacagtgtgcctcaccgaaagtgtcaaaagcaaagagttgtgaagtatatatgtggccatcttgtagatgctacttgtttcagttaaaaacaaaaactggagataacagagaacaatcaaggtttattggcttacgagaaaacagcacaaggtacatctctgtaatcaggtttagttggctggccaccaaacacagttttctgcaattaaagattaaagtaaagttgctggttacacagaaacaaagaaatttgaacacacccaatttacaaggggattatgagtcactgtagtcacttacagaaaagcaggtagcctccatcagtgcaacaggtgttaaatttatccggttcgttacatcacccacagcccatatatttgggactgatgtacgagaataatcatcaacctaaaaatagaacattgaataaacaacacaaattacttgtagtctcaaagaatatcatacaaagataatggccaattaaatgcctaagatggtctcacataggttcacgcgtaagttttctccaaggaaatacgagaagtaaatttcagatgaacaaatatgtcttcagcaagctaacagcctaacaggtaagggttcaattaataaggcaagaaaatcaacctttatagctccaatattatcaacttcaacaccagcagcttccaagttcaacctctgggagtttggtgtgcgacctgcacgcaattaaataccaggcatagcaacaatattaaagtttccttcaaagaaaagaaaatcaggataaatgccacattccaaatatagtgtgaaaagtagaatgtctcatattgagcatctcaattcccaacaacaagagataaaaaaaaatgttgtgaggatgacattgatcaatttcaaacatgcatatggtgcttgaccatgtgaaatatcagaagatacatgattttttttcatccagcacagaacagtcatcaagagagatgtattcaaagaaattattaaagtgacagagaacataactttcagcattgaactatcctaaatacctgtagcaaacagaacaacatctgcaatgatctcctctcctttgtcagtgacaacttttatgccatcggctgttttactcaactggtttacataaaaaagaaacagatcaaaacctatcgtgaaaacagaacacatgggaatcaaaatgcactttaggatgtcagcttaactcacctcagatagatttgtccctggatgtaatctgattccccttccctcaaggttacttgcaacaaccgtcctcatctcatcatcgaaacctctgcaattagtcaattcgccattaatcatggtggatagaaccgtaatcaatagcttgaaattttggctaataaaaatgacattggcattctttctccatatcattattcagttgttcagatagcatggtccaggcttcgcaatcgcatcgttttatctgataactagtttcatcatccatgttttcattgtaggttgatgatattgcaaaaaaaatgttcagaaaataaattgcatcaatgtacaaaacga

SEQ ID NO: 20333 - DNA, 9664 bp, Oryza sativa
gttggcaaaaaattaagattgtcaaaataggacagtaactaaagtggcacatgactgagccctgaaaacaagaccaaaagcttcagttagactagaaaaccatgctatcaactctagccacattatgacataaaaactgcaactacagaagctacattgatgttcttttttctgatactgagcagtaaattgttttggtgtacaattttaaatatctggaggtcacagtgcagataacagattataataaataccttagaggaagctcttttcgataaaacaagtctacgtgcgcacccatccctttccatatagaagcaaattcaacagcaatatatctgcaatatagccaccacatgaacaaatgcaagtctgagatagttggaatgacataacaatatatagtacataaatgcaccctagagtgtagacatacccgccaccaaggattacagcacgttttggtagctcctccaaacttaaggcctcatctgaagtaatagctaactcctgcaagcgggttcttatcagtgtcagccaaaataatacaccaaaggacatttaaaaaaaaactaaagggaaaagaaaatcagtgatgtaaccagcacatatatatggctaagtataatttgttggattaaagataatgctttgtccctcttgaactggctcaaaggaagtcttgtaatgtcaaatccacaccaactgtgtcatggctggacgttatggtatagtatatcagcggcggcgtaatagagataagtcagatttggcaagtgcttcagcagttggaaagtcctaataagctccttatcagagtttcatagttttgttataagagtcctagtagtatcaggttaatagtttgtatccgtttcccttatctagaggcacctcagtatataaaggtagcctagtactccctccattccaaaatataaggcacaaccaccttcaatcacctcatagtttagattaatctaataaatgtaatacatgcacccaataaaattagagatcttgatagtggagaatttaaataataatattttagtggagaatatgtgttagttaatggcatgcatgcatgtatgccttatattatggaacagctttaaaaagtagttgtgccttatattatggaatagagggagtattgtattttgggtcaagtaataagaaatatctaaaggggattaaccctaaaagttcagccatatcaaactggctatcacaaataattattgatgtgcaacagtatcacaacaaatacagaagatggcatggaaatcagcatcacgaggtcaatccaaaggtttcaggcacaaaagttggggaatataaagaagttgtcaaacaagtaacaatgctattaactacttgccagacataagaaacaagtttgcaaaggctggcagagaattttgttaccttcccaggaatgttgacacgttgagctcggctaccagttgctatcaatatgtgctttgctgtatatctttgctttgaaccatctggctttgtgacttcaactgtatgagcatcaaccaaactgcctgccccttcaatcattgtcacaccagaattgccaagaatcctctggtatactccatttagtctaacaatttcttgagtctgcagagaacggtttttacaatattgggttgtaagcatttataacgagcaaataataatgcaggaacgttctcccaaccaaggttgcggctctgaccttattttccagcagccttttccagttgaagttaatgtccccattgatttcccacccaaaattctttgcatcctgcaatcatacaacagtagcaattccaataagcaccccagaatgacacttcagtacatgtactcacaaagatgcaagcaagctaaatgaaatagtttgtataaaaagatgataacaagctctcaaatggataggttattggatttcaagtcagtacgcagaatgatgaactgttgatcaaggatggaggctgtaaggcttagcaaattttgcaaaaattgagtaaaggaacataattcagcaagccacagcacattgaacctaaacacaatgcttccaacttgtttttcaaacaagtaatagttggctccataagttagtaagatcagttacctcaaattctccgcggaaagatgaaccatacaccagtatctttttaggcacacaaccacgtatcacacacctagcacaacatgtacaataatgagcatgcgggttttaggatgcagcaacatctcacattctcacccaggggatgaggagagttggtttaaatcataatcaagcattcaacgacagaaatgtaaacgcagacaagtaatcggcagatgcttacgtcccaccatgccctccttgccaatccgagctgatgggatggaacgggagctcgcaaatcgcaacctgaaccgcgccacacaccgaatcaaatcacacgaaaaaaaataaaaatccaacacgtttcctcgcaaaaatggggagcgggggagaggagaaaagtcaaaccttagccccgaaggacgcggaggtgcgagagccccggacgccgccgctcccggcgccgatcacgaacaggtcgtagtcgtagctcccgccgtcggtgacggccacctccacctcctcgtccttgagcatcttcctagccatggatcctcaacaccacacgaaaaaccctaacgcgcacacgcacaacagagagaaacagagcccctcctgagattgacaacaacttgcaatccaaatccgatgaactttagcgcgaggaatcacttgatgagacgcgattgccgccccgcgacgcgcgtggagcccaaaatccaccgctaaaaacaaccaaaaaaaaaggaaaggagaagagagagaagtgagcaccgtaccttggggttgggttgatttgccggcggcttaagcgagcgaattggttggatctgtttcttgtgtcggattttaaaggggggctttggtttgtggatacgtggtcgttggagttcctacgccgccatgtcctggcagcatctgaggcggcttttacacggccacgttggcacgcacgcaggtgcttagagcttatttgatacaactccagcttgagatttagttttttttagactaaagcttagtcaaacagtttcagtttcaaagtacagttgaatgagacgcttttataaaataaactggagaagtagaactggatttggactgcttcacaactttactccaaacctaacttctgaagctaaatttaggagttaaaactttacctaatagaccattaattagttagttaatttttaaaaaatgttaagttaaatcatctgactaagttctttttataaaaaaagaatcatctgaccataatatgcttacatcagccgtgacaattcggggatccactgtggatgcagtgctcctaaaattctgcaggcagctgctgacgagatggaacttaacagctactccaaattacggaatactgtaaagaacttattattaccaaaaaaaataaattaggtgctcagtttttatcttggcacttgtacatgttgattacaacagggagaatgcagggtttgttctaccagagattggctttgtttcatgttcagttaatcgggatagcttctactgcagcagattccatttcagaaaagcaaaaggagactttcagtgattcggtctgtggtgtaaaagccatgttcgtgccgtgtgtttgtttccagatgcgaacttgcattcgatgaatctggacgggacagaaatgccttcaaacgtggaacgtggacgcgcgtggcgagcaagatggagcttagcagaagtcgacatctttggataagtagctttcgattttcgaactgtcaagagccaaagaaggccacgtatactgtttagttcttgtgaactttctgtacatgtgaaatacaccgataaaacggaagtaagccagtaacctttctttacacatggaagacaacagataacattaaagaatttaactgaaccttttaaaacaatcaaagaaccaagctctgtctgtccctttccggtctttcagagaggtgacaacaattaaactctgtcgacgaagtcatgcagttgagcccccttcatccttttgtgttttttattatcaattttattttcttgttattgccaatcctaacacaaggggtggtggcgcagttggctagcgcgtaggtctcatagctatttgagttatcctgaggtcgagagttcgagcctctctcaccccaatttcttttttctcttggcctatatcattttttttaacagccgttatcatttattttatatttttctgttaccaaagtacggagttattctcttggcctatatcatttttttaacagccgttatcaattaaccaaatgcacaatgactctgattttttttaacagccgttatcatttattttatatttttctgttaccaaagtacggagtgagtggtaagccaaatggacaatatgctttctttccaagtggacaagaataggctgtacggatttactactaaaattttcgttcttgcgtcaaaaaaccttgagaatgcgtggactgggaaacaccatcgtctcgccagggtagaaagaataggatatgcaagtttacacagattttccgcgatgttacagaagcagtggctccaagcctccaagcaccgaactgacaaattagttaatgttcagataaatataaccaaaatactccgcagccgcaaggattttcaactgaacaagatttaaaatggcaaccgcttcttttaattatattttgcaaaccaaatgtaggctattatcaagcatcgcactatggtattttcttctcggcagaaagttcagtttgcccgcaagaaaaaagaaacacacctgtagttttgcacagcattggcaacaaaagccaaaaccacaaacaaaaaaaatggcgcattatgagtcttatttaattacacgcgccttgatcttagaagttcatcagccagatttcttaagtctgatctcaatgccctgcacaataagacctctcttccaattgcctcccttggtctccatcaggctgaagcacacctctccatcttcaccttcctcgttgatgaactcacccatctccagctccatccactcgtcagtccttttctgagggaccgttacaccttcatcaagaactagacgacggtctcttctcctggcccttcgtcgcagcaatggaccaatactcataggccagtaattctcaggcacctcctcatcttcgctgtcatagctttggacacaaacaatttttgttgatcccctacctcccaggctgactgatgcctcctggaatggagcatccagcccatagaactcatcagctatcttaaacaccatgtatgcggcataagttgagtttggggagagcatcttgctgtgtatcctgccacggatttccaaccagcacacatctatgagttcagcaccttctgcaaacctgtcgtgatttgtgaacaatgggttaaaacttgtaacaaagagaaatgaacaaacattaagttgcagaggagcattcagcaccagaaccaaaatcccataacttctgtacagaaccctgctatacacccgacttgtttgtttgactgatgtacaactgaacggcggaacagaccagtgcgtgacagcgtgaggcagcagtacgggttggtcctacggagatcgacgttttgcactcccgtacattacggttgtccaagaatcggataagctggttgtgtgtatagcattttccttttgtttattaaccaagccgttcatcagtactaccgcgtataccatttgcacgactataatgaaggcacacaacaggtcaattatgtaaagtgcctgccattctataatctattgttgcaaataccatgcactttactactttgctcttgaaaagtaaatgaagaaagacacttcaatccatgctcagagagaacactttactactttggccgctttcgttatcatcgaatttgcataagaatctgcccttgttctgggggtaataatattcggaactacacttcaccacaaatacatattctagttgattcatcatactattatgtagtatagtctattctcccatcagaccacataatgcaatctattctcccatcagaccggataataccattgcaagttgcaacgagattgcaagtccatcactcaacgcacaggcattgcctcattggatcaaaatttccacatgaattggaaagatcagcacggtttaagttcaggaaacggacctagagtcggtgagaggaatccagcgccagtagtgcggtgtatcgccccagataatcaccaacgatctggccgagagcatgtagcacttggccccagtctccctgtccaaccacatactctgcacccaaaaaaaaacacaaatattagatcgccgatgaatcgagagaactgagatcaaccatgcttcgattaatccgtcaaccgattttgttggattggggattttcataaaatagaacgcaccatgagccggtctgataggaggtaggggccatcggagaggcggaggaagagctccttcttggaagccggcgcgggggagagctcgccgtcggcgagatcggggagattgcgcggcaggaagctagcccagacggcgtcggagtcggcggcggcgcggaacgccggggagacggcggcggcgtggcaggcgtcccgcggcgaggcgcgtgagatcgcggcggagaggagctcctccggcaaccgcgcgatctcgcagaggccctccccctcctcctccattgatccctccgtcctcgaatccggcttgatggcgaaggaaaaaaaaaacagagaaggaaaatatcgtcggagagtgtgtgtgagtgcgcggtggttgaaaataaaactagaaaagcttaactacgaagcagaagcacatgcgggtggatagggtcatagggatagcgatgcgtttcaggagaatcagaccaaaaggaagattacttttgttttctgtactgtggggcttacatgtcatactaacgcggagtttagttccaaacttttccttcaaacttccaattttttcatcacatccaaactttcctacacacataaacttttaacttttttcgtcacaccatttcaatttgaaccaaacttccaattttagcgtgtactaaacacaccctaagagcaagtttaatagtatagccaactgatggttccaaatcatctttaggtaatctgatagtacattcataaaatagttatctataaaaatatactacatcattaatatccgatcccacctctcatacatatataataatgtcttaaagtccgtgtagcagctggctacaaatctgtagcccgctttcttatatttcttctcgatatatggttatagctggcttagagcaggtacaatagcaggctataaaccagctataaacatattttaaagagataaatgaagggagagaagagcagtgggctacagatagtacggactccaagacgtaatgtgtgtatgataggtggggccagatattaatagtatagtaaacaactattgtatgagttattactttggctatagatgatttagagctaatagtgtgatatactatgctcttatagctattgcacctgctctatgcatactcggatgctcccatccttgcggtgctctctcgatggtgtccaactgttccaccgcgggttgacccggcgcttgtggtgtgtccatcagtcaggtgtcgtctcccgtgtcgtcgtgtatcattagcgcgatcgtccaattcaactatgacaacgtcatatgttctattctattattacatgggaatcttgcgattatgttactattgaatatagattttgcacaaataccacgctgtatatattaattaatctatctaaacgtcatgggaatgcttgagagttagagcgccacgttagcaaacattttacaaaaacgtccccaagtttacagttaatcatgcattgctcccagctgccatccaccgcgaaccgtcttatcacactccacgtagaaatgctatcctaaacaaaatggtctttggatttgtcttcttctaatattctttcctctaacagacaccgcactcatgacttcggggaataaacgaaacgatatatttacaaacaaaaaataatctatgaataaaattttatacacgtgtttttagtgatttagtagcaaaggcttaaaaaataaacttcaataaaaaaaaccccaaaatcaactttaaatttaagataaaaaaaattcaaattttatctgctaaacataaacataccgggcacaggcacactagccccaacatgccgacctgaccgttctccttgaggccttgttcggttgcttgggaattaatccccaagggatcctatccagggagggattgagtgaatccctcctatctcactcaaaccctgtggggttcgaatccctgcccgtttctaatccctgtcatataaaccctgccttcgtttagcacagggaaatataaagcagcagctgtacgttcccaagcaagcaatgaaacaatatgcattctcccagatcaaatccataggacgcagtaaaaaaaacattgttttagcacagggaaaacacacatgcatgccgtacgttcacaaatgcatacatgaaagtgtcacaaagtaataaaaatggttacagttcagttgttttttttagaataaatagaagtagccagctaagagctaaactacaaattgaatgcaagtgtttaagcttagcactaatgccaccatgagcttcagtcacccagctgcagtgttcccatctctgaaaaaaaatggagcaacattggatcaattccaaaaagaaatacaccatatatgttctttcctgtcaaccaaatatcaaattgaacaaatgcagagtacagattacataagagcaaacaagtaaagcaaagagccacactaatatccaaactaaggctgatgcactacatggaatgctaacagtctgatagaaccaaagatgaaaagagacctaaaagttcaggaactaggaagctaacaaaaaaatctaacaattcagccttgacaacatagtaataatgaagtacataactagagccacacggtaccttaaaaaacattcttttatcaggagcaaagcagatgcttcaaagtaaataaaattgcactgctatactgcttaagtttagctttttcagatgctaaaagtagtatcagttcagacttgagtgagctcatcagctcaagaaaataaaaaaaaggtgagtagcccataatgtaaatcctggtttatagccctaaacaacatgcatgtaactaacaacagagagtcacacaggacagagtgaagcccatcttactcgcctagcagaccaaaaaagatttatatggaagagaagcggtacctttcaagccatctcacttcttaaccaactcaaggcagattctgatcctcatcacaagcactcacaaaaatctctctgttctctgcattcttgaagacggtatatgctttgaccttttctgcctttctcacatccatcgaattcagaacagatatgcacctcttgattgaaaaatcatta

SEQ ID NO: 20334 - DNA, 8202 bp, Oryza sativa
ccattctgacccctatactcaggagtgttgtgctcatgcaataactcaacaagaatcttctctagggctgggttccaagaggctcttgttttttctacacaagataagaattgatgtataatctacatttaataatttcaaacatgaatttcacatgttctataattgcatacctattggagaacctccatgcttttttgtaggacgacctttcggagagttcttcttttgtgcagctttcgctaaaagcatggtcaaccttggagaacctcttccaagcatattaactgagaaaggatgcataacacaatattcataacaaaagcattgtagcaaatgtatgtcacatgcaaccaccatagttcatttataacataatatttgtaatatgtcgtagttattcagctcacaaaacataaaaaaaaaatcaaatatactacttattacaacccactaattcctatgctgtcgatagtcattccacatttgatgtgctatcgtgtccctcaaaagattcccttgattagtgctttgatcattgccttcatcaccatctggcaggtcaacataattgcttggatggatattatgtggttggttatttaaccattgctcatccccattcagtgatcgaataatattatggaacactgcagcagccactggtatcttcacttggttcttgattttgtggaaagttgcaactttgagaatagagaagcgcttttttacaacccccaaagtcctttcaacatgattcctcaataccgcatggcgatggttaaataactctttgtagttttgaggtttacgccgacctgccccatactcctttagatgatacctgatttagatatggtgcaaggaaagaattggtgttggcatatccaccatcaaccaaatagaactttccagggggtacttggaagcctttgtttactgcagaggtaagaaccctggcatctgtagccgacccctcccacccagtagacatgaaagtaatcttcagatcaaaatcacaagctatcatcacattttggctaagagtatttttcctatttctaaatggagctgctttgtcagatgatatagatatgggtatatgggtgccgtcaattgcaccaaggcaattctgcagcaaaaaaaaaccacatatgattttctaaaaatgtaaaacaacatattaataaggatataagtgtttaggtaagaaccttgaaatagggataaaatctaggatctttttctattttccaatgaacttcattaggatttggaggcttcagaaaccgcttcgagagcgaagggacaactgagttgaagaaatgctttacgtgacgatgaaagctatccccactgtgcccaaatttctcttgcaaatcctcaaatgaagcattgtgactaagcatgtataagaagaatgccaacttctcttcaactttaatcctagtatcatcgaccaacttttcagttctaaggtaattggccaaagatataaatatttccggctccatcctgaatgctacccggcaattttttacatgcccttcaagcaactcccgaacacgctcctcgcctgttatctttgatgtatggcgtcgcttcttttcccttgctccactagaactcaacaaatgtagtgcagggaaaataaacaacatcatatcatcgtcctcctcttccctcctctttctagcgcggtctcttgctctcatatccatagtagtactatagatagagcacaaattatttacaattttgcacttagcacagcaacaaaagatctagaaagataatcacaaaagaatcactaaactatgggaattaatcttaagaagtccaagttatgaagcatatttaaaaattgatgggaaaaatgaaaagaacaataaggatctttttttcttaaagagtgcacagtgcaacaataattgaaggaggaggttggtcttctccaactctaatgggtgcacgtgcaatctacaaaacaagcacaacttatacacatcactgacaactcaaattcagaactagaactagagttacataaaacccagaactagtgctagctagcatcaaagtaggagctgctgtttttcaatcaaatagaaggatctcatcatcaaatacattataacatgggtacagaattaatcacccaatcagctcatttaacactagacatattagtgcttgaatagctatgataaacatgttttatacaagtatcatgttgaggaaaacaaatatgttagtctaatgagactaaaagctactgttgttagtttaaaataaatcagtttaagtatacattactgtatatactgcagcaatttgttgctagtttgtttgtgaaacaatgacgatagaattagtttacaattcagaaatgttaaactaattacagagtacctccatagctctacaatcctcaaaatcaggacacccaacccttgtaatttccaaacagaaatataaccaacaaccacaagttgggactccggaagcaccaagaactgagtacttcactgtaaaaacttgtatagtcaattttacaagacatgctcaggcaagcatcacagcatcagtcacactaagcaaaactaatcaaggcaagcatgtttccatagccaccgtacagctctcgctctcaccatctgctgcctcaaagccaccgtgaatcaagaactcaaatcaagaaccagagttgggcggtgcggtggcggcggcaaatcaagaactcatccccacccaaccaagaaaaaaagctccacgcccaaatcaagaactcaccagatcgagcaggatacgaggaggaggacgacgaatcgctaagcgctcactcaccagaaagctacacggcgagaagagagatggcggcgacgacaggaaagggagaagagaagaaaaccctaaccctagctttgcaagaggagggaagaaggggaaaggcagcgtgctcactggagacaaggtggcggccggaggagagagccgtgtcgtcgccgtcgccgtcgccgtcgcctccgggtcgcaccgcgcgctgccccctccgtcacgtcttcgttgcgccgccgcctccactcgaggaaattttccacgctccaggagtagatgattttttcccgggcctagagaagagggaaaccccgtggtgggccgggctaaaattcacggcagggcttaaccgaacgcacaatttcgcatgggccgggattttttcctcgccggggtgatccatggggattgggccccgatcccggccgggaacaacccaaccgaacaaggcctgaagccgccaatcaaccacgcgatgttgtctacatggttgcccagggcagcaataccaccatgcttaaggatgcggttaaggaggtcacgggttattttgttggtttgacagtgtacattccggaggaaggaagaagaggagcccaaagggcaatgtccgaaatagtatttcaacataaaaacgctggttgagagtgatattttatcgaatcttttttacagtgtggtatttaaacaaagcctagctagcataacccaatattcctcattgtacagacatttcagtttatccacaagagcatcaatattagcaaaagcaaatgctataaaaatacgcatcatcacaaatcttaggccctatttgattcagcttaggattattataatctagattattagtagtaagctgaaacaaacagatagattagcatgatagattattataatctgtaagccagattatcataatctaataagctcctctaaaggagcttttttcagattattgggtggctaaagacccactacccctggatacttgataaaaattacccacccataccatcaaccgaacaaacagataggcctctcctctctcttggcgagcgcgcgaactcggctcctcctctcccagtcttgcgcgcatccggcctcctaatctcccggtcgcgccgcctttcccaatctgcggcgtcgcctcctcccctggtcatgcactcatgcgtgtgtgagcaacctcctccaccccctgccgcgccgccgcgttccccactgcggtgccccgtctcgcgagcaacctcctccaccctcgaccgcaccaccgcgttccccactaaggcacctcgtcttcttccccgaaccgcgccgccgccgtttaggcatccaaaaaggccaagggcattatagactttagcctttcaaacccaataatccgtgcctccaataatccagataaacaaataactcacagcttattttatgttaacttattataattcagcttatagtaatctggcttaataatctaaattataataatcctaaactgaaacaaacatgaccttatttaagtactccaagacgcttgttgatcctagaagctcatctgccagatctcttcatcctaatctcgattcccagcacaataagacctctcatccggttaggtccttcactcatcaatctcatgtacaccgctccatcctcaccatcctcgttgaagaactcacccagctccacctccatccagccgtcagctcttctctcagggtaccttcctgtgaaggcaacctcgcgtctcgattcattctctccgatgctgaccgtcgcatcgtgtggtgaagtgtccagctcgtacaacccatcggctatcttgaacaccatgaacgcagcgtaagtcgagtttggggtcagcaccatgctgtctatcttgctacggatttccatccggggaggagcatccatgaattcaacggcttctgcgaacctgtcgtgaacaaaggggtttgaaacttgtaaggaaatcatgagaaatcgaaagtaaccatcacttgaaccatcgaattatcaattatgcaattgccgattggagaattatgatgaacgtaaaggcactggacaacacgataaccagtcgtgtgatcctaagaaacggacctcgagtcggcgagggggatccagcgccggtaatccgacgtctcgctgcacttaattaccaacgttctggccgagagtacatagcacttggccccggtctccctgtcgaaccagatgccctgtgaatgagagagcagcagttttgaacacgagaagagatcatcaaggaagcagtgctcttagtcttaagtaatcagtaattagtttagtacgcaccctgagcctgtctggcaggagggggacatttccatcggagccggagaggcggaggaagagcgccttgttggaaggcggcggcggggagagctcaccgtcggcgaggtcagggacatcccgcggcaggaagcgggaccagacgtcgtcggagtcggcggcggcgcggaaggccggggagacggcggaggcgcggcaggcgtcgcgcgggcgcggcgccgcgcgggagatcaccgcggagaggagctccaccggcaggcgcgcgatctcgcagcacgacggccccattggcaattcggcaaatgacaaggagacaagaaaaaatacagctggggaatgtgagaataataccaccggtgagcatgccggaaggtcggtcgagttccacttccgcccatggttttgcagtccaacatgttgtagtatatgtgtagagccgtagactagtagtagaaaattcgaagcagaagtcactcctcacttgacaaatcaagcaagtggcagtatctgatcacacatctctgttctttttcacttggttattactcggacatagttcaaaattgctactccgtcaagatatcttaggcctaatctcgatgccctgaataacaaggcctccattggacagccatctgcctgccttgggcttcacgaggctgaagcatacctcaccctggttgttaccctcttggttgtagaactcacccagctccagctccatccaaccatcagccctttcctgagggagaatcacactcccatcctgaggcacctcaatctcgccttcgtagtagtagtcattgcggttggagctgtccaagcaaacttggcgagtggattggcgtcccccgacgccgacggttgcaacccacacagaagccaacccacatgaatcttcagctaccacgaacacaatgtaagcagcataatttgagtttccggagagcatcttgcaaggtatcttgccgcagacctccacacggtatccttttaagaactcaacaacttctgagaacctggagtaaacacgtggttaatactatttgtaagttgtaacaaatcattagaattgaatacatacaagtaggaaaaaaataggacacgggaagtcaggaacaaatttccatggaactttcgagtcaccaagcttttgtacacagttttgccttagctccataccgtgggggcaagagatatacatatatttttatttttaagactagcaacagatataactcttttttcaatattgacaagagatatatagttcaagaactccattgggatcaacaagatacaagaaagctattttttcggtacttcttgttactctgtttacaaaatcagagttggtctttgctcttcagaaaaaaagaaataaagaaacgctcaattaaaatcctaggagccatcagaggagcagctactgtatagcagaatatcactttccaaacaaaaacaacttgaagtttggtcttagcctttcgatataatcagaatctcttcaataaagtttgtgtatgtacggaaatatcacgtgtaatttctcttaacaagttcttatgcatatttttgaaaacaacaacaactgtgatttcacatttctattctgaaagcaatttcatctatcatcacaacacatactccaccaaagttacaatatggcaatttcatgtaccacagaaagcacaagagtataaatgctttgcaaattttgcgaaatggaaaacttcgcagaggaaaggaaggggcatatagttcaacaacctggagctgccggtgagagagatccagcgccagctatgcgttaagttcacaatctgcagcgccctggccgacagcatgtagcacttaaaaccagtctccctgtccaaccacatactctgtgtacagaagcacacatcaccttattagaccgatcgatcaagaaacatacaaaaaaggcatgcaaagaagcatttttcatttggggagctagggccgtactgtgagcccgtctgagaggaaaatctcctccatgcacgattgcaacgttgtcaatgttgagcaggagggtttctcatgggagcaagcaagagagttcaggggtggacttttcttaggtctaatctcaataccctgcacaacaaggccactcttccagtggcctccttttgtctccatgaaactgatgcacacctcaccatcgtcaccttcctcattatacaactcacccagcttcagctccatccaaccgtcagcccttttctgagggttctctatatcctctgcaagaacaactgcacgtggttctattctcttgagccttcattgaacgacactaacttggcgggctgttatgcttcctccgatgctgacagatgcctcctggaatgggaaatccagcccataggatctatcagctatcttgtagacaaggtatgcagcataatttgtgttttgtgacagcttcttgcccggtaacttgccacggatttccaaccagcaaacagataagagctcagcaccttctttgaaccttttgcataattattcatgacaaagtaagagatgagttaatacaaacaattaagccatacagaaccaacttcaaattccataactcttgccatcaaacaagattctatgaactgcttcagtgtagcataataatggcatttaggcatgaaacatgtagcttatcgaactcaatttgttgtatgaacaaactgatttatgttccatgtgtagcttggatgtgttctatgtactgatccctcctcacttcttcatcaatagaatgatatgcagttctcctgcatattctctaaaatatcgcgccgcaagagcaacattatttaggtgaagtgacatcgatctatatgtttaatttatgcatcctacgtgctcaagttgcaagtaaaggggggggggggggggtgcacatgtgtataaactctgatttccaaataaaaaggacttgaccattggattcgatctggtgatacaaccaaagctgctaggaaatttgtttatgcttgttctgtaatatagtatgac

SEQ ID NO: 20335 - DNA, 13684 bp, Oryza sativa
accaaatctttgcaatttcgattccttcaggaaaaaggccaccgctgcgtgaaacataacaatgttgagatttccataaaacgaggtgtaacacagtcctgtttctgcaagtccgaacctgttattccgcagatccaacacaaaagacttcacattgttctcccttaatttctgaagtgcttccttaacagatcctgggagaagacaatcaattaatatgatcagcaggacataacatctggaaatatatggtgttttataaaggcattagaaccactcaaagtcactaacctgcggcgttttggttgaaagttgtcaatttaatgtaaccaacctttgaattgtcttttgcacctggaatctcacacatcctcgaccttaccggatttaaagtgacagtttgtcgcctatgataaatcaaacaatgcaatgaccaatgaagtaaaagtaactgtttgctttcaagatctacaaggggatcatgggaaggaacttacttcagaacaacatgcctggtattggacccactacgaatatccaaatccactgagcttccttcaggacccctagcaaagatgtaagggaataacttactcaagtagcactggaatgcaaaaaaaaaaaaaaaaagaaaaaaaagagaaggaaaatctaagacagacaacttcgcacttcagatgcagttcagacactgatcatgatagttagtagttggtcttactgtaagcgttgtgctgcatcatatatatccatatcttccgtgcttctgttgtcaattgccaatattacatctccaggaagaataccagaattttctgcaggacctcctggggttgctgacataacagaaagccctgaaggagatccatttagcgccattgggtagctaattgataaacctacacctgtgagtgttccttgcgagccagacttccttcaaaaaagataatggtatgaattaaaaagcggtttatgacacacagctatgatttctctgacaatcaaagactgagtttcatacccgcaaactcttgaatttctcgggttccaagaaacgagtgaatgggtcatccaatgttgaaagcattttctttattgcagcatctgaaatgcagttgtgctcaagtaaactgactgaacggcatcaaaattcaaacaagttctcatttctcacatatttatgacatatttaagttagattttctgatctctgaaattagttttaacctaaagtgctacctactccctagcccatttagatgctggacccctccagccttggcccacctaactcgaccagcctagtgtctgtcagaactcaacaccatataatatgtaaacttggagccttatagaaaaaagcctctggaagaactctttatatcctcactgacaggcgcactttgaatcattacttaataactgttcgacatgtttatactttttccacaaaataaaatgatctatgatgtatcagaagtaccctaaagcttcagcttggcacataaaagtaatttttgtcacagagattattgaagggcaatagaaaatgttaaccaagaaagagaaagaaaagcattaaaaaaatcatacatgtttcttcccgtgtattcattggttcattgcggagagcattttcacggtatctaaaccaactctgcccattgaaagatttgtcgtaatatgcacgatcaactgcacgccaagcctccagaaaaagcaaattttcctccgtgagtgccaatgcttggatatccaacaacaaattttagacacaagtgtcagtagaagtaggacatagagcaagaatgaaagctacatattgaaccaaagctgagaactcacatgaaggtgctgtataggtggctgcagatacagacatgacgagcaccatccccaaaaccacacggccaaagccaattgacaggaagggcttggctgccttgtagcctcgagcaagattaccacccaggctggtgagcagggaaggatagcttgacagtattctctttattgcccgcggcaatgcggagataggatgtccagtagttaaaccaccactggacctcctcgttgccttacagcagaggctcatgtgagcacgcagatgacgacgaggttcccatatcgagacaattgccacctaaagttcaggaacgaaaaaagaatggcttaaattgctgatgactggtacaatgaataaacataaacagaagcaaaaggtgcagagcttataggttgattggggagtgaagcagaagcacatcatatccatctgaagcaagcaaatagttgatgattatatatgacattagttgattaatttgtctgaagcgtcttgtatttgtgactagaggtagtactaattaggagccacttatggaagaatcgcctattgctccatgaatcactcactgaaaatgactgcaacctaacgagatatgcatctagatggcataatttgaccagcagcaattgcaggctgcaacctccacacacccgctcatactacaagctaggtaatcaatcaaaaaacagcggaagcacgaaacaaccagttccttcccacgtcgcacactcgcacccatccacataaaaacactacacggatcggcaattccgcgtccaaatgtttacgaacaaaaagaaaaaaaaaagtagcagcggccatagcaggagcgacagagatggaggatgggcgagagcgagcagttaccgcgtgcaggcgtacgagaggagcgccccgacggcttgcggccggcgacggcgaggcggcggcggcggaagcggggacgaagagtgggcgggagcacgtcgccatcgatctccccttctccgcacccgatgagctctcctctccaatggcgatgaagcaaactggaggcctccgtttttctcccggctcacaagtcgactagaaattgtaaaatcaaattaaaattcttttttggaaaattttgagaaattttggggctgagagatgaatggataatggccgcggagttggcctcccttccacgtggcctgcacttttttcggctgagtggatgtgtggttagccacgcaactttccctggatcgaaagcgatgggccgttggattgggccccagcgcgaagcggacggcgatcgcggaccgcgtgggctttttgccttcctgggctttctgcccacgtgtccggcccaattaatttcgtgaacctttgataccctctcttctctccttctggagaagcaaaccctcgcgccgccgccgctctctcccacccgccgccgccgccgccatggacgccggcgagacctccacctcggactcgctggtacttgccacgggcgccgcgcagggaccaaagaggaagccgccccgaagcgcttcgtccacacgcccatcccgccctccatcctctccgacccaaccctcgccgctgccgccaccggcctcctcccggcggcgtacaacttcgagctccccaagacggcgcaccgcatccgctcctccggcgcccgccgcaccgcgctgcagcttccggagggtttgctcctcttctccctcccgctttcccacctcctcgcgcccttcctcgagccggacccctccaacgacgtcctcatcctcgccgatcccacctacggcgcgtgctgcctcgccgaccgccccgccaaggcgctcgccgccgacgtgctcgtccactacggccattcctgcctcgtccccgtcacctcctccctcctccccgtgctctacgtcttcgtcgagatccgtgtcgacgcccaacgcctcgccgacgctgtccgcgccgccttcccggaccccgccgatgcgccccgcctcgccatcgccggcaccgtgcagttcatttcggcagttcacgcagcgcgtgagatcctcagtcacgatggttaccagggcatcgtcgtgccacaggcaaagccgctgtccgccggcgaggttcttgggtgcacagcacctgccctgaaaaggtccgagggggtcggagcggtggtgttcgtcgcagacgggagattccacctcgaggcattcatgattgccaatcccggggtcaaggcctaccgctttgatccattcctgggtgtgcttgtgctggaggagtatgaccatgtcgggatgaagcaagcgaggaaggaggcggtgctggcagcaaggaaggccaagagttggggagttatactaggcacccttgggcggcagggaagcgtaaaagttctcgacagggtggtggagcatttggaggagaaagggctggaacacacagtagtgctcatgtcggagctgtccccggcaaggatggagctgtttggggattcggtggatgcgtgggtgcagattgcatgcccacgtttgtcgattgactggggtgaaggattcaagaagccaatgctgacgacattcgagtttgatgttgcactgggctatgttcctggatggtgggagaaggggagtagggaatgtggcagtggagatgccaccggttgttgttcaggatcaggaacttccacagattgtggttgcagcaatggtggttgtgctgacaaggactttgggggggagtacccaatggattactactctcaggatggaggtgattggaacagctgctacatgaagaagaagccctctactggagagagaaagctgcgagttcggattggtaattactcaaattcatagtagtttacatgtggcctttttgtctgtcctttttcccctgtatactggggcgaaatgcttgtgtaactcttacattctgaatttttcaatattaccggcatatctatatgttttgtcaatcattttaaatcaacaaggaaatccttgttatgttagtgggtgttataattctctgcttaattgcaacatggtgattttttttttcaatgtgaaatgtccttagcataaaggcagaatcaattcttttttttttcagaactattatagaacttcaggatatattctttgatgaccaagattggagtgattttttttttatgatagagcataccttaatgcaagaaagttatctattgaatttgttaatttattgcacttggtaatttactatagactagagagataagaaaggactattagttaagctctgaataatacacctgaactatgtggatttggacatagtgagcatctttcttgtgacaatcggtagtgcaagagttatccactggtggctatctactgtgtttgtaaactcctgccatcatggtcaatgtgtatggtttggtcaaaatcgcactcgtcagttaatttgattgatactccatagcaactattgcatgttaatgtgctattcaccttttttttttgctgccatttgttagattttgacgtgatttatgcttaccattatgtgagcaggcagcaaagttcaagttgaggataagcaacaaagctaatatcgttgaaacgagatatcaagagcagcttcatgtttcttcagaagttttgacaccagagttgaatagtatttttgatcttagcactgccgttacgagtgctgtgatatctgtatctgtacacagatgtaaactactcgatcctgcgccacactgtaatgctgtgatgttgtcttcccataaaggtgaaatgattctaagtttatggagcacaattttgcattctcgattttgcctactgaatcttgattatcttattgtcggctctactgttttagataaatcctaggatttgaacttgagatataaaagggaacaacgtccatggctctactaggcgtacataatcatgtaatgtgaatcgtctagacgtcaacctttggctagtgttgttgtgctgttcttcctcggtcctaacatttgaatctggacactatagagctccatcgtttggccggtatatttgtaaacaaaaaataatttgttaataaattttttatatacatgttcttagcgatttaaaagcaaagactgaaaaataaacttcgtgtggccgataagcataagcacaaactctaaatttaaggttgaaaatttaaattgtaagcgaaaaactgatgtgtacaaaaatatgacggtgggagtaggtctaatggtaatagtgcagaacttctactttagaaaacatgacaaagaggcgcttattcaacaaaatcacggcaatgttctaacagcaatcatccccaaagatccaaacagcacatatattattatagcagagtggtgtcacagttcaaagtgcttctaagcgaaacgagcagaataattcaatttccaaggctggtagatctggattacaatttggcgtgacatagctcagaagcacagccaaaagcagatgaaccatcatcggttcatttatcagttgccagaacacaccgcaggcagccaccttcatgcagcaggtcaaacgccttgttgatgtcagtcaggttcatgctgtgagtaacgtactcgtccaccttgatttcctgtgcggattacatgagaattctggtcagatgaatcactacagattgacgaaacttctgcaggtttagagtttagacagtgatgatttgttaccttgttcaagtacttctcaacgagccatggaacttggcttcggctcttgaaaccgccgaaagctgttcccttccagacacggccagtgacgagctggaatggtcgtgtagagatttcttgcccagaagcagctacaccaacgatgacagaggttccccagccctacagtaatacccacagaaatttaacagttgaaagcgaaaatattttactttgtgatgggtggaaaacagtatgattgatctataaatggaaatataaaaacagatacgctgtatttcaaataaaagcagtttatccaaatgacaatgcaacacagttaagatatgattcagatcaaatgtcattaattcatttagaaatagacattaccgcaccaaatgattcaactcaatttattaattcttttgaagtttgtcattaatttgtaccaggcgacaaaattcacaaagatgtccgaataaaagctgcagccgtagcttaccttgtggcagcactccaatgcagacctcataacagaaacatttccaatgcattcaaagctgtagtccacaccaccgtctgtaaggtcaactatgacctgttggattggtttgtcatggtcctttgggttcacaaattctgtaaccccaaagttctttgctgcaaacaataacagcagaaaaagagttggaaaataagctatgtttgatttgcagacaatttttatgaaataactcatgcaatgtaatacattctttatcattcaataacacatacaaagcatccaatttgtaagaacacatttgtggtgcatatgggcggaaataaacaaataataataagtttgatctctggacctgatgccgaaaagcaatgtgatgattaataagagcaaggtgcatgcaagcaaaagaggataaatggtaataacaagttaacaatggatcacagatcaaaatctttcctatcacaactcagacaaatacaatggtggcaaattcaggaattgttgatggtgcatcactgcctttgcaagtcaaaaacgaattactataaagggatagtaagcctttggaatttattctagtatttgttgataatcaaacaatacgtagatttgcactttcaggttcgattcaagagagaaaggtctattagcaagttgcaccaccagacatggattgcctgctttcaccagatatacttaagagagtggaatatgccctttactctaccaaccaaaaggtgcaataaacagaaaaatggaaattatgaaacataccgacatcaaactttttgctatcaatgtcgatgccaataatccgagaagcaccagctgattttgccccctcagcaacctaaaatgaaaatcttagatgtcaaagctctctttccagactaacatgttaaatgtgcatggacatattttgacttactgcaagtccaactgtgccaagtccaaaaatagcaacgatggaacctgcttcaacctttgcggtattccatactgctccgaggcctaacaatagtaatttgtgagatacacatacgaatatatcataattatctagaagagaataacaagaatgtgcgaggcaatggtatgtaatattgtatccagtgtaccaaaagaaaagtaataattggaaatttggaggtatcattgacacagatatagtgaggctttccatatttatgaaatatggtaaaaaaaatcaagcacaatgcattcaaacaacccaacgagctctgcatgtaaggtttgtaaagctacaaaatgatagtaggtacaaaaggaactataattggtgaataaaagtttggcctccaatgaagaacctaccagtagaaacaccgcagccaagcaggcaaactttgtctagaggtgcctgtgggtttatctttgcgacactgacatcgtgcacaacagtatactggctgaatgtagatgttcccatgaaatgataaatgggttttccatttattgagaaacggctcttgcgatcattcatcatgacaccgacccctgtggcagcacgaactttgccacagaggttggtctttccactcttgcaaaacttgcattctctgcattctgcttggtaacaaggaatgacatggtccccaggctgcacctcagttactccttccccaacactttcaacaattctataaacataaacagaagaaacatatcgatgctcaattatcttagctgtgcatgatcatatatgtaattagcacatctatatgcttacccagcagcttcatgaccaagaatgcaaggaaatagaccctcaggatcctgcatggcacgtaaatcacttgataagggcctgtttggttggtatataataatgttgccaacatttgccacaaggtacagtaatctactggcggtagaatattgtattatactagtagaactcaagtcaacggtttagatgctactactgacgagaatactgatggtctactgcttgccagtagagaccactgtagaaatactcaacacttccaggtttctgccagtaattttgatttcctacagatgattgccatcaatctacacccattttgcagtcaaggaaaataaaaatataggacgaactcatgcaacgctagctagaagcctagaagaaacccagagtcctctagtacaaaattgtttaatcttcccattcataataatctgaagaaacacctaaatccttgaaacaataacataacgatgttacttgacaattaaatactaatccactaattaaacaaaaaaatgaatcgggttccatccagtgcggtcaccaactaccatcaccagatacgtggttggaaagagtatactaccctactaccagtgtaaatggcgagttcgagaaatctagatttcgaagaaacacggcgagtaagagtcggtgggacagagagagagaaaccttgccgctccaggtgtagtggtcggtgtggcagagcgcggtgaagaggatcttgacacggacctcgccggcctgcggcggcgccacctgcacgtcctcgatcgtcatcggcctgttggcctcccatgccaccgccgctgcacccaccaccacaccggggatcccccactccagatcaaaccaagaacactccaagaaacagcaaccatacatccaactctagcacactagcaaatctaccaccacgaatccacgatactaagagaggggaaccaagaggttacctttgcaggtgatgacctggccctgggtcgaggaagccattttcacccccccccccccccccccctctttgcacgctcggtggtagatgcgatggagaagagaagggaagaggatgtgattgcgaggtgagaggagaggatagggagggggagaagagcagccgagaaggggagaggaggtgggcgtgggttttggttgggttaattgggccgggtccactttggatattggaatattgcatttccaaattattagggctagccagcttggcagatcagcatgtgatgctcgttttgttcctaggccctgtttagatcccaccctaaaatttttcaccatgtttgaatatctgtatggaatattaaatatagggtaaaaaaataactaattgcacagattgcgactaatttgcgagacgaatcttttaagcctaattgctccatgatttgataatgtggtgctacagtaaacatttgctaatgacggattaattaggcttaaaaaatgtctcgtagtttactgacaaattctgtaattatttttttttattagtgcctgaacaccccatacgacaccctatataatacccgatgtgaaacaaaaaaactttacacccctagatttaaacaccccccttaaccatgtagtagtagcagggctgtttggcagagctccaactcctaaatttagttctaggagtcgggtctagaatgtagttgtgaagcagcctaaatccagctccacctctctagttcattttgtaagagagttccacccaacttcgctctcattttaggtggagttgaaactgtttggctgagcttcagctccaggagaggtgagctgtgccaaacaagcccgcagtagtaacaaatttaagcttttcagcatgtataaatattaatcaatttgttcttaataatctagttgatgtgatatttttaggatctcatcccaaaaccactgaagaactaactgttagtgcgcaagagaaatgaataattcacatcctctgaagttgtaactgtaagtctgtagtcagtcagtcctgagctgcttcaacctttcaattcaagatcttgagaagtcactgacgaacaatgtgaacttaaaattcttgtacagaaacattccgtaatttatacacagattatccagttgcgttgctaattacactggtacaacagaacgctatgaatgtgtcatgaaatcatgatccactgattagagcacacacaatggcacatcgacagtttcagacaactggtaggcagctactccgttttgtcatcagagttgatctgctgcgccagcaacagcagcccgattgatgtgaaaacagagagggcagtagatgtgtagccaagaacaagcagtgagaccttgagtgactgcattggatggaagagcatagcaggggttagcaggatgcagaaatcacatggaacttactacacaatcttcaggtgtttatgatgctttgttaccttggccatctgcaacgcgttgtcgtttgcgtactgcattgagccgtctggaatgttttgtataccacgtgctagttgccatgagagaaatctgttttacaagaagaatttgagatgctgtaagtcttgaattcacctccaaatatatatggtagatgtactgaacctcaggagacatatgataaaccagctactgcctccatctttttatatttgacgacatcatctaattaaaaatggagggagtatttgactattcgagtgcagcactttcttcagagagaaccaataaagaattaacttagtatggaatgggtatgtctgaactattaaatatgaccatccatctgttggtataaactaacagcccccagggtgtttgacgctgggaaaacaaatctgtcagcatggaaccgtatcactgacatcagatttgtcccccctagtaagtatcatagggtgaattctttaacatatatgcatgggcaagcgttgacgatatcaaatccacagacctgtggatgatatttcacagtttcaatagaaggaatgccaagtgagtcagctcttacccgaaaacaagtccaactgcagctccaatatttgccttttctgctgtcaactcaaactcaagttctaaaaactggcaaagtaggggaatgagaactatatcattcagaataattcccttaaccattatttaactgcagagaggctcttaccttcaatttcctttttactttcatagcctctacttcagattgaactactggacgttttgatagcagcttaccggttttgctcattgtttcagcaatctacagagatataacaaaaagaagtgttacatttgcacacatacctatgtggtcataccttttgacaattcagtaaatcaatgcagaggggattttccgatagtgactacagagttgtaacgtaatttagcgatgagagaaccatgacacaatgaatttcacaggttttcttctgcctccataggtaggatttttgccattaattcacccacattacagatgtttccatcgaactggaaccagttttacctacatgctcaatggaagcaacattcctactgccctgaatcgcaacatactaacctctacatgatttatgtttgaacatatgatcaaatgattagtgaccaataagcaaatgtaccgaaacaaattcaacaaaacaacagcatggatagaatgtggatagggtcagtgcctagaccttcttcagctctcccttgccgtattgtcccatggacgtaaacctccttccagctgacatcagccgcttgccaaatgctacactatgtaatgcaaacagcaagggacacatccttcaatcaagaaactatgctacataaaacacaactgttgaagaaatatgaatccaatccatgcctgatttggcactgccggtcaagtagggttccattgaaggaagttgcttgacaaggttgtttgatgtcgatgtgtcagccatctcccatgcctttgcaaggttgagcagcagatcacctacctcttggccacactatctctccacagagaaaaacgaaaacttcttgatacaaagaataggccttcatagatctaataatcatcgagttcttgcttgaaaaggacatcgaattcattagtacctacggacctacctcgtcaagaacaggcccattggagagatcaaatgccgcatcattgagcttcaacaaacaaccacataaacctttgttaacccaaaatagaatttctcgtgttcacaagttacactttaaactttgtatcactgcatcattgctgctattcgagagtgctaagtttgaaataaaaaagtagccaaatcgtatcactagaaaacataggcatgaattcaacggagatagggcaatcgctgcttacatcgaggcgaaggtcgcggggaagctgggacaggaatttgggcgggagaaccaagcaatcctacaaagagaaaacgcccgcgaattcaaaactttcgaatccaaacatagatttgggccactagagtgctcaccgcgagttcttgcaagaggggaaggacaggctcctcgtcggggttgtcaccgccggtagaagaggaggtaaccggctttggggagtcggaggagacggcgaatacagggggtgggtatctacatcgccggagatggaagcgggaggggcggaaggaggaggaggtggaggagacggcggcggcggcggcggcggcggcgaggagtgggcggcggaggacggccgtggccattcgaaaacgctctgcttttttttcacctcttttttttccctcaattttcgttctaattttacatgttgagatttttgttttggaaaccgaaacatctgggcttggagtggtggaagggcccacgctatctctttgcttccaatggaatttgtccaaaatc

SEQ ID NO: 20336 - DNA, 11150 bp, Oryza sativa
tgtaaatgtacatcacaaaacgtagggaatttcgatatgaactgcaatacagtttcgccattacaaatttgcaaggccagttccccgcaaaaaaaaatataaaaaaataaaaatttcaaggccagtttaaacatgaacaccaccatgatccatcactctatgacaattaatttacacccacagagtcatcagcagataatcacatccagttaagctcttcactgaaagtctgaaaccatccatggcctaaactacagagcactacgcatgcagcagcagagtgatctctctctctctaggattcaggcctcaggatgccattgacgacggagaggcccaccacgacgccgagcgcctcggtggcggcgaccgccccggcctgcacgagcccgtctccggcgagctccgcgccggccaccagctgcaccccttccccggcgacctccgccgcctccttctccgctgccttcaccgcctccccacccacctccgcggcctccaccgccgcctcctccacctcccgcaccgcctccgccgccgcctcctccgcccgctccagcttcttcctgatgccgaagagcccgatgccagcggcgttggcgggggagggggacgccaccgtcggcgccgcacccgccgccgcggacaggagcaggagcgccgcggagcgccggtcgaaccgcacggcggaggcggccacgcggcggcggcgggtggtggtggtggttggcgcggcgcggaggacgaggttggaggcggtggtggagacggccatggtggtgagtggcgttttgctcagctcagctcggctcgtctgctcggagcctcggactcggagtggtgagtggcgcggagggaggcgtcaagtgtggccgaggatgtggtggaccgggaagacggttgccccggagccaatcgtttggtgacatgtggcatgattattctcatttcttttttttttctttttccaaaaatcttgagatttggagtatattgatttgttctgtccaagtgtcaatgattgaaggccaaccttagcccacgttccgacttccaaattggccacacttctgtcaaggttatggcccaacatatattacctctgatttttttgaaggatttagactgttgactcataaaataacatttggtcatttaactcattaaaaagttaataaaaatatgctaaattataaattatacctaatttttttaacgataaaacataaaaaaatgataaatgatagtaagacgaatgataaaatactatgtcaaatttcaatgacgccatctgttaaaacagaacggagtatatatggatcttttttatggctgaatgcatggcccagtattaagattttcgtgaactgaaaaggttacatttttcgtaaatgtgttctgggatatcaattagaaccaatgcaatttctgctggagttcagataatcaaacagataaaacagactgaaaaaatgcagctccaagagaatggaactgactgataaccccagcagactaaaactgttcaatgttcagtcaagcttctatcagataaacgactgatagaaactaataaatttcccatgcatacaaaagatacatctgattcgttaaaaaaaagagatacatctgctgtaactcagaacaatacattcttcctgtgcctgctcttgccgtcttgcgatgcgctcaaacaagtaatcgctgcatccatggttgcctgaaaatcgcatctgaaggcagcattgcattgtattgcaagtttctcctgtgcatgtgaagtaaatctattactctttgattatttctttccaagggcgaggttgacccggatctccctgccttctagttcctgcaaaatacgttgtcgttcagttaactttgtaaggatgtcaacaaccatcttaataaaacttgatttaaggcttttcttcagatacatgagaagacaggttaagcaaatctcctttcgagcctaggactgcattcaaggttcattccaagaattcttttgcgaagttattagtgatgtgaaccacttaacctctacacatttaactggaattcatccatccgtttatttggcatttggaagcttaacaaatctactctcactgtcatgccaagctaagcaagcttttgggtgtagagtatcaaggaggaaagaaaacggtggaatgaaggtgcatttaccgttccattgagcgaggaaagagcttcatccatctcctccttggtggagtagcagacgaagccgtagccacgggaccggccggtctcgccgtcgtagagcacccgggcgccgaccacgttgccgcacttctggaacatctccgtcagcatctccgaggtgaccgtccacgacaggttgccgacgaacagcttgtgctcagtctccgggtacagcggcagcttcggcttgggcttgtccgcgaagttcaccctcatcgtgcgcccactgtacagctgaaacgaatcgaatcgaatccttcaggaacagaactgaataattgatcgattgaggatggttggattgatcatgagagattgagagtgctcacgctgccgtcgaggttcttgatcacttgctcgcagtcttcgatggtgctcatcgtcacgaacgcgaagcctcggctcctccctgtcgcccgatcgtacaacacctgaagtcaaattgcagatgttgagataaagtttaatttgtctaatatattgatatgcaaagcttttgcatgttcgtgaaaataaaagagataaaatttaatctgccgatgtaggttctggtgcatgtctcaaaaataagcaattagtctgatgagccatgatcatttacttacgtgtcaggtgctcgggtatgtatcttactcttacgctaggaacagacatagaacggtgcttgtgtttgttaattagcattgagttggattgttggcttgttgctgcaacaaaatttcaatttctctgaaccccaacattgggaattactattgagttcatgtcggtaacaaaaacaaaaacaaacaaataaataaacaccattttttttcgttcaccaactgaggaacgaattaagcacaagcaagcatgtgtctactgcatataagttcacttaagcatttaatcaagcagaagacggtgacggtgtacgatacctccaccatctccggggtggcgtagtcctgcacaatgccggcgagctgcgcgctgtcgcagttgtacggcaggttcccgaagtagagcttggtggtgatgcccgctgcctccgcctccgcctcgccgccgcccgagctgccctccaggacgccgccctgctcctcctcctgcacagctgctccgtcttcctcttgcaactgctcctcttcgacctcctcctcctgttgctcctccacagccgtggccgcggcctcctcctgcgagaccatcgccgtcgccgcgcgcatgcgcatcctccccaccggcacggtgacgggcttggcggcgacgtggtcggagaccgcgagcaggaggcgtcgctggtggtggtggtggtggtgcgcgcgcgccgcgggcgggcgggggaacaggggcgcgtgctggagctggagctggagctgcatgatcatggcggagtccgggagcttggggcgcgcgaggcgtagcgcggcgggagaggtggaggggcagctggagttggccatggcgatggcgtcgtgtgtgtgatgtggaggggcgcgaggccagtgggaagagatggaggacgagaggggataagaggtggtttactatgggccattgacatgtgggcccttggttctgcttcttgttcatcacctccacttatcatgcgttttctgttgagattttttccccctttttttcccttctactgtgtttagcttagcaaaggatcccttgtttagatattaaaaagtaggactggatatagtatataatctttttttctgttttgtactctgtatattgagtaactattattatccatctacgccattattactatatcagacctgtcagttgttgtaacgttggtgcaatttactcttttttttaactactacctctatattttaatgtatgacgccgttaacttttttcccatttgtcttattcaaaaagtttatgtaattgtcatttattttaccgtgacttgattcattgtcaaatgttctttaagcacgatataaatattttcatatttacacaaaaaaattgaataaaacaaagggtcaaacgttggtcaaaaagtcaacggtgtcatatacattaaaatacggatggagtatttctaattttatcaatttttacgtgtcctaaggcgtacattcaaaataatacatccaggaaaaaactcactccattaccatggtgttttttctttttgcataattcagtttattgaaaagtaagcataaaacagctcgaaaacagcaatttttacaaaatgaaaataataaggctgtagttaatctatacccaaatgccgctagtaaacctgcttatttatttgtccatcgaaagaatatagagcttgatttggacacattttacataaccttttttttccactacagaactgcctgagcagcattttattctgcccttgctgcttaatgtcctgcaagttctttcttcttcttcttcttcttcttctttttttataaaaagaaacagagaatgaacatctctggcaaaaataaaaaataaataactgctaaaaaaaaccctaaacagatgggcattcgcagcatgcagtcttgcgatcagacgatcagtacacgtgaagcacgggtgatgatcacctctcccactccgcgctgccgccgccgaagcaggagctcctccggcgatgccgccgcggcccactgctccggcggctgttggccttctccttctgctggtccggcgacagatccgccttccacttctccagcagcagctccagcttcctctgctccacggcggagcccctcgtgtccatcgccccggagtgctcgacgaccgccgccgccgccgccggcggctcgtcgtcggcctcctccgtctcgctcacctccacgatcctcgccagcgacccgggcctcctcaccaggaggtccttcacggagaacgcgtccggggagtccggcgagctgcagagcggcacggcgcgcgcgtcggtggcgtcgagcaccgccaccgccacgttcacgatgccctgcggccgcagcgaccgcggccgccggagctgcagcgccgccacctgccggccggtggtgcctcgcgcggaggacgacgccgacccgacgaacgtgctgaccacgatccgcgtgacgccgaggacggcgtcaccgccgaacctccgcggcgcgcgcacctcgacggtgacggcggccgtgtcggaccggaggaaggcttcttcgacgcggaacaggaaccggtcgttccacgtcgggtcggcgccgccggcgaggtcgacgccggtgcggagcttgtgggcggcgtcggcccaggccacggcgtaggcggcgcgcacgcggcggccgaggcggcggtgcaggtcctgcgcggagatgacggtgacctcgagcaactggaggagcgtggagggcggcggcgacggcgacggcggcggcgacgcggagcagtcgtcgcggtgccggccgcccgccgacattgtgcagatcgaacgaagcaacgacacgagggagagcaggttgagacgccgcgtggcttttaaaaggagaggcaaatttggagggaaccaagtatggcgcgtacgagttggctctacagctcgatcttgcagatgctgcctgcctatttggagcggtttcaattcaggtacgattcgttattgtttgaaatctatgtttgtgagctgtgacaatgatccgatttatacacccgtagcaattgtcaatttcatttatttccttttattttgcactctttttctaaatctcagacaggagtattttggtgtgctttgaattattggaattaaacgatagaagaaacgggaggagttcaaaccatgctgtttggcagtactaagtgctatctgtgtatggtaaacatattactgtagcgcaaatttagccttgcacgtgatacacaagaaacatgagcacatgagcaatagaacacaagaatgtgcgatacatgttggactagggaaaaatgtcatgaaggcgagcaaacagctaagctctgtgcctgtgcagagacagggagtagccaactagcctgatggaccatgcacaatccccacttctgaatactgattctagtatttcacgcatcaccaaaattgcaaaccgatgcagcgagttgcacatagacaacagcaacgataaatgcgtatgagagcgatgataacggataaaacgatctaacattcaaaactcaaggattaacatccaggatgcaaaataacagaaaaccagacatcgtttgcctcatttaggaacatagagttacgataaattaagcaacaaaaagacactggtctcccagcttagcgcaacaagtgcagtctagttgctagcagcagcccccttcttccttggtgcagcctcagtccctggacaacatttgcaataatcaattaacaagtgctacagcatttgcaatatacttcctccgtttcacaatataagtcattctagcatttcccacatttatattgatgttaatgaatctagatagatatatgtctagattcattaacatcaatatgaatgtgagaaatgctagaatgacttacattgtgaaaaagatggagtagtaaataatcagtgaacaagtgatagaacatagcaagaagagatataagcataccctctctgaagttactcttgaacctcttgggcacgtggcgaaggtacctcatcctcccagttccagtggtcttcctcctgatggccttcacactccagttgtctgtgtttcaaatttcgagaaagaatcaaagtagtcagaactacatatcagaggagctgagcagattctatcaaacttcatcaatgaaaacagcaagagacctgctgcatcaagcagcagcagcagcggtctgcagccaggagccgagcaggcttagggcttatatttggggagcttctagcagctgcagcttctcatagaatctctagctcccccaaacagtccagattaaatgcaaacacactatgataatctacctaaccacaacttcgtaattggacacaagggattggccaaaagatgtcaactcgagtaatttgattgaaacaaacaagaatctgaaagcacatatccccacacaaactgcttcctttcaatcagaacagattgcaagtcacaaagaatctgccacaattatcaacagtagatgtaacaaatactttgacaatgcaaagtaacatataggaacaacaactatgtacaccggacaatagtaacataacagaatgaagtaattcgataatgacaaacgctaccagttaaccagtacagttttgcatttcacgtctttacaaaatctctcgcatgttcagaacctactagtattatcgcaaatgcgacacaatataagcaaacgtataatgataaatctcctaacccacatcaaaaaacaaaataactcggacgtgatataccacaagcatagcctaggcacaggaacagcgcaatcaacatgcctgaactgatgggagcgcgaaaaactcatcaacatcgcaacaagctagcaaagagctaattaaaggagagggtgggcatgggaaaaaaagagagaggaggatctcgtcttacacttgcggatgcgggccgcggggtagccgcaggaggagcaggtgctcttctgcaggtggaagctgcggcggccgcagcgcacgcagagcgtgtgcgtcttgttccggcgcttcccgaagctccccgtgcccttgccctgcgcaaagaagaacaaaacacaaagcaaccagatcaatccctgtcagatccacgcgaggagaggcgctacaagatgcatcgatcgccgctcgccgcgattctcctcaccattttcgccttctccttcgcttgccgccgccgccgccgccgagggagatgaggaagaaggagagagcgcaactgctcgaggttaggtttagtaaggaggtcaagcccaactaacatataggccttcgaatgaaaaagcatgtaggccttttggcccactaagtagatgaggcctattaagcagacaaggcccacctaggctattcccaacttaggcccatgaagcgacgagctcgctctttcctcttccgccctatcgccggcggcgcggctccagcaaagctcggcggcgtgctccggcgaccaaggaggccacggaatactgagaggatcagtggaagtgagggccggacctccttagggcggagtcgaaatttcgtagcagttgagaatcttcgcaggtactggagggcggccatggaggagctggagttgcctctccccacggagaagctcgccgtggatccgggcaggtagcgagatccgatcttggcttgttgttggttgcttgatgggtggtctcatccttccatgtatctcttgattcgatcttgatgtggtagggagggaggaaagcgaggtgtggctgtgctcgtggccaccgggagcttcaatcctcccacctacatgcacctgcgcatgtttggtaagcctctaaattttgtttgattttttatgcctataagcttgtgttgtcccatgaacagcttgataattacagcaagaaagttttttttaattattttttcccgtctgatatgtttcatttagaactggcaaaggatgaattgcagcagcgagggtattctgtcttgggtggttacatgtctccggtgaacgatgcttacaagaagaaggtaatgtgtggcatcaccactgttctccttgtggtgtagaggccggattcttaatccattatctaaaaaatatcaccactgttctcttgattgagtttaagatttggaacggattagggccttttatctgcagcccaccgaattcgcttatgcgaactagcatgtgaaagctcatcttttgtgatggttgatcgatgggaggtaactttgtttcattcagcttatacgtcctggtggattctgtagcatttcttgtacagaatgttgtgtgtccttggtgtaggcaatgcagaaaggtttccaacgcaccttgactgttctctcgagaattcggaatgctttgtccaaggatggtttagctgatggaggtatctagcaaccagtttttttagaagataacaaatcctttttcaacatactgttggataatgtgaaccagtgcatctttgtcttggatacaatcaattatgtccaagtccaacatgtactgacataaaaaatgacacaggtagtcccaatgtaatgcttttatgtggttccgacctgctcgaatcattcagcaccccaggagtttggattcctgatcaggtgtaaacgtcgaactctggtgtcaatatagagaacttatgtgctcattttaactcttagtgttatatctagtttctgtgtgattcttattcacagaagagcttgctttgatgacaccctcttctgtatctaggtcaggatcatatgtaaggatttggtgttatttgcatacgtagagaaggaaaagatgttgaaaaaataatatccagcagtgagatactgaacgaatgcagggtaagaatgactagcttatggagcttatactactacagagattagtcttcttttctgatgacgtttgcattatccctttatggagtattttcaggataatattatttcagttgatgagattgttccaaatcaaataagttcgtctagagtaaggtattgttctttcatgcatttgtttgaggtttatcatacggcattctaatatccccaacatcctctgttggatactgacatgtgagtcatgtgtttatgcacaatcaaattgcagagaatgcataaaaaaatgcctatcaataaagtatcttgtatgtgatgaagtcatccagtatattggagaacacaaactctacaaggaagctgacggcagtgatacaagaaaatgacaataaagggtccagtgcaggcaatctgaatatagaccttaatatattcacggttaaatgttaggtgcctgttttatagctaataggcaaatgttgtaccctgggcatctgttttgggatatacaactgaattggatgatgagaagcatttgttttatttacaaaaatgaaacatttcgaaataaaaagagcacctgctaattgcatgttgactggaagttgtatcataatacagatagatgagatacttgtcagcagttgtactccaacatgtaatgctggacatatttcctacaaagcttcattgtgtccatgttagtatggttgctgatcacaatatttcagaaataacggctacttgtatgcgtatttgaccttgtacctggttgtgcaacagactgtggttaaacttttactaacatgtgttcagggatatcacttttcgaacaaatgcaaatgcaatttctgctggatttctgctagattagttaagaggagcaaccatagtatttgcaaacatattagacggactgcagttccaagaggatatgaactatggaactgattgataaacaaacaattgtaaggtgaataatagagatcaagttgtctttcctgttcctcaacaatcagtatatacatacatggaaggagtaaaagtataatagagatcaaattgtctttcctgttcctcaacaatcagtatatatacattttaggatggatagtatgatgatcctcatgcagcagcagcaatttcagttgatttacaaaatcttacactagagtcgtaataacaaagaagcacacgaaaatttactgacgaaatgttgcacttgcacaactactgtctactgccactagttggaagcactcgttgcttcgagctgcctgccattgccgccaccaccagcatcagcagcagcagaagaagacagcgcctccctgccatgtggctccaggagcgcctccgggctgcagctcgccggcacgaggggcaggatgccgccggggttgagagggaagagggcgccgaagtagccgtcggcgatggcggccatgtcgcaggtgc

SEQ ID NO: 20337 - DNA, 1981 bp, Oryza sativa
ggggttcacaatgactccagcattgtctgcaaatgtgacaccaaaggaacattagaattgaaccataacccataaacctgtgattaggtaattctgtagacaaaggatcaagagaacagcaggtaacacagaaaagtatagacatcctacgaattaagcaatttacaaataattcacatattatttacaaatgaaagagctgtacacttcattcacatattacttatacaaatgaaagagcttcacaattcactcggacattacatacagttgaaagagcaaaagaagaccacaaagtttgtaagttccttcatgaaacacatgcctaatgataaatgtggcataatgcaagataataacatactatgatgtctatttcaggtcaaattgcattccagctctatgctaactaatgacaatgcagaaacacaatctaatttatccatcaggaggttctctctaaattgaacaatgacactaaaactgaatcctatcttggtagacagaattacagaaactgaaaaaaaaaagtctggccaactatcatgtaacatgctcaaagtcgtgtgcaaatgccttccacttaggccttgttcggtttggaggggattgagggggaataattccacaccacaataggtgtgcaataaatcccctccaatccctccctcatgaggatcaaccgaacaaggccttaagcaagcaatttcagttataattcaacagtatatgaattaaaaagaagcatgcagctagttgactgactaaataactaacacaagatgaagcgcaccaaaacatggaaacagaaagtaccttcaaagtacatgtagacaccatcctttcggcgccacggcttgcgctgcctcacgatgacagctggcatgaccttcttcctcaggtcaggcttcccttttttcacagtagccataaccatgtccccaacacaagcagaagtaagcctgttaaggcgtcccttgattcccttcacagaaatgatgtaaaggttctttgctccagtgttgtcagcacagttcacagtggctgccactggcagacccagtgacatccggaacttgttaccagcactacctccacgccctgcggtcaaagaaagagcaatagcagccaggtaagttaggtccaaaacatctaaatcattgatgcaaaatagtggtcattcaaagggtatatgcttcgcctcattctcatttgataataacaacacagggaaaatttaaaatggtttagcttgagaaatgtgactagccacactatttgaataggaagtagaagaatcaatagcaactgaactagtaaagatctataaagatgcagcttcacaaacatctaaaagaattcgtgctaaacttgaaggatgttcatttccgaaggtccttaaaagaatttaacacatacagggatctaacaaacctaagtcaacaaacagctaaacaaaaatcttctccacatctaactacagataaccagactaaatcattccttgtaacactaaaagcaacacatctccaaattatacaacgcatcactgccttcaaaatatacaacgggtcaccacccttgaagcgacaagcagactaaatcatgctactcgaacacttgcacaagatcctagcgacacagcaattgacgcatcgaacaaccgcttctgcatcttagaaacggtaatccacagcagatgtctgcgcatccaaatcgaagcatcacgccgcgcaaactaaactagcatacgagaccagaatcgaggatcatgtgggagaagaaatcatcgggagggagcaagagattttacctcgcttcgacatcttggaaacggaaggggtgacaagcggcggcggcggcggcggccgagggggacggcttctctttcttatatagtcggggtttctagggctttgctggtattattcactttacccccttgacacactattatttttacttaacttactatactaac

SEQ ID NO: 20338 - DNA, 864 bp, Oryza sativa
aaggttgaggagaaaagactttggtgcccctcaataaaggagggatagtggttgagggtagaacggaaagaaatttgaacggaaagtgattgatgggacaagtagtgtaaatggtggtagacatgcttgtgttgtggtacaggatatgaatcctagaaatgcttatattttggaatggtggtagtacacttgaactgtcagtactatcaaagcgtcattatgtcaattattgagggcactactctgatgttgcaataattgtgaaaaactacttttagaagttagcaattgcctattggttttgttggttacgatcaagcagcctttctgagatacctgaggaaacaaaaaaaatatttagcgggcataatgttggccagatcaagtcctttcatgtgtggtcattatttacctcttattttttcagtgggcaagaattgtttaagttctttatttctcaaagctgttaatcgctgttctttaaagaaagtaatattttaactgaacctttgaactccaataggagatggatatttgtgagtatgcaaggcaatcattagagagcgaaccgtacatattatggcttctacctccagttcttactgctgcagcaatgccgccacggtgagctgcttgcttttcaccttatgctatggcctgttctgtggcatcattattatggtaatttagcctgtaatggatcctataggtcaagcttgtttaagatataccttgttgaaatagataagcaactcggtgaagctgcttccaaagaccggtatgttaccaacagctgagtctatgcaggctatgttacatttgcaaattgtgatatcagctcttatccttcatttcacagaaaat

SEQ ID NO: 20339 - DNA, 522 bp, Oryza sativa
ctggggtagatgaaggagtaccagcggtcgaggtcttggcgggctccggcggccagaggtcgaggccaccggcgctgccgtcggcggcggcgaggtcgcagaggaacttggtgatctcgatgctctcgttgcacaccacctcccgccgctccgcgtcccacagcaagggcaccgacgccctcccctcgaacccgccgcggcgtgcggaagcgtacacctcgcggagcttgcgcttgccgtagagcgcgtcggggctgtccggcgtgaaggaccacgcgccgtcgtcccccgggacggcgacggagagcgggaggcggcgctcgaggccgagcagcgcgcggacgaggagggcgcggtgagcccaggggcacgggaggccgacgtagaggtggaggcgcgcgctgggggtccccacgacggcggggaagcgggacggggtgcgggtgaaggcgccggtggccgggtcggagggggcgagctgccgcatgaggaggccccacgcggcggtccagccatggcgga

SEQ ID NO: 20340 - DNA, 906 bp, Oryza sativa
tgcacccccgtcgctaccaccacacataatcggagcacgaatcttagtatggatccaactaagaacaaattcgactcaaattttttagcattagatgtgacttaaatataataatcccctccattattttgcttacacaagatataatcagtatatgttaccgtacagttcctactaacgctactactactgctcagttttacgagtaccatactacaaggttatcactgacaaaacagagttaagcaacacactgctcactgtcactactacatacaagtggcctggtcactgccggccgccggcgagcggcggcggcggcggccgctgcagcgcgagctccgccgtgtccttccacagccgcgcctccatctccttctccatcagcctccgctccgcccgccgcagcgccgactccagctccgccacccgctccctgtccctctcgtgctgcacctcgcgcagcctcctctccagctccacgccggacaccccgccgccgccgctgccgccgtcttcctcgtcgccgccggcgacgaagccgaaccctccctccagctcgatgaactcgccgtcgtccgaccactcctcttcctgcagcggcttcttgatctcgacctcgccgttggccgccggcgaggaagccgcacggccggcgctagaggtgttcgacgaatatcccgaagcgagacgagtcgagatcgacgacgacgacgacgacgtggtgcgaagctcgcggcgcgcggcggcggcgatgttgcgcttgcagatggcagcttcgtctctcatctcgctgaggagcgcctccatctgcgcgcgcacctcggccatcttgttgagctcggcggacgttcttgccaggaggaacagcaggctgagccccaacccggcggccgcctccgtcgt

SEQ ID NO: 20341 - DNA, 3025 bp, Oryza sativa
gtcgctgtcgtcgtggaggagtaggaaatccgagatcctgacgagcttcttctcgcgcgcgccaatggcgggcgacgacgccattgcgcgcaagacagagagagcgcgcgcgcggtggagaggtgaagaagaaggaggaggaggaagaaggtggattctaaacactcagtggatgtccactcattaagtacatatcatcatgaaaacattttaaaaaatttataagatagattgatataatatatcactacataaacatacaacttaaaatttaacttttataagttgtaacaaaataacaaatttaactggaatatacgtatactaatcagagtttgatttattatttttgttacaacttatagaaattgaatttaaacttgtatgcttgtaggatgatatattacatatgtatctatcttgttaaattttttgaatttttttcatacacatttagttattatgcaaggtgattaaaagtgtttcccgaagaagaagaaggcggtgggcgttggtggtgggacgatccacgtcgacgacgcgcgcggctgttggtggcgatggatgatgtcactccaactgacgaccaactgtgggctgatgtggcaactgcccctgaaaacaacgtaagtacatgggtagatagatgacaactgtcaggtccatggatggatgatggatgaaactagattaggcttgagttctatggcaaatggaagatagaaaagatagcaaatggatatgggtaaagctaattatgaaatggtaccagtctaaaaagaattatgaaatggttatgggaaaaattgggtatgaatataggttacgtgtatacccttcctagcgtcaggcctaatccataatgacggcctcatattttcacttatgcatgtttgtacttatcagctaaaatttaaattttcaatcttaaatttaaagttgatcttaaggtttttttcattgaagtttattttttagccattgcttttagatagctaagaacacgtatataaaaattttattaacatttttttttgcaaatatgccgtttcgcttatgcttaaaattagccaaacgatggcttcctgagatggttttatttttttccaaaaaattactagtttcaaattttctaggccacaattaattagatgaagctctcatatctattcccttcataaaaaaaaactaggcccagttaaggatgagatattatctagtccaaccaatctgagtaaacaactattcagatttatgggactaggtgatatctcaactagattgggtttttttttttaaatggagggagtataccgaactatgtcctcttgtactacctccgtcccaaaataagtgcagccatgagtttccgcgctcaattttgatcgtccgttttatttgaaatttttttataattagcatttttgttgttataagatgataaaacatgaataatactttactcgtgacttatgtttttaatttttttcaaaaaaatttcaaataagacgaacggtaaaagttagacgcggaaaatcatggctgcacttattttggggcggaggaagtactatctacggagagatggacatggagccctgtcatctgatcccatcccaagtgacacatcatcaaatcagtggctactcaccaacaactattccattccccaatgattgatcaccgatgcagtagggaagaaagccaccactacaactccacggagaaacaacccatctgctcgcaagcatggccaattggatcgccccatcatccatcgccgacgttcgtcgcaaatcgcaaagtgccatatgatgctcccaaagtcccaattgggggccatggcttctccgccccctgccagcgacgacacgacgacaagcagctgcagaccacaccaccacatctcggcaacacatctcctcgatcagcgacgtgaccatcgcggtcatgtgttgtatgtactcctgctacgctcatagtcttctaaccatgcaaattatgagaaatacctgggggtctttcgactaactccacaagacggtgggctagacgacctgcgtttgaacctcacatattctaattatttaatattaggtccttccctaatattcgtatttttaccatgcaaattatcagtggcggatctatgaggacggtagctagggaccgaagccccgtcatgatcagcgttgatcgtggaagccctcattattatttttacttagttatacatgagatatgttggtctagtttgtttagccatcatatatatatggcatcactaatttttttttcatagatcgtacatcttctttggaagatcaataatccatgctacaatgaacttgtgaatgtcatgcgaggctatgaattaattaatgaattaggccgagagcttgataggaatataagatgcccacgtgttggctcggctaaagaggacttttctccatcacatactaatttttagaataaggtggtgtcgaattatggtataataggctattatgggtaataggtggtgttgatttttcttattgtctttgcaggcgagaacttctttagcttatgccagctaaagaatttaagaatttcgaaagattgggtcaagagccactgggtagatttagaaaggaaaaaatatgaattaccccataaactatcgcagtcgaccgaattaccccctgaaccctaaacccagatattgctcaccctgaacttttaataccggacgaattacccccctcgacccaatccagagcggttttgtcctacgtggcttacacgtggcaatccagtcagcattttatttattaaaaaagtgggacccacctgtcatactctccttcctctctcttctctctctcactcttcctctctctcgctcgggtcgaccggcggcaggcgttcggcacgcacgacgggtaatgggcagcgcggcgggacgcggaggcccccgccatgcccaccgctggtcattgcgtcgctgctcccgacgactagcgctacagagagagatagg

SEQ ID NO: 20342 - DNA, 4858 bp, Oryza sativa
cccttatcgaaactagtgaaattaacatagttagatttgttcgggctttaaaaattttcaactaacgccgctgaatcaagaaatgccgtggcgtggtcgttgtgagatgatagtgagagagagacagagagtgtgtggtggtattgacgtgcatagatttggatggccggagagtttgggattggtcgttgacgactcgcccgccggggggggggggagcagccgaagcagaatactcggtaggatgtactcccttcgtctcgaaaaataaatctagaattagatataatatatttgagtataatgaatttggacagaagtatgttcatattcgtagtaataggatgtgtcacatccaatatcagattggttttttataggacggagggagtagggactagggattacttgggatatatatatatatagtgggtgggtccgtgggggagtgtgtttgtcgtgctggattggtggggtgcaggagaattgaatggcagcaggagaaaatgcaacattgctcccggaaactgactgctcaaccgtctcgtgtgcagtaatgtgtttcttctacacacgagaaaccatttattttttttaaaaaaaaagatttacttgaagaagttaagtatagtattttgttggctgtcaacatcaaggtggtcgtgccggagtggttatcgggcatgactagaaatcatgtgggctctgcccgcgcaggttcgaatcctgccgaccacgattgtttcttttattttccttttttctttgggacgccttgcattgcgctgcgcatgtgggataacctttttttttttactactgtacatttgtcgacaaattttctcctaaaaaattgacagatataattatagtacaaccgtagtgtaattacactgtaacttgcatgtaactacagtgtaacttatatgtaagtttcacataattttgaatcgttagatctattacaatatttgttttggtgaggaagaaaacaaatcatagcacacacatatagttacgacctccattttaccgaaataacatgtgacggagagatttttgaaagttacatacaagttacactatagttacagtgtaattacatgcaagttacagtgtaattacattacgattgtactataattacatctgtcaaatttttgggggaaaatttatcgacaaatatatagcaaaatcgttttttttttgcatgcttcattgggctgtatatttgggcctcaatttcatgggtattgggctgggcatgtaggacaactccaggatgggaaggaactggggcccacccaaacgagggctcccgtgttttaaggcatggaataagtctataatttgtccttcaactcttgctcctgattaaatcgtctccctcaaccgcaatactgggtataacacatcgattctcttaaccgcaataccagatataacacctccctaacatttgaaaaccagaaggaatcgagtccctcagctttcataacgctcatggcccacgcatgtcagtagaaaaaaaagaataaaaaaaataacagcccacctgtcagccatctctttcttttctctttatcttttctctcccctctctggttcttggtgactccgggcgagacggccgtcagctcttgtccggcggggtgcgagggccgggtggaggagtatatcgctggtctcaatatccgcatgcacgtcgtgctcgtggcgcagggtgcgcgtaataatccatatggcgatcaacgctcgactggacgccggagatgacgaggatgacaatcggaaaaagccggcggtgctcatcgccggctgcgccaaaggcgacatcagctacgagtactgcaaggccttctcctccctcggctgcggcgtcgtcgccaccgacatccccgaccgcatgccctgctagctctttgttgagaatactactatcagaatgcagcatgaaaccaacacacacatgaaaaggattcatgaaccagcaacacaatgcaattgtgcaagcaagacaacgttatacgtcgccgtggtgaatgtgggcagcgtggagggcacggtcgcgaagccgtgggctggaccctactgtgcgccgaaggcggcagtacactcggctcggcgagagctgctgcgtatgggtgaaaatattacgaaaactttccgggaatctgtcggtctgaaatttttcggagtttttttggaaatggaaatgaattcagaaatattttctcagaaacggaatcgaaaatgataagggtagtttccgtcggaactaggaatcggtcggaaactttccggaaattttctcggaatttccagatattttgtgactgaactaccctgtattccttttttatgacactaatgaatcgattttctagattcgccactggctgcagcctgcttcgccttgcgttgctgggctttcgccacctggtgcttcagtagttcagtccgttgtttcacctagcttcacgtcgtccgactttcgtcctatgtcgcttcgctaagctcacttattaagggtgtgtttggttgggcttttcaacctgcttttgcttttgcaaaagccaaaagctaaccaaagggcccaaaagccacaagtgcttttgctccaaagctgcttttagtgtagtacaaatccaaaagcagcccctacccctgctttcactggcttttgtgggaaaaaattacccacatatgccattacggaagaaaacgattcgctctttctttctttcccgttcccctttcacgaggccaagcgctggccatgggttcgacgcggcgctagggtttgccgccgccagcgcgcgccgccgtgctcccaccgccgggtgctcccgcctgtggtcccgccgtcgcgcgccgcatctaccggtgccggcttgctccatcgcccgtctccccgtcgcccgcccccacgccacccgacgtcaccccaggtcgcccgacggccgacggccgtctactcgttgcctgcccgacgccggtcgacgccgccccatgccggccgatgatccccgacgccggccgaggctgccccaggctgcccaaagccacccctgcccgacgccgccccacgccgcccgacgctactacgactccttcgccactgctccggccggcatgaaaggtgaggccgaatgctcctgctcttgtgttgatgcatgtgttgcccctagaatgttacagcaaattgatttttggcgtgcaaattgattgaacaaaaatttatttggttcaagaatgggtgacaaggcagattggggtgatggttttgtaaggcatttgtttgatgtttgcaaagaagagatagaagctgggaatagacccatgggaattttcaccactacgggttggaaaaatgttgtttccaagtttgcagaaaaatcgggtgacgagcgaaccaaaaaacaattgaagaacaagttagatgtgttgaaaaaggaatatacaatgtttatggagttcaagaattgtgccactggtcttggatgggatgaggcaaaacaaactattgtcttttcgccggaatggtgggaagaacaccttgatgtaagtactattctttcaccctgtgatattttttttctattctttgttgtagtgtgccttgctaactttatttatttaatttcagagatgcaacaatcgtgagaaaggaatcaaatgcgatcatgtgaagtttcgcaaacaaggaccaaaattcctagatgatttgcatatcatttttggcaagtcacatgttagtggggcttcagcatcatgtcctggaaatgtatcctccgatgaggcaagtgatgatgatgtggctgaggtaccaaaacctgcagagacagtgaaccccgaaaaaaataaacgcaaggggtcgtccactattgttcgagataaggatgagaagagcccattcgctcgtatgtacaagaacacttgtttgaagatagaaacggcggcagaaaagatttgtacaagtgttgaagcatcgtcagcttctccatgcaatgtagtccctaccattaaagaggctatgaagatgatgaaagattgtggggtagaagaaaaaactgctctaatgcacacagccacaactttgattatgaagcctgaatttagggaggtctttagctacctagaaacaaatgaaggaagactcgatttgatcgagagggagcatgaaaaggagatgatgaagcgttagtgattccctacattaaaattttatttttatcgattgttgccttgtttatgtgatatttgcttccctatgtgagaacactttgagttatttatttctatgttgtaaaccaatatttgcttggacatgtaaaaccgttatttccatgttgtgagctaatatttacttccctatgtgatgttatgttctgtacttgttgttgtacttgtttgccgttaattgttactatatcttctgtagatggatggaaaattagtagatgtagccaaagaagggcaaaagggatcattgatgctagctgaccttgcccaacatgcttctattaagggagaaatggccaatttgtacactgagcggtatttgcaaaaaggtgcatacagacaaacgccagaaactggaattcaatgggtgatgaggttgatggatcgtccaaggtatttttataagatgtttcggatgagccctgagatttttcatgcacttcatgacttgctagtctctacctacggattgagctcgagcaacaatgtttcatccattgagtcattgacgatgtttttgtggatcgtcggagggccacaatcattttcacaagttgaaagtcgtttcacacggtcactttggatggttcacaccaagtttcatgaagtgttg

SEQ ID NO: 20343 - DNA, 5834 bp, Oryza sativa
catctcagaatgtgctagctatttgtgactttgacatgaggtttatctttgcggttgctggttggccaggttctgcacatgactcgcgcatcctcagtcatgcattggctaattttccttcatttcccatgcctcctacaggtataaatggttccttcattaattttaatatttgtacactagtattattatttgcattactaacttagttttataggaaaatattatctcgtcgactcaggttatccaaaccgaatagggtatcctgcacctttcaaaggaaccacataccatataccagaatttcggcatcgttcgggacctcctcaaggaaagtatgaggtgttcaatttcttgcattcctcccttcgaaatgttattgaaaggtcttttggagtcttgaagcaaaagtggcgtattttgaagggcatcccaagtttctcacctactactcagaagcatatcatcatggcttgtcttgctatgcataacttcgtccgtgatagcaatttacgtgataaggagtttgagagatgtgatgctcatgaggactacttaatagaagatacaagtgacacgtcagacgatgagagtgaagatgcagagaatgatgataccatgaatactattcgtactaggatagctgatgctttgattagtgcaagaggaggatagttatttttagatatggcatcattgtatgaaccatttatcttttgctctgtttatgtggaccatatcactttgatggataaaaaactaatatatgttgatgaaaaactttgattgatgaaaaaattatacattttttctttaaaaattgggcattcaaatacaaaatattgaacatattaggtttgtatgagtaatttgcatataaacagtcccacatgccattaggggtattacaggtatttcttctacaacctacagtttcacagctgctctaaccaaacgggcttctgcttttttcacagctgattttcaacagctgcttttccacaggcacagctcacagcagcttttctaaaaaccacagctcaaccaaacaccccctaagttattatttcgcttagcttctcgtcgtctggccttggtcttgcgctgcttcacgatcgaggcccatttgttacttcgacaggacaatgaaaagttcccaagtgtgcctgcaacacccacggacccttctgaatgtcaaaagttaagtttaatttgattcttgtctgattaataagtacaatagttgctgtcttaaaatactactatgatgtgttcacgtgcctacaggattactacactcgacgaagattcatggctatctgtgagttaggaacgacccggccgtcgcggccgataggcaagtaacaagaatattgcctgttgtctatttattcatttattttctttcgatcacttaggcttatttagtttccaatttttttcctaaaaacgtcacatttaatctttagacacatgtgtggatcattaaatataaatataaacaaaaactaattacacaatttgcatgaaaatcgcgagacaaatctttagaacctaattagtccacatgattagccataagtgctataataacccacatgtgctaacaacggcttaattaggcttaaaagatttgtctcactgtgagttatgaaattagtttttttattcgtgtctaaaaccccttccgacatctggtaaacatccaatgtgacacacgaaaattttctttttcaaactaattatttagttccaaactttttttcaaactttcaacttttccattatatcaaaacttttctacacacaaacttttaacttttctatcacatcgtttcaatttcaagcaaactttcaattttaacgtgatctaaacacacccttaatcaaacaaaggtagagacgtcggagagtagctaggctagtagaacgaaccaaagttgccgcctgccgtcgtgcgcttgactagacgatgtaggagtacgcagctagtgccgtgcacgaccacggaaccagctgctctctgctctaagtctcacaagataagctaattattatctaaagctaattttaagtttaagcttttgattttgagattcatttatgatgttttctagcttgttactgagaagattaatttgacttgtgttatactccttccgtctaaaaaaacgttagatttaacataatatagtatgaacaagctcatatcctaatttgttgtactaaattgtgttaaatacaattttaaattgattttttagggcggtggaagtattacccaacactcctttcattgtttttaaaatgacaagacaaaaaaattgtcaaaggctaggtaatttaaatattaaaacataaaccataattacgaagttgatttcttatcttatttttagcatttgcctttaaaaaacatacataacgaagtgaacgtatagcttaactggttacgaatcttatcataaatttaacacggtgctcgtatttatgactaattaattatctatatgggttcaaatcgtagatttaacacgatgctcgtatttacggctaattattgttttagtggcaacatacgtacccaatcggtagtgaggtacccatggcgactttgtcaatttcatgatttaccgctcagtctcgaaggtgctaagaattagggtatacatgtatgtatttatagggtgagtgtatgtgttgtgagcatttacattatccttggttttttaaagagaacacatgcatttcatctcgaaatgaaatatttgttaggtgagtacaggtattataaaagtaagtggaaatgattgaagaaatagataatccaagaaatgattggttaataggagtaggtagatggagattaacaagtttgctattatgtttaattttgcatgccttatcaactgtggagcaagatcaagatcaagataaaaaatctttatgtgttacttgcttaaagaggtggtgttaacaaggataatttagcaagacggaattggaatggtagtctaaaatgttgtttctgtatgaaaaatgagactattcaacatttatttatggagtgtcattatgcaaagtttatttggatagcagtccagttctcttttggattacaccttcctagtagcatatctgatattttttatggttggcttctaggggttgacaagaaaaagagtaaactgatacttgttggagcctctattttatgttgggctttatggttgagcaggaatggtagggtttttgataaatcaccatatgtttactatatgcatgcaattttcagggcattatattagctccgatagtggacacaattacaaaagtgtgatgatgatgggaagttcctgattgttgcacgtcgtaagcttgaaacgatgattatgcaaactttttaccaattatagatggagattcaccaatatagaataatgttttccttgtcctgtttggttttcttctattttggtttggtgtgtttcttttattttagcctacactcttttaaagtgctagattataataattggttataactcaatctaaagaccagtatgttttatttcattatctaataatcaactgtggagcaaacaatagatactccacacacgacacgatgcattggattggaatgtcctcgtgtatccatatactccgtacacgatgcattggatgggatcagcattcagcataattttgttacggtgggtcccgtcccattgaccttgcgaccgagctcgcgtgcatctcggtcggccggtcggtcggtcggtcggtcaggtcggaccgatcgagctggatccagcccagcgaacgaacgaacgaacaggtgactgaggtgagcgactggttgacgcagccggccagtcgtacgcaccaccgcacgtacgcgccgctgattgcgacgcgccacgacttttacactattcatatataaagtttaaccattcgtcttgtttaaaaattttttacggttaatatttttattattattagatgataaaacatgaatagtactttatgtgcgactaactttttttttaattttctcataaattttttaaataaaacggacggtcaaacgttggacacggattttcgcaactacacttattttgagacagagatagtactacatactccctccatcccaaaatgtttaacaccgttgactttttcaaacatgttttaccattcgtcttatttaaaaaatttaagcaattattaattctttttctatcatttgtttcattgttacatatatatacttttatgtatacgtatagttttacatatttcacaaaagtttttgaataagacgaacggtaaaacatatttaaaaaagttaacggcgtcagacatttagggaaggagggagtatatatctatggctgtttagattatggtgaaaaattttggtgtgtcatgttaaatatatggacttatatttaaagtattaaatatagactaataacaaaacaaattacagattccacctctaaactgcgagatgaatttatcaagtctaattaattcgtcattagcaaatgtttacaatagcaccatattatcaaatcatgaagcaattaggcttaaaagattcatctcacaatttacacgcaatatgtgtaattagttattttttttatttatatttaataatccatgcatgtgtccaaacatttgatgtaatagagtgaaaaattttgtcaggggatctaaataggccctatatgcaaaactaatttattttttaagtaaaattcacacattacaaataattgagctaaactattggaaaactacattcttaagatgatatattacaaaactatacatttaacgataaatttatcacaaaactacagatttaaggctaaatatcacagaactacaaatttaataaaaaaattatcacaaaactatatattttgggtttctctaatattatgctttgagttataatggttgaaattttatgattaaattgatctaaaacttgtaatttgtgatagttatgtgataaattactttaaatatgtaattttataatatattatattgaatctatagttctgtgatagtttgactaaagtacatgtagttttataaaatttacacttattcttctcgaccagttatcaatatatttttgaaattggatgtaaaataatacgtttaattggaaaatcacaagataatcccaagcttttagaaatgcaggagcagaatgtttctcactgattttcttagcgaaaaatagtctccaaggaaaaacattaaaagtcgcggaagaagagaggaggaagcggcgagcgtggaccgggcccccgccgccctgcacgtggttgaccgcccaccgaggtgggcccacccgggccgccgccgcgcagcccgtttccactcgccttcctcgattcccccgcctcccgcggcacccgccaccgcctgccacgtgtcccgatcgagtcctcgtctcctctcgcctcgttttgtcgcagagcggagcgcgtcaaccagcttgtgtcagtagcctactttcgcagacttgtcttcagtaaaaaatgtatacggatgggcccacatgtcagcgtctctcctcgttgaatttcagttcactcttgatacttcacctcaagtgagacagtgaagtgtacagaaagtttggggagtttgtctgatttcgttgaattgttcgggaccgaagcaaatttgggattaattttgctcaaaaggactgcactacgtacacttcaaataattttcctccctactctacatgttacaagcgtcttttgccgacgcaaatatctgaatttttt

SEQ ID NO: 20344 - DNA, 9866 bp, Oryza sativa
cgccgttgttggcgctggcggtgaccatgtcgctgaactggctctgcagcgcctcgtacttggccgccaccgccgccagcatctcgctcagctgccggttctccgcgcccatccgcttcagctccgcctccagcgccgcaaccttcacaacaaaaaaaaccccaaatcagctcaagaaattaagctcatcacgctcccagccatggcggccgtcgatcgtccgtgcacgtatgcttaatcacatgacctacctctgggtctttcttgagaggctgctggtgaaagaagtcctcctcgacgagcaccttgggcttaaccatggcgacggccgccgtcgccggcagcccgacgcggaggtccaggctcagcgaaggctgggtgctaatccacggatccatcggcgaacgatttatcactgatccgacgacctagttagctagctcgatcgagcaaacttttctgctgctccgacgatgtcaagctgagccaaggagagaagagaggagaggaggagacgaggtgagaggaggagctgagccctaatatatatagagaggcgggaatatggcgaggatggtctagtcatgggaggagggaggaagaggaagaagaaggcgcgcgcggggatgtcgcgctcaaacgcatgtgtactcgtcgtcgtcgtcgtctggggtcacgcaggattaggaagcggaggggaagggaaatgagtaaagaaatggagggagggggaattcgagcatgcggatgtggcggaagaatcggaaggagactggagggtgaccggaacagctagcggcgccaactgaattattattttttaaaacaaaaataaaaaccacatccctctagttcttgtgtttgtcatctcgtcatttcataatactcgttttaaaatattactagggtttttgagtggataagacgttttataatttaacaaaagatggttatgattatttgaaataaaatatatagagataaattaaataaaacattgttataattgtttgatatgacatagcacaagaagaaatagctatattttagataaagagcctgtttggcacagctccagctcaaccaaacaatttcagctccacctaaaatagaaatagagttgggtggagctctctcacaaaataaaattaagagttggaactaggtttaggttgcttcacaattctaatttagacttaattacttctgaagctaaatttaggagttgaaactctaccaaatagtccaaagtataaatattagaaatctctatattttagagaaaggtatggtttatcttgtcaaaatagaaatgattaattaattaggggatgtaataacgagtgggtgggagactagtcaggatgtcggccagcagcatgatgcatggtctttgggctggatagtggggcagggtccaaagtcaagaaaatacaccacacatgcctgctattaataaagatccctatctgcatgccttgcaattggcaaagaagaagttggaggaagaaggggacatgcaagacttcttgaccccctactactaaatactcccccgtttcaaaatatttaacaccattgattttttagcatatgtttgaccatttgtcttatttaaaaacttctgtaaaatatgtaaagttatatgcctatataaaaatatatttaacaatgaatcaaatgataggaaaagaattaataattatttaaattttttgaataagacgaacggttaaacatgtgctaaaaagtcaacggcgtcaaatatttcaaaacggaaggagtaccaccttttggacccttgcttgtcagtgagcatgcacttgccaataataacttagctggatcagtgtctaacctcttaattcttccccttttcaactctactagaaactcattttcttggctttatgtgttttattagaaaaacactctctccatacacgaatataaacattttcaggttttaaattttgtttgcaaatacaatagctacatttattattcactggtagttaaatcattaggcgtgatttttctaatcaagtaaattatctgaggcatcaattaatttccacttaaccttaaattttgctaaaataacctaaaatctcacatatttgtggatggtgtactccctctgtcccaaaataagcaatgtaggaagggatgtgaccctcctactaccacgaatctagacagaggtttgtccagattcgctcctaggttgctttttttttttttttgactcccgttccgatttcatttcccccctatgcttaattcctagtgcaactgggcaaagtagctatagtactagagtatcttgtagagcagggtaggtgtgatgcacatagttagtacagtactatgttttcttggtgtctttcctggtttggtgagctccaaacttgaggggccctagattaacctcttaaattaaatcaaatcaaacatccggaaagagctttttgtactatacaatagcttaggtttttgccaaattttgactagaaatacttttggggaagactactctcgccgcacgagtcaatactgcatccaaaataaaaagtttgtttatgacaactaatagcatgattaatccactgttattgaccggcgggcgccgttgggtcgtttactaagcttaattatgcaaatgatcccaaattttccagttcttgtactactccaatgtagggttattaggattggaacgtctggtgttgacaaatctacaattcagatgtatcagagacttttcttttcgtgatgaagaaaaacggaaatgactctgtaattgttactgaaagatatgcaagattactgcagaagttgcagaagagacttgtcattgacaggaacaaagaaagaacgggttataaagtgtacttggcttgagccacgcacaacacaagacttggaccaagtggtttggttggttgccaagaacgagttggctatgttctctggcacacacacagcaacgggcaattcaagcaaccacatgacttgaggtcattgtgctgcaactagctactgtcgacttgcaattttgcaatttgtcctctcctgtttgctggacgaattgatggtgttaatttctttttctgagaatagtttggttgacaacttgacaaaggtatgtgtgaaaaaaaaaacaaaataacctcactgttgggcagataacagtaacacttattgggtttgcttttcaagatttttttttttgacttgtggcttataacttataagcggatgacaaattatcattaaaaacaattatttttaaagcaagagatttgcacttgtattattagcggtctaaaatccaaaatccaagaccgtagaccgggtaacaaaaataattataaaattaaaaattaactacgccggagttcaaacaagtagtaacactgtaacacgcaactgaaattctatatcgtgtaccagctagtatttttactattgtgttaatacggattatttgaatgtcgtctggctgaaaccaaaacgggacatctggtctttcagctaggttcgtttaaatcttccttgctgtacaccatatttctatttctgttcgtatcagaatcagctcaaattggccaggctgtggtggaacctcttcaccgaggttcgattcgatccgactcaccacgaatctcgcattttcagtgtattatgcagttatgctttaggcagatgatatatacatgaacaagggtacatctttatcaataataagatatactaattcagttctaagagctgcttagaaaaataagatatgcttataaaaaacgagtgtgtccgctcctggtgtgcaatattaatcagtgtacacggttctaaataggcaacggctacactctccattctaaaaagagccaacttttaagtatgaattgtttgtccaaatttatttataaaaattagcttttctttttatggttggattagacgttaagatacagatttatcttaatttttgttagtaaatggtacattttctgtaaaaaaaaacttttacataaaagtggttttaaaacatcatatacatactttttaagtttaaaataactttaaaaccttaattaactatgtattaataatctttttacgttttttaatttaatttactacctccgttctaaaatgtaagtatttttaattatgaatctggccggaggtagtagtgaactcaaacgggaccttagtcagcgacaatattcaaccaaactaatatactacggagttatccacagagagtgaaaccgatggagatcgaggcaggcaggcaggtgtctttgtcggagcacagtattcgcccacatgtgaactcggtgcgccgaaactgcaattccggctcgtgacaccgaccggacgctgctccgtcaccgcggtttgacccccaccatgcggccctttgtctccgatcgagaaaaccccaaggttcatcgcgacgaaaaaaacgttgcgacttaccgactctgcacgctgcgaatccgtgaccatatatgccactgcctcccggcggcgagaaaggtatccggtaatatttgacattatttgcttcttccattctacagtattccatctattaatttcattttataagtcactataaaaaatgcccgtacgttacaacgggtgaaggttatgttattatcgttacacggtttagttaatgtaaaattcactgtagaaatttacttacatatatttttctagaaaatcatgagctgcaattagaagcccgatcatctcaagttagcatgtaaattttttatttagatttcttatacgactcctcctatattttcaaaaagaacaaacttaaaacccgactcaaatatggatctgtattttcaaaagcgaacgaacttaaaaaccgactcatacacagatgatgtaccagagtacccgtaaaaacatctttaatttttgtaatagttgagatttaacatttttctagttaaacttatttgaatttgattaaatttataaaaaagatatagtagtattttcaacacaaaacaaacatattataaaattatattcaatgttatatttaatgatactaattttatattttagatgttgttaattttttttaaacttgattaaacttaacaaagtttgactagaaaaaagaattaaatgccttataatataaatggagagggtacttcttaaatataaatccttttccccttagatagctagccagatattcttatacttaggccatgttcgtaacaatgttttgtccagccttaacaactgcctacgaaataagatggattattagtttatgattaattaactattataaatttttaaaataaatttatttaactttttaaaaaaaacttatacatatatataaagtttttcatgaaacacgtcgttagcagtttagaaagcgcgcccataataaacctctaaatgaaaagaaataggccttatcgatgaagaaagaatttctatttaattgtaattttaaatatgaaataattaaaataaaataaaaaagtggaaaatcgtgaagacaaggcttatgttgtgtaaattggaagagatgtttggagaaaccaaattaaacacatcaaatggagcatagctcattcaattagttctttttcttgctcgtcaaggtttaaatcccaaatttaacactgttgcttgcatttttaattaagtggaaatgctatatgtgtgtatgtgtgttcatttgttaaaacatgtgcccttatatgaggccaggtttccaattttgtttagacatgtgtgttaaagagtattgacgtggatatttgtataaaagggttattggttatattcatgctcctctaccttgaaaagaagtattctaaaaaggttgacgaagttctcattatttggagagaagaggattaacttgtagtcttgtactacgtggtttagggtttgccaggtagaaagccaaattaaggtcttaattggctttcaacatctggactgtggattgaccgtataaaatcgatcagtggagttaatcgcagactatgatgtcgttgatcatcgagttgttctagaagctagaaggtgtacagataagattgtcgcctcgtgtacaaaggcatggccgcatgagttgagttgattccaaaacaatcaaacttttgctactttgactgaattgattccaactactaattaattcccctgtacacaaaagcatcccttcgtgattatactcacgagccggtatctgtccatctcagagaggttgtaagttatacgtagtatattcttaattcaccggtccatgtgtaatttacatttacattttcgctagttttcacgtttgcataggcaaaacgttataggttaattacacaatatagtaaatttaaccagatttgtcttaaaaggtaaattcatggtgtaagtaaatttaatagcttgttaacatcctttatactcctatatgatagcgagaagatctagcacaggaggccacgaaaattttattataagcgaggaaaatatttggggtgtgcttagctcacgctaaaattagaaatttaattgaaattgaaacaatgtgacggaaaagttaaaaaattatgtatgtagaaaagttttgatgtgataaaaaaattaaaagttctaataaaaagttgtgagctaaacaggcctgggaatgataatccagctcgtcaaagggacggttggaaaatcggagcagcagcagtgaacaacttgcaatatgggatcttcatagttcaatagcgtttggacaaattaagagaggaagaacatggacgcttttatggagcttgttactttgtcttagggcacccacaatggttatctataggctctctacaagagatccatgtcagcatattttcctacttggaaggtattaaatgaagagagagagcaaagctatctactaacttagagatagtctatagagaaaaacgaggcaatacatgagagagttatagataccaatgtagacatactattaaggtggtttactattaatcgagtctattgctgagatgtacatgttttatagatagcaccttactttaccattgcgggtgctcttataaggctacgatagatccaggtcgaaagaggatcttcagatttatttctctttgactttcagtcattgatacgtgggtttatttgatagagagctcatatatcagtgacctatattaaagaagaatctcaatacgttgaggttattctccaacggaggaattatgtagactaccatgcattctaccaagaggttgtgtttgttgttgtatggaatagctcaatgtttgaatgtttagctgatttgtgataattatggagagtataaacgaattaattacatattataaaattaagaaatgaatttaaaacagtttttataataattttatttttaactataaatttatatagtattccattttacgaaaatcacactgtttatggctcaggaagcatgcacatttattcaccattatattccctggaattgtcaaacggccacttgatccaatataattatataattcctttgtggcattagttaatttctccaacaactgtgatagcaatatggaattgctaaaaaactatcgtaagtttattcagaaaaaaacttttatatgtaactatagtataattatagtttaattataatataattatattgtaactacagtgtaattacactgtaactatattgtaatctctatataagttagatataaagttgcacatattattttagtacttatatacaagttatattatagttatagtaaaattatattacaattataatatagttagatttaaaagttttcctaagaaacttgcgatagttttttaatactcccttgcattaattaattaccgttgtgttaagagttaggtcatttttaggaccacggacgttttggcttgatgccataaaaaaattgaaattgttcagtaaagattcagttaagaggaaattaagatttcccttcattcaccttattgttcaaaaattgtagtttggattctcctcctaaacatttgattggttaaaaatacttggattttgagaaactactatattgtgcaaaaatgtttaaatcccggaaagagttagtagtattatatttgggaattagtggagagaggaggagtcagtaatgagcgctacctatcgaaactttgacgctacggaagctggaagcaatccaaaccagacctacttgaccaactctcaacgatatactcaattcgttttaaaatattgacaccgttaactttttattatttgtttgaccattcgtcttatttaaaaaatttaagtaattatttattcttttcatatcatttgattcattgttaaatatacttttatgtacacatatagttttacatattttataatttttttaataagacgaacggttaaacatgtgctaaaaattcaacggtgtcaaatattttgaaacggagggagtatatactctcttcatcttgaaataattgttaatttacaattttgattttgtctaaaaaaatcattttaggtacttttgtcacatcaactatcaataatttaaaactttctccatcatatactcaactatactctcactatcaactttacatcatttaatagctgaaactatttttttattagaccttaaattttttaaaaaacctagaacgataattattttgaaaatggaggtattgtggtatttgtattttctctcgtcgtacatactcgtagtagataggatacctagaaggtgaaaatggtatataaattttctgaccttaccgatattattttcataaaattaatattaatataataataacatctttacctactgtgactatattcaaattttaatttttttttcaatttctgtaaacgtgatactacataaatccataaatatgaaaaaattttcgatcattttccttgacaatgaaataatatactatttcctaccattttcgatcatttcattcttatttcctccgtctttaaaagacaacctcacattagaatgacacattcttactttctccgtctcaaaataagtgcagtcataaattttcgttttcaacttcaatcattcatattatttaattttttttgaaaaaaactaaaaacataagtcaagtataaaatattatttatattttataatctaataacaataaaaatactaatcataaaatttaaaataaaacgaacgataaaaattggacacgaaaacttatagctgtgtgtttattttagaacggagggagtatgcgttttattttttttacggaggagtacctgaaacctggatgcagttgcatggttgaacccacgcgtgcactctcagggaaaaaaaaaatgaagaagaagaagaagaaggcgacgacgacgacgcaggcggagatcgtagagagtaccccgtctgtcgctgtgtcgtgtcgtgtcgcgcgcggcgcccagcagcgcagcgggatatccacccaaatctggggactcccggattcctccggcatgcagccgcgccgcgtgtgtaccagccacacccacaaactccttctcccccacgtgacgcgcgtggtgcaccgccccgccgccaagcccaatgcccccacgcgtactcaccctcaccccgccgacgacgtccacgcgttggtaccaaaagagaagtgggcccccaagtccggtcaccctcttccaggtggggcccacgtcctgacgccgacgtcgtcgggacacgtggaccactggcgtgttcgtcggaggaggatgaggttggggggggggggggggggaataaaaa

SEQ ID NO: 20345 - DNA, 7012 bp, Oryza sativa
gacgacgcggatgcatatgcatatgatgcatatgcattgcacacagatgatctattgtactagcaactatacttcatgttttccacatgaacctacataaaataatttgagaactttattactctctctgtctaaaaaaatataaaaagttttagttagatgtgacacattgtatatactgtctgtacatattcattgtattaagatgtgttctatacaactaaaacttcttatatttgatctaaaaaaacttcttatatttgggatggatggaacttcttatattttaggacgaatagagtagtaaggtgcgcatatacataaattaatacacattgcatgtgtgatcgatatagatggagctagcttgttaagtcaatttttcaaaaaaaggaaaacgaaaaaacttgttaagtcaatcatcatatcaatatgcgtagacgaccgcaaattaaaaggctggtcgtctttctaggtcgtcaagatcgatcgatcgatcgatcgccgacttaattgtcaaacgaagacaagtggccatcgaattaataatcagttgacaaaacgaaaagagctagcgctagctaagcattatggggcgtgaaatttacaaagctataagcatgcttcaaattcattattcgccgtcaagtacaaatgaaaaacaagaaaagtcaactttcttatatcaaatatcgatcatatgatcaatatagctttatggaaaaaaaacagcttgcaccgattgacatatatatatatatatatatatatatatatatatatatatatatatatatatatatggtgacattagcttataccacgaatctggacagacgtatatccagattttttgtatttgatagtgtaacattctatccgatgttattttattttaagacatactccctccgtcccataatataacaatctagtaccggatatgacacttcatagtacaatgaatctggacatgttttctatccagatttgttgtaccatgaagtgtcccatccggtcttaggtttctatattatgggatggagggagtagatatcttgtcaacacaaaaacgtcttcgcttcttagattccggcgtatcagatggtttcaagcttcttactatctttgatgatagcctatctcgattgtttctttcggcacacttattacttctttgtcttaaacggccactattttaatttctataacaactagatcattttgaaaattagaaattctgttaagttattttcaaaaacatagtattttcttggtgattatgtttcttggctcgtgaaatattcacgtatacttggtgccaaggtgaccacatatgtttcatcgatccgatgaacataactaggggtgggcgttcaggcagactgaaaaatccagtctcggtcttcggtttttcggttagttcggtttttgtaaactcaggaccgaatttcatctaaaaaatctcagaaccgataaattcggtctcggtctcggtctgaccaattttttccacatccgctggagagtggagatggggcgacgccgaggtggaggtggcgccagcgctggaggtggaggtggcacggaggcggcggcctgcaagaggcagaggagcagctgcgggaggcggaggagcggctacatgagctccaccgtcaccgtcggcgtaaccagcacgagggaggaggggatggggatgggaagggcccggtggtcagtggatggagaggaggatgctggtggtggtgggttggataaggttttgcttttgctgaggaggtattgggcctaatgggctaatgctgtatttcggttttcggtcaattcggttaaccgagccctaaaactgaattgaccgaacgaaatttggtgagtagaaagtgctgaccgaatttttcggtctcggtcatttcgtttcggtttttttgttcggtctttttctgcccacccctaaacataaccacacgcacacatatgtgttgataatactatatgtggaatggaaggtacaaagtgttctggggttttttattttttggatttcaggctgttattgtaggaaggggctaattacaaaattaccaccacgctgagatgcggaggggactaagtgcaaaagtgatgtctatatggagtgccacattggcggtcatccccggtgaaacaaggtttggattagcttggtttattataacaaaatgatggatttagatgtgcaattttcaaatttatagatctaaaagtgacacttctctcgaatttagaacgaccatgtgttttactcattaatttaactaggtgattccccgcgttttgctgcagaaattagtaagtaactttttttttaataattgagctaaaagtaaaacaacaaataaaactggtttatcaaaatatgttaagagagaaataaattaagtagacaatgtatgaacttgtagatgaaatatgatatcccgtactttgattatatggatgaatatatgttaagtattataaaaatgatatatatatatatatatatgtgtgtgtgtgtgtgtgtgttataaaaatattgtgaaaaataatgtgaaggaatataattggatgttgatttgtagaatttaatgaattatagatgatgttacatgcttgcataagttttatatgtaattattgctagtggatgatgagttggcatgtttatatggtaagctttagaactagtggattataactgtatagtaagataggattttcacctctataacgggctcgcccaattaaggagaggagttattggacatcgatcctacgatcgagttgacaacagcgttgactttgtccaacaatcagaagcaaattaaagtctcggtcgccgttgacctaaacatatccatcctgcacgcatggctccagtggtccaggaccgttttccgttctgagcttagctgtaacccctgactaatcatccgagattgatttagacaaccattctccatccgtttcgattcaagcgtggataatgtcaactgatccgtacgtccgatcggtcgatcagctagctatagctgttaccgcacgtgccaacgaagataaaagtaactaatcttcttgttcttgtgtcttggtcgtcgtcgtcgtcgtcttcgttttactactctgctaattaaccagaggtttgactggataattaggttgctactactactagtagtacctgcttgctgctgatccgttactgctccaccaactttgacttcatctcgattgtcaactttgattcccgggtcaaactcggccgtcttgttcgatctgccggtcaagttcatcgatcgttcagtttttcttcatttgcttccggataacattggtgattttcttcttcttttttttcactttaacttggatcgatctacatcgtcgtgatttaatttgcaaacttatatgatgccgatcatatacaatctgttattttagggcgaagccaagtggccaatacacccagtatatatacgtagtactaatcaatgtttttgtatgccgtagtgttgtgtatgtgatttggattttgaacttttatttacgcgtttcttaatttacattctatttatattatttatttacatttcaaattatcagtcaatctatcaatttcaagtatctggaatatatcagatcataggcgctgtcactgttctacttgcaaaaagaaaggaggagaatggaggaagtgatgtctccatttcgtgacacgtgcgttcacactagctgtcaagctggagtatatggtaacatgttgccaatgccccaccgtcgtcgtctcgttgatccttaattcctcctcgcatgagacttttcgcacgtcggccatgacaaaatgatttgctttggtttgttaaattgatgcatatttttaaatttgcatatatagatcgaagaccaggtggacgaaatagtcccgaacatgagatcattggaagatcatatttatactattccaactaacaactccgttgattaatcttccgtactatcttggtgctcaagcaatatggacacatttagtggccggcacaattagttatgtttaaccaacaaccagtaccttgcaggggacccaataatgtcactcttaagttaattattactatactaatagattattagtgtactacattgccttagcaaacatgaaacaactactactgtacttttccgaattattaagaagtagtaacaatacttgtccgaattaataaacaaattaagtagtggagtagtacttgttaatcaaggggaagggcatgcacgtgctggtggctactggctagctcgtgtaaaacgtggagtatgtaggtgcctttggaagcttaagatgccacttaagattaaaatttttatgtggtacttgcttaaaggggttgtgttaactaaagataacttggcaaggcgtaattggaatggtagcttgaggtgttcgttttgtttgaagaatgagtctattcaacatctctttttcgattgtcatttggcgaagtttctgtggagagcagttcagttttcttttggatttaatcttccagttagtgtatctcatatttttgatgggtggcttttgggagttgataagaaaatgagtaaactgatacttgttggagcttctgccatttgttgggcaatatggctgggtaggaacaatatagtttttaacaaatcaccatcattttcctatatgcaggtcattttcagagtaacccattggcttcggttttgggcacaactacaaatgtgtgaagatgatgaagagtttctgaaagttgcatgtcggaagctggagactacggttatgtaactttttgccaattatgggtggagatttacaaatagatttcaataattgtaatctcctttgttagactggattctttattgttgcttgctgtgtgttttattcaattagatctacactatgttcgtcaatcgcttctatgtaataattggctgtagctcttttgagtaaagtccgaaatatttatttattccattatctacaaaaaatgtaggtgccttcttttggagcacgtggatcagatgcagcttcttgtactagtgatacgatacatcacatcagcatttgatccgattcagtgactcacagaggctccacgtggttgttggattgctttgattttgaaacagtttcgactgtttttgtggctagggagtagtctggtcgagatgcagcttattgtcttcacattcgtgcttctttgccgtgggaaaatacaaacagtgtagttcgacatcatacgtaaaggtatgttgaaacatagggatggtttggttagagcttcaaatcaaacatggattgagttgtagagcaactccaccctttcatcgttttttttcagcaaattaacatgctccgttttcaaatactccatatgtttcaaaatataagtgattttagatgtatgtgacatatcatattactgtctagattcgtagtaacagaatgtgtgacattccttcaaaatttcttatactatgggacataagaagtaattgataatctagtttagatttggttcgatcaggcaatttcatagaaaaaaactaacaatgtaaaaatgtatggaccattatgaacaacggagcaaacacaatggtttcgtctcgatgatcacaaacacaattaacaaaacaattgctcttaggcccaattgtttttctcaactccaaacttcaactttctcattttccattagcatatttttaaaattgttaaatggtactctttagcaaaaagtttctatgtggaagttgttttttttaaaataaataatctatttttcagtttttataatatagttaatacttaattaatctaataagttttctcgtttcgcgtgcactgaaaatatccctccaaccggagagaacgaacagggccttagcaaaaatatctatcctcaaaaaaaataaaatctaattcctccatcttaaaatatagcaacttaaaacttaatgagacacaacaaattagtaggatatatagtcctaatttctttgttatcctaatttgttaactgactgctccgttacgagtggacttgaggcccatatctcttttatggaccagaaccttggggcccggctcatcacctggcgcgacatgggcctgatcagactcgcgatgcccatcacgcagccacaccgtcatgccgacatgggcttcatcgaggcccattagaaagcgaagccgaagaagcccacgccccgtcgcctcgcctccacacctcccccttcctttcttccccgacacacctcgtcccgtctcttctgccgccaacgcgcgccccgcaccaccgccaccacggcgagcggccgcgcgccgccgatccgaaggccgcgaaccgaaaccctagcgcctccggcgtggcgcgccgcggcaatggaggtggagcacctctcaccgtcgcgatggcgcggatcagccgcctccgccgctgtccccgatgtcgcgcgcgcgcgcgctctgctcccgcatggagggaggttcgaggcatccccttccgcttccgttgtttttattatcagattcccagttccctacctcgctctctcctcgatttcgtttcggttgcccactgcgcagcggcgagtttggtgttttcgatggggggatttgtgcgggtttggggctgcgaattcggtcattcggtgcggcctctgctaatatagcgcctgctgctttaggccccgaataggggttgatctgggctcacgaaacgtggccaccttcgctgtgatcatttgtttcgacaatttctcttgcaaggcgcgcagattgttttacgcgagttgggaaatttgtggagggaaccgatttgtgggatcaatttcctggctataatcctcagcattacgttctattggctactagattctacgattttcgaattgtgttttcgagcaaaatcaagtctgatggttaactggacagaaattcgcatttaacggattg

SEQ ID NO: 20346 - DNA, 4678 bp, Oryza sativa
tatcattttactagaattcagatttttcacatattggcagaaatctatctagatgaagatgcctctaggtctatcattttactagaattcagatttttcacatattgggcatatatatacctagattgttgaatctcttttaggctcaaagatacttactatggagtatatatgttcctgttaacattaaatttaatatcaaaatacaatttggtatttggtagtcgacacagtcaaagagtatacggactgaatcacctaagaaagtgagccatgctgcatcaatggatccttcaatgcatgatggatatccagctgtaggtgcacgggtagatcactttataattaggcatttcttaaattgcaatttacatctagattcgtacgagtagtatggaataacatcctaaattctaaaaaaaaactatatattttaggacacaggtaattcatatctacttcatcctatagttcagaatagaggtaatagtaccataccagcatacattttcatttttatcctttgtcctaaaatatagcaatatatgactggattatatacattttatatcatctgtctaaatttattgaagtaagatgtgtctaatccaatattaagttgctatacacagctagtccctttgtcctaaaataagaataacttacaacatccgtcccagaatataagaaacgattattaagaaagtaggtaaaattaaataaggagatgttctgattggttgagaaatgtcgaggtatgtggaaaaagtgaatggagggttgtgattggttaggaagggaatattagtggagaaattgttagattttgagacaaatcctaagtgctaaaaattgttatattttaggacgaagagtaatttctacggttcataccctattccacagtaaattgatttttgctcttttagctttgtacttggacttgggattactaaggtctaaggtctaaggggttaaataggtaggcaaaagatggtcacaagtgaaaaggaatgggattggctttgtgcggaggaaccattcttgaaacccgcaatacccattccttaaaaagtactgcaaattcattttccctctagaaaaaaaatttgtccagcgtgagtcaaaagtaatacttttttctatttcccttcacgatcaacctttcggattttagaagctaagcaacccggtgaaaaaagcaaccgtattaataggggggctggctgctcacttgaaacaaagagctgctctgggtccaagaagcgaagggaatgagcttggcttctgctcctccacgcttctttgggcctgtttgaggtagcttctagcagctgcagcttcttccagagtcagaagctcccctaaacagttcagcttttggtccagattctgagaagctgtagttgagaaacccagttttttcagattctgagaagctggctaccaaaccagctgcttcttataatcttaagctctccaaacagggcctttatttttccgtgccctttctgctcgtgcgaattcacaaactaagaagttttattactttaatacccttatctatcgattcaccaatagtaatttttcttttcattttgtaataactttttctccttttaaaagtgccttaaaatgtaaggggtggttttttttgggtggatgataatgggccggatactccctcccctccattcccgaatataaatattttgagcgtttaaatttcattcataatttggtttacaccatcagacgttatttttccgaatcaagtaaacttcatcagtatgtccctaatttcaactcaaccttaatttgtgttaaaaaaaaaacccccttgaaatgccttaggatggtattttgttactttttagctgtcatattattgtaggcattgctacggtcaccactgtcacttctgatcattgtcgttttaattaagtaaaatatgttaaaaattcagtggtgagtattttgttgaccaattaatctagcaggatttagaactatcattttccatgtgacataaaaaaaaactgtgttgtcaaagtgttgggatataacggtatatatatgtgtgacaacggtcttcatcgacattagtacatcacattacatcgttctctctttcagattatacgcagctgcaaaattcaagacataaattttactacgatacttgagtaatgtgaaagttctatgatcttaacagggcctcaatcttggcgcggctggagacggacactgttgaataaattggaactgatcgaaggctcgaagcacagattatactagtatacacgagttctagatggatgcatgttgttagcctccagatatcgtgtttatgttcttcctgtctctacaaaatcttttctctgtatcctccaatgtacagttatgcttttttatttaatttgttttgatttctgtatgtataaggattgcctcatgatcacaatagtgtatatgttgtatatatctatcaacaatgtataccaagtttttccacataaccttatctgaagcatcctttaataattcaactcatatccctgatgatatacacattggttgttcttattatctgcttttaggatgaactcccagaaattggcaatttgccagagatatcgaactgaatcaaattagtgagctatgtaaactctgagataagccgtcggtcaaaagggatttcttcagaaacctatcaaagcttcgacatcagcatgctcgcgggtgaattttgagggggagaactttgcctgtgaagctcctgcaataatcaagataccatcagggatatgtatgtgatcatttttgtcagaatcggaaaaaaaaagttgtttcatccagctatttatatttgatatggatttttcagaatgttccttcctcattctgctaatgatcataaatatgagtatctatgctatcatatggttgtttttttccaatttcaccttttccttttgcttaagatgtagaagaagttaatcgataagcgattggatttttaccttggtattggaggtcttcttgatgaatcctttgtcttccagggacttcactgcttcatacaggtattcatgcacaggtgtgaacttgatgcctagatccttcagaggttggtttgtgaacttgtagcccttctttggtggatttatctcatccctgcacctgtagaagtaacatgtaacagattagattgggcatcaaccagaatgtattccactaagtataaaaacattgtttagtaatctacaaggaattgcggagttcagacatcacatatgttatatcttgaaaacaatcgtgttattgtctttcaagcaaaggaaagctattgttgtgtcttcagaattcatataccactttctattttgtccacaacaataaattgccatcacaaggaaatataggagggctttattacgcacaggcgcacagtaaaaggaaagaataatttccactgcgattcatagtttgagttatccaaagtactaaccatggcattctaaaatgatcttcaagccactgactaacctgagattcaagtacctcatggcaagtcactagtgcagtagttcttcagtttcgatattaagaatttcagaatactatcatataatgcagaggtagagttttggagaaagacccatgtcttcccttttcttttttctagatagaaggaaaactatcatacacccaaccaaacacatcctaattgtgcaatccagattagttgactactggctttctgacaaagcaaattgcaaaccatgggaaatactagttctcaaactctctagtccctactgcctttggtagtacatagctgtcagcatgagtgcatatttggctacttgacaagttgacattctgcaattgctaaaaatcgagcaaccgaacatagctaaaaaaaattgatcaacaatcacaaaattccttatgaatacagccttggtatgaaacagaaagatcaatcagaattgctgttagtaccagtttggatgtagaggccggtttaatccattatcaaagaaaacaaaagtaccttgtagggatcggatactccgggaagaggccggcgaggatccggcagagctcgccgcggtgcagggtgcgctcggcgcagatgtaccggcgtccgccggcccccggcgcctccagcaccctgacgtgggcctcggcggcgtccacgacgtgcacgtaggcgtgggactcgttgacgtacgtcttggcctcgccggtgaggtacttgagaatgtgcttggtgctggtgttcatccctggctgcagcagctcgccgagcaccaccaccgggatcaccaccgccatgtccaccccccgacccctcgccacctcccacgccttcctctccgctatcgtcttcgcgtagcaataccaattctgccattccatcatcgcaatttgcacatttgttgattcgcaggtgatcgagaaatggggatttaaagtatccaaatctcaatctttgcaatgcaagaaatggggattagaaaaccccaatctttgcgaggaatggggattgaaaataaaaattcagagtcttctgccatttcattccattgcacaacttgtatgagagaaaaaaatggggattgaaaaaaaaaatcaatcaatggaagtatggggattgcaaaaaaaaaaa

SEQ ID NO: 20347 - DNA, 2217 bp, Oryza sativa
agtatagatgcagtatcaccaggaagtttaccagctctccgcttgcgaaggatctcttccctaatatccacaagcttttctttgtacccctacaggcaggacattttggttcacaaataatgcactacgatgatggatgaagcatttcaaaggacaaaaggctacctgcttaagctcgttcttcagctcatgccgtacacgctcaaccaaggatctttcaccctcggtcagcattaagggaccaaagcccatgccgtctgacccatcatttccatcaaacatgttggcttcactgtccacttggttatcttcatcatcagacatagtcgctccagtcccttcaccaggagatgcccctgcagaaccaatcatacaagcataactcagttgtccgaacatcatctaggccccttcagtaagaagtatcagactttaagatacaaatccgagcacaaaaaagggcatgttctccatataaagtggtgaacagctagcttatcaaactcaactccaattgtagttacccagcgttatctacaagcctggatcaactcagaattgttaccaaggcctcacacatgcctttgagattctgatcaatatcagcatgtgtagtagagctcagaaaatgaacaaaatcatatttaagattttacgtaatagttggtagcttatggctgctgacaagttggcacggattgtctctgagatctaagtttgcttaatcctaagcttattgtagggcacaacaaaaactcctttttctgatagagtaataattaccaaagtgatggttgaaatttaaaaaggtattgaacatacattcttggtctcaaatgaatagtgttgaaaatgttatgtatacttcttttcctttctagtttcaattgatctactatgtagtttcccattgcaattggactgaaactaactcatagcaaattagcaatctgcttgcctgaatattatcaatgaaataacaaaaaaaaagtgtatgtttgaaattttctaccatttgctgaactgattcaagcagatagaagctttggtctacctgttagactttgtaaagactgttcaagttcccagcaccccatcactgcttccattgcatgaacacgcacatgctgctgaagttgttccttgaatgagcaaagaagcaacacataatgtgtctgcaattaagagaagtatgttagagtccacaagaagggctgccatgtgaaaaacacaatgacatgttcatttccaagataaggagtaacacaggggtcataacgtcacagcaaatttcgtagaaagagaggtaatggcatcaatacatgagcttatttttccagttaacagcatgatgagaacaaggtattgtcattagatgagattagcatagcacagatattaatagcaaatcaataatcttggcagggaactttcattcatgcaaggttttacatcatctcagaaactagagaaatgggcctcagctatttttccactttgatagcttttggtctagatttatgagcctttgaatttgtggatttatttcttatttatatgactgtgtcccgtttagaaggtatcaatggatgcgggagtagcaataattatcaacgggtgatagaatcctttcaagcaaacaattcttgtaacaacttcataatcactaggacaaatccacaatatgccactaagtttcaactatctccactacgtgccactcactataaggatgtcactaagacatcagtggcatatcaaagtcatctacaacaacaaaacgggctttgcaacaaaataaccatagtacaagttcacccttgtggtgattttcaaggtatagtgagactgtttgaactttatcctgagattttttgtccaatttggatgacaaccaatcataagcataggggaaacgtgcaaacttactactactactaccatataaagtccatacaatagcaaagcaattgaaaaatcttattgcagataatccaaacaaacttaattgtccatttcttttcctcccatcgccgtttccccgacctgcagcagaaaattctgcacgcggaaaggggcataaggaggggcctgggagcggagaggcgtaccatgaagaggtcgagctcctcgccaccggaggggccaccggcggcggcggcggcggaggcggctgcaaagggaggcgggcgcgcggcgatctgcgcgtcgatgcgg

SEQ ID NO: 20348 - DNA, 1086 bp, Oryza sativa
ccgccgccgcacccacacgcggcgccgcaccacatgcacgtcatgcccggcgccgccgccgccggctacgccgaccagaccgagtgcacctccggcgagccctgcaagcgcatccgcgaggagtgcaagcccaagatctccaagctctacgtccacgccgacccatccgacctcagcctggtacgaatccccaaccccaattaacatccgatcatctcatttcatgtgcctaacttaacttctttttgttctgaattctagccttgattaattaattaatcctgttcttgcaatgaatccatgcaggtggtgaaagatgggtaccaatggaggaagtatggtcagaaggtcaccaaggacaacccctgcccaagagcctacttcagatgctcatttgctcccgcctgccctgtcaagaagaaggtaacttaaattcctctaactaattccaaagtgatttcgtaagttttgctaaatttagtgcaaattcgagcctgtttctgaactttgttcgtggttcaaatgttgtttcaggttcagagaagcgcggaggacaacacgatcctcgtggcgacgtacgagggggagcacaaccacggccagccgccgccgccgctgcagtcggcggcgcagaacagcgacggctccggcaagagcgccgggaagccaccccatgcgccggcggcggcgccgccggcgccggtggtgccgcaccgtcagcacgaaccggtcgtcgtcaacggcgagcagcaggccgcggcggcgtcggagatgatcaggcggaacctggccgagcagatggcgatgacgctgacgcgtgacccaagcttcaaggcggcgctcgtcaccgccctctccggccgcatcctcgagctctcgccgaccaaggattgacgattgctactgatcgacgcggcggattcgatcgcttcttcttgcaactgcgggcatggccattgccatcctctcctgtctctgcctctctgttcttggtggcgccagcaagaacacgatcgacgcggtgtccatccatggcggagttcgatcgatcgattgatcggctagggaggaattgatgattcgctg

SEQ ID NO: 20349 - DNA, 3107 bp, Oryza sativa
cctccatgtctccccccttcttctccgaccagcaacggccatggcagcggcggcggtcgaagcttggatcgcaccggggatgcaggtcttcgctgcggaagacgccgccgccggagaggagcccggagggtggagaggagagcagcgacgccaccggcaatgccaagcccagcatccaggtccgtttcccctcctctctgctccaagatttccctctcgtagaggtgacttctctcatgtggttttctcatgtgattccatgggtggccttcctgccctggtctaactgatgaatataaatgcaaatgaaaattgcacacagttgattatttattttttttgaacgaatcgacgaggctgccaatttcattgaatagaggagacgaaaactgtacaaaaaggataaggtacaggaaaaaaaaaacagggccgtggccctaactataggcagttacattgtcaaccaggcggcgagattttttccgcccgccaacccccatgtttttcttcctcctttatcttggctagcagagttagcgccggcaactccttgtgctggaaagtcctccggttacttttgttccatatctcatagctaaagcacacagttgattagaggttagctcatgtggactatcgtcctgcctcctgatggagacttatattgtcgttaaatgccctgcgatatgaatatcagcatcaaatgtgcttcttgtttactgttcaacttggtttaaacatgttgaatgctgactggacaggactagatatgaggcattccaaacttagttgacaggcattgttttgacagcgtaggtggtttatgaaataatttatccttttcctaatgttgactgccactgaactattttcattcttttcttaatgttgactgccactgatctaatttcatcgctccacgttgtgtcaagacagatgaagtgggatgtgacaggaggggagttgttttggtggtgagtttgagtaccagtggtatatatttttgcattattgtgagtagtcttctctagtaaattactgtttcagaaaatagtttatttatctgtttgggcataatttacaatgtcttgggactaaacattatcatccactgtataatatttctttaatgatgacttggtgccaccttggcaccttctcattttcctgattctttccagcaaatctactatttttcctagtcatttgctttcttaacttcagtacattcctcatgcaccagcaaggccaattaaagggtattgttgttgcatcttcttttttgtctaacttttctaataagatcttttcttctttgctcaagtggatcactagctgattggacgtttttttttatctctggcaaattgtagtttttagaaatctagaattcagcgcatagtttcatgcaggcagattggaatgattatgcgtattccatgtccacattgcggtcttcattaggcttaggtatggtgtcaggacctagtcataagttattctcagtctgcatatgagagccaacaacaaatatgcttttgtgtctttaatttgtagcctcctatttatgttagttctttagaccaaaaaatatcaaagaatgttctttgaatagtttgaataaattttacatgacatctgacataaacaattgcacttttgtcttgatacaaacagaatatcttttattctgttctgatgtcactaagaaaatgatttatatgcacctcaatgttgacttttaaacttgtccttttgtctctactaatactcccttatgtccttttgtcgctactaatactcccttactcccggtgaaaaaaaaatgtcatgtagttccccttagaccatcgcatttcctcgcttgtttgatatcgtattcctaaccatttaaacatcatattgttatctagtatctttcatacaggttatttcatttcctccaaactatctcttgtttttctttgctattcttggctacactctgtggacgatgctagaggaatcaatctgtcagtggtcatgactttgcttcttatgatcttatccaggttttagaggaaaaataggaggacactaggttatgaacataattatttgttcttttgtttgtatgttgtttgtatctggtattattgtctgaagaaaatccaagttatgattaggtttatgagggccttgtccagggcctactgattagaatttgagttccttttcatgccatatggggttggtacgatgtgatcctaaaatggatatttttcttctatggacttagtttaactggccccatcaaattgatgtctgaaagtttctttttttttaaaaaaaaatcctgggatgtatgaatttaatatatcatatgtgatcttgtgcaagatgaaaaaattgctacaatataagtaatcacacccattttttattatcctttgctttctgaaactttactcattcagtcaatgatagttctttttttttttcagaccagagaattcttcagatgtaattgttccctttgaattttctgattgatgacagcaagagaggacccaagcacaggctgtctgaatctgtgatttgcacatgtgttatttttctcttgttacacagttaatctggtccattttgatgatggaatcttcagggtttagacttagtaggaggcaagtgctaattgaacttactacactattggggtgtaatttttttttatctatattccaagctgcaaatttgcaatgaatttctttttttttttttgcatccatttgcaaagcttgcagctcacacacgtcatgtatggtgatgtatttacaacgtcgtcagaataccaaaactgaatggagtttcagaattcccgagggtccacgaacaggacggacgacggcggcgccgtcgtccagtcgtcgtcgtcgccggcggcgggggcggcattgccgttggcggcgacggacgtgattttcttgatgcaccagacgtcctcgtcgcatgagaagcgtcgccagtgcggcacggcggcggcggccgggtcgtcgggcgcgacgtcggcggcgacgacggcgcacgccgggttgttgcgcgccacgttgtgggcgtggcggcagagc

SEQ ID NO: 20350 - DNA, 659 bp, Oryza sativa
aaaagtttcaacaaataacatacatgggacctatttggggtagcttatagctgctgcagcccccaaacagtccagattgttacccagattctgagaatctgtaattgtagaatccggaactagaatccagaagctggaaaacccagcttctccagattctcggaagctagctactaaccagcagattcttagaatcttaagctcccccaaatagggccatggactgctcttatttatttttatatcttaagttgtcttctcattcctgaatcaggagatccaactgaatctctaatcgaacgtaactgttgtgccaactctatttagcatgaaaaacctaccatggtagtttcgtatgacatgcaaatttaatctgatagtgttttttctttgtcagataaagaacttgatgtgattgaaatggctgtctatggggatgtcatccgtcctggaaagcaatgtcgctgcaggacagtagctgagatgcttgggaaggtgaagtcaaagaatcagatggctgcttgcgagttgccacataatgatgcctcctagcataagtcatatcgttctgcacaactacaccagattcattatggtccgcacgggcagcaagcctgagatcactaccctgatttcatgctctattgtgataatgaaca

SEQ ID NO: 20351 - DNA, 15026 bp, Oryza sativa
cctgcaattcctctatgtacacttgctattctgtcagcaaagctgcactaatctggagagctcaatggactgatccatcagcagcgtcctgcacaggaatgttgagatctggaagagcgaagccgcctccgatggactgcgtggctgactgctgatcaatctgttgctttccttttagatcctctgtaatcatcggtttgttccgtgagctcgagatctgtaatcttatctgcaattccgaaaagaacttacattagatgtctatactgttcagattttgacaccaacttggttgtaagtacacaaggccacaagggtaatatcacaaagcatcttcacaagcaatggttgttgttggaaacaatagtagtaactcgtcagcaatgagagaacataagattcttcacccacatgggcaaaattgagaaaaagaatactccttcagtggacccccaaaatcagcattcgttgtgtagaaattattttgcatgaaataggtgtatcaaacaaaacatgtttgccattataatgggtggaaccatctcgatgcttatatctcatattctcattaataaatgagatccatcaaattgaaattacccggttggtgcaactacagttcaactgaatgagatgggattaggtgggcaggctattttaaatgtggtagacaaaatattgtttaccatttttggaagttgtggcttgttaagtgtaggatttattaattgggaatgtgtgtaggtcatcaggagctaaactagcgataaaattccacttcaaatatcggtaaaaccagttattatatttgccaaaactcaaacaagatcccttgaaaaaaaggattattcaagggtacacatcactaatatgtattttaaacattgtcatatgacacaatgcattgccaactgactatgcattcacctttcagacacaatgactttagggcgtgtttagttccacatcaaaattggaggtttgaagaaaaaacttggaagtttatgtatgtagaaaagttttgatgtgataagctatgcctaatgagagtttttaaatttggaagttggataagctaaactctcatttaggaaagttggaagtttgaagaaaaagttgggaactaaactcggccttaatatggctttcagtaaaggtagcaacaaatcgtggcacatgtcaacatcgttaccacctagtatcatttataagtgggcagtggcagctctctgtaccttcaagatctttactcattaattgggatacatgctgtcctgaatacagaacagggtagcatctccatgactgggaaatatggagtataaagcaaaaacaggcgagtagctttcaattcaatattggagaccatgtgtagctgcccaggccccagaagtcaatcaattcctttattggtcagatatatcagtcacaaccaccatactcaatagtagtaggctctatccaagaaagttgagttctgccagttctcagatgttggtgaaggtcgatttcatcccaacaagacaaatacttctaatcctcggctacagaggtacgtactcagatgttggtgaggttcaattccatccaacaagacaaatattaggttttctaaaggtgcagcttgcatcgtaaaagtttgcaacacaactgcgttcatatgtactactattgatggccaatgatatctatccagagcatactattagtgcggtagtgaacaaggaaattatagtgttatttgaatgaaaatttgcctctgggcttgctaagtatcttcgaacttatttctgaagacctagagtaaaggatctgaattcatctactgtttctcacgcaatgattttttttttcgttttgtaaatagtgcgtctaatcagttgttgttgctaagattatagtcaatcatacaccaaattaataactgacaagcccatttcccaacagagacctctgcagagactttgcaaaagactagaaaaatctacatccattattgtcaaaggcccatcagccttgataatgatatccatgtctattgcatagcttatcagagtgagatagcctcaagttaatttgcttaaaagatatgaactggatcatatggaccactacctttggaggtataaacccttagcaatttaaaaactctcattaggctttaagctaaaataagtgacacagcttttgtcattcaacccaaaacacaccattactggcccagatgccaaatttgggaagaactaaaagagaaacagattaaaattgttattacctcaagcttgtcgttttcttttgaaagcgcagcgcaagctctctgcaaagtacgcatctcctgctcacagcaaaaccaagtaccaaacggcagttagtgaatttgaagtagaatacataataaactgcacatagtaaagaatgtgagcatcacctcacggaggctgtcgttctccactgcaagagatcgcaccagctgctgtacgtccggtagcctctgcatatcaccaaaacaaccaagcattaagacgaattaagcaacaccagcaagagaacaggctttggccccccaacagttcacaagatttgatctttttgttggctagtacacctttgtggctttgccctaagattccactttttgttcaacctcccagcctttcaaagggcaggccgagatgtagcagcttctgctttatgctaaactagtacaaatatggctcaaccaccacaagaagaacaaccccgcccttttctcttgtgatgatagtggtttactcctccgaccgggtcaagactcaaagactcctcttttgccctagaactagtaaagcgcgtacacaaatcctaatacttttcccaacacgtgacacacacacatacattgctttgcaactgttttttgagtgccctgcgcgcgtacgcaccactcacgctggccgtagtactactattcaaacaaccaagaatgacctacagggttgcgaggacaaaggtgtggtggctcaccattttcttccgtggacgctgaccggccggccgtagaggcgacggcgctgagaatggcagttgttgctgccgacccatggcgctaacctacagggagacgaaccaaaccatctgtgagtcatttacacaaatccaaccaatcaatcattttccctgaaaatcatatacaacatccaagaaagccacactcgatggtggcaagaacaaaggaaggacaggacagacactggtaggtgggccccacccccaaccacagctgtcccaacgcatgatagtcacaggatcccacattattagtaaaaaaacaaaacatcagttataataagcacgctaataggaaaggaaccctcagctaaacctacacctaaaccataccctcctccatctctttaaaaagaaaaatcaaattctaattatgaacttgaacaaatctttaaattgatttatttcgagaactgcatacgaccatccatcccattcgccgcgcaaccgcatgacgaacgaagctcagccaaccgctacgaccactgactattacatgtgggcccggctcacctttcctcaaaggggaaaaaaaaggaaagataagaaaagaaaaaacccgacacaggtcatcgacaggtggggcccctctcgccggcgctcacgtcacccacgtcgaccaccgcctccgccgcgcgccgccgccgacacgcgcgcgggaggtgggcgcccacgtgtcgcgggcccacctagctttgactctgtccaaccgcgggggggagtgtggcccccaccaccaccaccacgctcccaccacacgagcaattgcaccggaggataaaaggagcacggaaattaccaccctacccccggaacaagcgtaagtgcgtaaccaatccccattggccatggtgaagagagcgaggggcagcatgggaaatccgcgtgcgccgcacacccacttcgccgagtccctgagtcaaccacaaactctactacttccagccatacaaccactggacgaaaacaatccgtgctcgatttcttcctgcggctgtttggtctcgtcgtctcgagcaattccaatgtggaatccagaatctcatttgttcgtggggaagcaatgcggatctgcgaggcggaaacggggatggatgggtgggttgcgtccgttgcaagcaaagaagggggaactgtattatggtagtggatggtgagatggagaattggcgaggaggaggaggagaagaaggaaggtggaaagggaagggaaagggaaaggcggtgtccaattcaccaagggaagggaagggattttcgccactagtaggggtaattccgtcacacggtacagaacagaagcggaaaagggcaaaaaaaaaaactcggaaagcaacatggggataggagagagagtagtggtggggggaggagaagaacccaatgcagcggcggcggcggcggcggaggcggcaagacggaggtggaaggagatgcgggtgcagtgtgaacgcactaaccttggtcgtcgccggcgcggggcggtgtccgggaggcgagcagaaggcgccgtcctcgccgccgctggtggacgcggccgacccggagccagagccagacccggagccggagccgccgctgtagtccagcggcgaggccgggctagcccgggcccacctccccttcttccccgccgccgccgccaccgccgacggagaccggcggcgcgaccgcttcccccgcgtcaccggcggccagatcagctcctcccgcgccgcccccttgctgctgctgctgcaccaccacggcggcgtccaccccgccaggtccgccccccgcagcgagcagatgatgcccgccgccaccgcgtcgtcgtcccccgcacaatccatcgcgcgctcgccgacgaatcccccgaccccggcgaccgtagaggaaggtggaggtggaggtgggtgggggagaagagaatggaatgggagaagaagaaaccaaagccgcggcgtggtgtggtgtctcgttccttttaaatggttgggggtggaagcggaataataaaaaaatagcccaatcccgcacccacacgacacacaccccgcacacctacgatagctaccctcccccactagcggggcccacctgagtcaccgcccactgacacccctagcccccacgtttccacaggccccacctcccagtggcaaagcggaagggaggtggggccgggttgtcagtgggtgcagggtaaagcggcgaggcgtacgccgcaaggtaaaggaggtgggaggagcggcgggtggagactggagggttgaactggaaggggagggagtactagagtagagtactggagtggggtggaggtggggcccacttgtcggtcactgggagagctgctactaacttaagcgggcgaatgcaacagtggtcgggattcgtggctcggcgcgggcaggaggaccgccgtttgtgttcgcccgtgtggggccctggtcccacctggcagtgacggtggacaggaggacctccaaagtctggggcttttaactatttgccacttttagatttggcaaataactatttgtcacccctatttcaatgacatatgtccacatgtgtctataacatgtgggtctagtgacaaaaggttaattgccacatttatatgtggcaaatggttaaatatctcccaaagtctggacgggcaagacggctgtgcagcggaatgtgtactgcttggaatactgtttagagcaaaggaaagtcattagaattttgctagtcctagtactgctgtaacaagtttgaaatgatcttgaactaaggccccgtttacttccccaattttttttttccaaaaacatcacattaaatctttggacgtatgcatgtagcattaaatatatattaaaagaaaaactaattacacagttaagggggaaatcaccagacgaatcttttgagcctaattagtccatgattagccataagtgctatagtaacctataagtgctaatgacgaattaattaagctcaaaagattcgtctcgcggtttctatgcgagttatgaaattagttttttcattcgtgtccgaaaaccccttccgacatctggtcaaacatccgatgtgacacccaaatattttcatttcgcgaactaaacagcccgtaacaatttcagctgaaacatgattttagagttgaaaaaatactaacttctttcaaaatctggtatctcaggctagctgtggacatttaggctgtgcatccacactttcccaactttactctcgcgattttctccctaactgtgtaattagttttttcatttatctacatctaatgcttcatgcatatatccaaagattcgatgtgatgtttttgggaaaaatttctggggaactaaatggggcgtaaacacaccctaaggtgtgaaaaagtttatataaaagggtaagatgattgattggtaaggtgattgttttaggattgtattttttttaaagaaaagaacggattataatctttatagggcatagaatgtactctctccgttttacgttataagacgttttaaatttagtcaaaatcaaactactatattactacttttttctatagagttagttaaacttagagtagtttgactttgatcaacgtcaaaacgtcttataacatgtaacatatgatttttttccccttaacgtgctcataggtcagcccaacatcggatttgtttgtcaattgtcataggtcagccttgttcataattgcttgttggcagattattggtccagattgtttactccactcttgtaaaaaaaagtttcttcgaacattattctgccgcatttagaccactctgttcctagttgctactcctactgtttatatttttaaagtttgttttcaaaatattaatttaccgtgttaattaatcgagtgaatcatccatttcatttctccctaacccatgctgctagaattgaatagatatatataccgggtcaaacagcgccgatgcatgcagatatctcgaggaaagttgaaaactccatgtgggtcgcttggtcaaacaaagtccaggcacacgcgtatctcttctttctcattttgagcccagattgctactagaagatcagaagggggtggcaatagccaattcgtcctagagttgaacttgtcatggtaaactggtaatggccaaagtttagttccaaagtttttctttaaactttaaactttttcatcacatcaaaacttctctacacacataaacttctaacttttctaccatatcgtttcaatttcaatcaaactttcaattttagcgtgaactaaacacacacaatgtcaagcgctagctggcgtctggagaatgtgtagtactgtagtggtctcgccgggggttgactgctgatcagatcatttgagcttttaggctctgtgtttcccattggctgtagctatttttttttagaatcttcgtattactaccttcgtcccaagacgttacaactgaataactgattacacatccttttttaaattgtaatattttgagatggatgaatatatgtccttacctatttcttaaagaaattataatattaaagatgaacctggatcaaattcatccataggatttaatttatttatagagtgagtagactctaagaatcttctcagaagctacatagtacaaacaagctgttttgcaaaaatttaagtccccaaacaaggtattaggttgagttctaaacattttgggggtgtttagatccaggggtataaagttttaacgtgtcacatcgagtattatataggatgttcgggcactaataaaaaaactaattacataatctatcagtaaacggcgagacgaatttattaagcctaattaatccatcattagtaaatatttactgtagcaccacattgtcaaatcatggagcaattagtcttaaaagattcgtctcgtaaattagtcgcaatctgtacaattaattattatttagcctatatttaataatttatataagtgttcaaatgttcgatgtgacatggtgtaaaattttttgtgtggtaacttaccctataccagtacaaccgtataatgcagagcggctttcacatgcacataggagtagcggcagtaggtgttctgaaccaaaatcgcagaagtatgcgactgacaaaagatcaggctgacacacatgaatattactacctccgtcccaaaatagtttccgtgctcaactttgatcgtccgttttatttgaaatttttttataattagcatttttgttgttatgagatgataaaatatgaatagtactttactcgtgacttatgtttttattttttttcaaaaaaatttcaaataagacgaatggtcaaagttgggcgcggaaaaccatagctgcacttattttgggacggagggttcctgtgatacattataaagtgtctagattcattgtattaggatagggttggttaattttgagacacaataagtagtgtagtaagtgtactcgtgtccagatttactgtattagaatggggttagttaactttgagacaaataataagtactgtaataagtgtactcgtagctgcgtaggcgtagaccgtgtcgagccctcactcatccggcccctgaccacgattagaccgctgagcggctcaccgtaccgtaccatttctcgcgagacccccgtacgtgtaccggtctgtactaagtacactgtacactgtttgctgctacagcgtctcctaaccgcatcattaagccattcccctttcttcaaacacgtcattaagggaggcattaaccaactgcttccattccattccatgcaatgcaaccagtacaagtttacaactacttttcggttcattgaaattaatcaaaaaatcatatgaaataattcgtactggtgcgttttgaagctgtatccatacataatttcatcgtaagggtcttggtaggattttgcatacgaatttgtggtgctattgaagtttgtgattttgtggccatgcatggatcgttcgcgtgcagaggagatcagagagtctctgtaacctgtgatctcaagttttaagacgagatcgactgagaccaagcaaatgttgcaccaagctgaggccgtgtttagttttccccatattcccaactttccattatatcatatcacatcaaaaacttttttacacacataaacttctagttttttttctaaactctcaactttcttcaaacatctaatttttttcaggatctaaacacaccctgagtcgacgagcagcgcgaattgaaaccgcggttgttatcgccgccagccacacgtacacagccagtgaccctatcaattcttttaaaaaagattaaagttgtgataagttttgttcgatttttttcagtgtttatcatggtttttatgcggttatcgtgattaccaagcttcctaccaagatacgataccgatacgatacctctactcggacctatacgatacctctactcggacctcggggatgaagccaggtcagtgtggggcagctttggctcgagctttacacctggtagaaaaatttgcgttagcatatattattaattgtaagttaaattttaaatacaaaatttatgcttcatagttaagctctatgcttaagataccccctataaaccctggagaaatatgtacgtgccctggtggtgatgggctgtccagcccatgggccggagccggacaaagatttcggtccggcccagtacaccggccttgcagatccgtaattcggtccagtaccggtatcgcgacgaaaacgatcgttattgctcaaattgttgtgaccattagttaagtacaactaatccagctgttaataagcatggcatcatttgctagtactgtgtaaacaatcaaggaaaacacaaagatgaatggtccaagttcaaaaatgaatagtgcttattgtcaattactccctctgttcagattcgttgtatgtcccatcgaagtactagattaagtctttttgggacggagggagtatttataaacagagagtattttcttccacgctaatttaagaataaaacatttatattttgttttattagcggtttaaaactcttgactagaaaacagaccacgacaaagaaaaccctccaaaattaactttaaaagttccaaattctaaaatttagctgcagctaataaactagtaataaacatacctcgaaaacattctgtaacgtacgtaccagtactacgtaagagtacacatgggtgactaatcacccgatttgacgcagtaattacacggtgacacaatctgtaatgtactttctttgtagaaacacagtacagacacggtaatctataatgtactactgctgcgtgactgcaacatcatttggtagtgacctgacaagataaagtcatcaccgagataatgtagtttcaaagcttgtactggtacccgtgattcttgatcaatgactgatagtatctcctccgtttcataaatgtaagtcattatatcattttctatatacatattgatgttaatgaatctagatagatatatatgtttagatttattaccattaatgaaatgctagaatgacttactccctccgtttcacaatgtaagtcattctagcatttcccacattcatattaatattaatgataatgaatctagacatatctatctatctagatttattaacaataatatatatatataaatgatagaatgacttatattatgaaacggagtaagttctacaatacactgcgtgtaagcatttgcaacaatcacccgtgccggccggtctgcttaagccactgcaattaatcccagcaagcaacagcctaactaataacgtgacgcttcactcgcgtcatccacaacgtaattagtagtacatatatatccaccattttgttgagtgtcagacttgttcatgtttatgtaaatttataggaaaaagaaatgtattccctcggtttcagtttgttagttgttctggcaaatctcatagtactaaattaaaaggtgtgacctattatattgctaccctcagcatctctaattatcttcccagaggtagcaattcatttttttttctgttagtactactactactgctatattagtgaagggtatgaaaggaaatacatatctaaaaagatatggaatatcagaacggcaagtattttaacaaaaaaaaaactaaatgttactccctccgttccaaaatataagcatttttttaacatagtattcgagatattactttgatcaacactatctataaaaatagaatgttttaaataaaaagagtttgtttaatgataaatatagtaaaatcaattttacataattgatatttttaattttttttatattaatagtcaaagtaaaaaatatttgacgtgacactatgtttaaaatgcttatattttaggacgaagagggtatggtaaactagaacaacatctctaaaagttttgaacgacaaataaattagaacgaagggaccttcaatattttcaacataaaagcaaatattggatttaatagaattaatttgatgttgcacgtattgttagtattatgtaccaacactaatatagtacttgactagagtagctatccacagtagtaggtcgttcaattaaatcaacaactaggcccttcattaactaattggaccatatacttatcctcccaaccgtcagacggttggagcgtatggatcaacggctcagatcgatcagcagcttagccactagcttagccagttgccgtgtgactgcttctgacagatcacaaatgcaacaaaattgcctggtcccctgtacatatgcattccattctggctttgcaatgttttgacattgctgattgtcactgccagaagacctggcaatcactcactagagtctggagaccatctgcagatgcatatgcatgatctggcctacacaaagatcacaacatcatctcaacatgttcttgttttatagtaccaaaaggtgtcacctaatcattcaggtagtattatttttactgtgctaatcacctggattgttatctcaatctagatggattggtcgaggaagcatcatagtacatgtatatataaaaattactatcaaggtgtacttcatgtgtactctgctgttgattatgattataggcgtttgagatgaaaagttgcatgtttttttctgcagtttgaagcgaaaacttgtccgaatacggcagtgttcagcgtgtacgtgtgggtcatacacccttacgaccatctgataatccaatttacaaatcgtataggagtatgtttcatattgccaatttaaattttagtctgattttacagaagaaaaaaaaacccagctacacttcccattgcacaagccacaactagagttttctgaacattttaattaacagaattgctttgttctgcatccatctgaaagaaataaaaataaaataaaatgctgattaaaccctgacactgtaaaatctaaacatgattagcgaaagagaaacaccgacagagagttgtactagtagtactacctgtggagtctcatcctcttaacaaagcctgtccgtgcgttcgaaatcgaaatgaatcgctgccgaatttaatttgggcgatcattcactaggtgacagtggagatagatggaacatttctttcatgggtgagatcgattcaatgctcagttgatgatgatacttaagctcggttttaaactccatcgagaggaacaatctcaactgccgtttgctctcccgttgaaacgccgcggtttttgtgtcgtcaggagttggtagcagctgcaaaaaagtcttaactactctagttaattactccacttatttatatgttcaaccgttatttcaaaacagcatctataacgtttaggctgtgttattcccccttcttttccgactcaccttattttctttaccgcgtgcacgtttcttaaaatattaaatattacgtttttttaaaaaaaattctacaggaatttttttttaaaaaaattatattaatatatttttttaaaaaaatatcaatacttaattaattatacgctaataagtagtaccggagggattagttcccaactcactccaacgaacttagccttagtatatcaaactagtgttcaaatccatatgagtcttacagaacctaaactaacagctcctccatcatttactcttcagcttatcaaccgtaattatcaaaatttaaatttgaaaacttaattttataggagtagttgaatttgatttttttcatcgtcatttattttctagcattgggttatataaaagtttacccacaaattgtttaagagttttagcttatgatcagacctgataagatatcgtctacattttaaggaagaccttacaacaaagtcgcgcggaacaattctaaatcgaactaaatactgtgaaaatcatgcgaatttaatggaggcttgaactcaaaatacacacgaccaaaatatgtcaaaaaatttaaactttgtacgcatgaaattcgccagttggccagagagcattgtgcactgaagatgaggaggtgggccggaatggaaggagggaatcacggagagggcacgaaaactgaagttggtgtggctctgccctgccctgcactgcacatgtactatcacccccattcaacaccaactctctctctctctctctctctctctcaatctctctcaaatgagctgatttcagtgctcaccatcccaacaagaaacaatgcactgccttttggcaactgccacatgactgtttttctcccttttttttcttcttattttcttcagagatcaaccctggtagtactagcagtagtaggagtagtagtacaaaaactacaccaatccatacagtccgtgcaccaaaagccttttgcctttttcttcctccctctcctcctcctccatttcccaagatcaagaaagaaacaggctgcttgtgcagacaaatcgttggtttgggttgagtgcacacgaggatcaagaggggaggagaggaagaggacaacctgctggtcacaatatctgcattagtttttttatctttggattccctgggttttcatggtatcttgtcagagaggcacagaggcctttgtgttcttgctgttccctttgtcttctccacttctcctcctcttcagccagcgaggtgagtgagtgagagagagggtcaatgcgatgccaccgccgccattgacgcctctctcctcctcctcctcccgcttcttcttcttgctggtgctggtgctggtgctgagctgctcgttttcggccaatgggaggactcaccggtcgccggcggcggcggcctcgccttctcctggaccggggccttcaccggcgccggcgacaccgcgggttgttccccctgctccggctccggctaccggaggtggaggtggaggtggaggcatcttctcctcgaatggcagcctcgccgtgactcccgccgccgccgccgccgcggtggcgccttctcctcccttgggtaggttggcggctgttacagttggatcaaagattgcgttttcttttttcttttttgtctatgtgttttggtgtcctgtcgcattgctgaattttgtgttctctggctaatttttttaaaaaaatttagggagaaattttatcgatgtttccttcacccatttctgagaaattcccgtgctgatttggtgggaaacccgtgttgtttcttttggagatatggggtaaaaagtgcgcccttgggatcctttggtttcttccaagtttgaacaaagcgcataactttaagtgccgtctcgtgaacttgggtacgaattggaattgaatatatgtgctcgttctttttagtatggtgaactttgcccaatcttgggaaagaaacaaaaaagtgcattctttccaaaggaaaaaagagaaacaaaagatgctccaatatatttgcctca

SEQ ID NO: 20352 - DNA, 1870 bp, Oryza sativa
tatccttgttggcttgtcttgtttgtccatgaaaatctcatagctactgaacttactactttgcattgttcagataccgcaagggttgcgttggtgccgatgctgaacaagttcaactcaatgaagactaacaagaaaggacttgtcgcgatgatggagtataatacacttgagacggcgaccgggaagttcagtgagagcaatttgcttggagctggtgggtttgggtgtgtgtacaaggccaattttgaaggaggacttgttgctgccgtcaagagatttggccacaggggacaggactgtgagaaggaatttgaggttggtgattgtttatgtccatggcctgaaatttgttcttgatgagacttgtcttgttgctaagattgtttttggttacctctgaattggcagaatgagctagatttacttggcagtattcggcatctgaatatagtgtcccttttgggcttctgtattcatgaagagaaccgtttcattgtttatgagctgatggagaatggatcactggaagcacaacttcatggtaccttctaatttgctttgttcttcatttgtttcctcagaattgtgagtatgatcaaggagaagtatccatttttaatctatttgtttgtttctaggaccatcacatgggtcggctctaagctggcacattcggatgaagattgctcttgacacagcaaggttaccatccatttttattcactttgcatgattaaatatatttttataccgttatcattgattcctatcatatgcgtctgtcaactaaattaaccaggggattagaatatcttcatgaacactgcaatccaccagttatccatagggatctgaagtcatctaacatacttttagattcagatttcaatgctaaggtatgcctgcttatcttagttcttgtcaattagaatattactgtcaatcgtaacacatatcactgatcatctttggtttgcagatttcagatttcggccttgcagtgaccagtgggaatcacagcaaaggaagtttgaagctttctgggacattgggctatgtagtcccgagtacttgttagatggtatgccctctcttttctcatgtcccacctgtaatcgtctatgtagactaactctcatgtcccacctgtaatcgtctatgtagactaacttttttctcacattaacatctaatttaattatctgcaaccgcatgaaattcagggaagttgactgagaagagtgatgtatatgcgtttggagtagtacttcttgaacttctgttgggaaggcggcctgttgagaagacagcacaatctcagtgccagtcaattgttacatgggtacccaacattctgatacttgacatgttgaatttagttcaattaaaaaacagtcattctctcgatatgcatagaatatttttaagcttcatctcctgaatccaggtggttaagttaaattttcctaatccattggcatctgacatatggaaatcaaatgcaggccatgcctcagctaactgaccgatcaaagctccctaacataattgaccccatgatcaagaacacaatggatctgaagcacttgtaccaagtaaactccctcttaatttctatctttatcctcacaaatcttttcaactaattcaatttgtgtgattcgctacttcgcaggttgctgcggtggctgtgctctgtgtgcagccagaaccaagttacaggccactaatcacagatgtactccactctctgattcccctagtccccatggagcttggagggacactgaggatttccccggaatcaccttgcgcaactcgaaagcagtctccctgttgagaaagaaaaggaatgcgtgatcggaat

SEQ ID NO: 20353 - DNA, 670 bp, Oryza sativa
atcctctcgatctgacgcggattctgctcattccaaatcgaatccaccaacatcccccccccccccggcattgatctcgccttcatcctcgcgcgattcttgcgaggaattcgattcccggcgatggccgccgccgtcgtctgcgtcaccggcgccggcgggttcatcgggtcgtggatcgtcaagctcctcctcgcccgcggctacgccgtccgcggcacatcccgccgcgccggtatgggtttttttctttttgattctccgccgcctcgccgtcgccggcggcggcgtggattgggaggtgacgagctcttggattcttgcgcagatgacccgaagaacgcgcacctgtgggcgctcgacggcgcggcagagcggctgacgatggtgagcgtcgacctgctcgaccgtggcagcctccgcgccgccttcgccggctgccacggcgtcatccacaccgcctcgccgatgcacgacgacccggtaaaccaccaatcccccccctctctctctcccccaaagaaatggtgacgtcatggtggtggcgcaggaggagatcatcgagccggtgatcaccgggacgctgaacgtggtggaggtggccgccgacgccggcgtgcggcgggtggtgctctcctccaccatcggcaccatgtacatggaccctcgc

SEQ ID NO: 20354 - DNA, 3686 bp, Oryza sativa
atgagtaataatatgaaacggagagaatatcgtatatttcgagacgaagagaatatatttttattttgaggaggggaaaatctgatgccaggccggcccaacagaggagaggttctgcttctccctttacttgatgccttgattcctccctttcttttcatcttctcctcctcctcctcttggctttcctttcttccgatccaagctactctctctctcctctcctcccctcccctcaccaagcgagccttctagagagagagagcttcccccggggggatcgagctcgccggaggactccacccgccgcgcctcggctgccgggagatccccccgcccgcccgccggtccgtccaacggtaagtctcgccttcttcgctcctccctgatttctcaccggcgatcgatcgatcgatcgatcccccgcgcgcgctcgagccgtcgccggagcctgggtgggtcgggaatcgcggcggcgtacggagtgagagatggtgtggtgtggtagggtagggtggatggagcacggctcgtcgttgaattaggggggaggagaaaaaaagggagggatttttatgcgtttttttggtgagggggaaatcggctgctgtctcgtgcgagatgtgctgctataagtggcaaatgtcaagtgccggattttcgttttgcgttttgccctggttggggttgggttactcatccctctactgaattggcatgtactactatttcaagctaatttgcttgttagaactatatatgttcagataccttttttgtggctgcacagtgtgtgtgagttttttttatcttaaaaactgtcattagaaggcatcatggcacaacagataagagaagtgcattgccaatgctgcaaacgggattgcggcaacgcaagcttgcagtgttgcctgtggctaatcttgatgatgctgatgatggtgatagtgtctaacataagttctgaacttttcttgtgtattgacaaaaccatcaccagcttgcatgtaattcatcttccatctgtgatagttttgtactccctagttttcttcaccatgctaatttcaatattcttgtttctgctatgctaggaattgaaaggaggtagccttcttgtcagctagtatggtaagttctctagcagaaaattgattttactacagcttcccagtttatctgccgcaccaagttaacttgtggattcggaggatctctttcttgcaatcctttgtttctacccaaagtttgatgttctaatatatctgtaataaatagtatttcgaaggctatggctaccgtggaagtaccttcgagcagacatatcgctgctaccctgcgtctttcattgacaaggtttgtctactgtcttcagataggctccatttactcatgccactggtataatgttagggtggtaaatcaggttgtttctagctttctttttctaatctaaagtatcaacataacatactgatgctatattgatatgtaaacatttcctcttttcctgtccttattgctttgtggcgttgtttttgcctctagcataatatgttgacatcctttgaactgcttaagtagaatctacttcctccgattcatattataagactttctagcattgcccatattcatatatatgttaatgaatctagacatatatgtgtgcctagattcattaacatctatatgaatgtgggtaatgctagaaagtcttataacctcaaacggagggagtagcagttaatacttctaggaaatttcttctaaaaaaagttagaggaaacaatcacatttcaagataaagcatctagtttttcattcctggatatttcttctaaaatatcttcttttttttttttaccctttgcagcctcagcttgaaactggtgacaaaagtatgctctctgttcattgattcatcatctgttaagttgattttggaaattgaactaagtattactttattttcttttcagttattatgccaccttctgctctggatcgtctaggtaagtttagttgtgttagataatctctttcttcttggaaacgcatgatgatgattcatctcgtctgctctcacaagctttccatgctctattttctggtaacttctctaatctattctatcactatgcagcatctctgcatattgaatatcctatgctatttgaagtccacaacgcggcagcagaacggacttcacactgtggtgtcctggagttcattgcagaagaaggcatgatctacatgccatattgggtatggacatgtttagaataacgttgcaattacttttatgcgattccaccaaagctaactctattactcatcagatgatgcaaaatcttcttctaacagagggggatatggtgttcataaaaaatgccaatctccctaaaggaacatatgtgaagctgcagcctcacacaacagacttcttagacatttcaaacccaaaagcaatgttagtattgcttggtaaattattttctgttcttttcttttgctatcacttcatgtcttcatatactattgtgttgtgattggatcttatggtttgactaatgagatccctgaagaacagtaacaagccatttatgccattcttgcagcttggagaaacattgcggaattactcttgtctaaccactggtgacagcattatggtagcatataataacaagaaatactacattgatatagtggaaacaaagccttccaatgctatcagtattattgagaccgactgtgaagtcgactttgctccaccacttgactataaagaacctgagcgacaaaaagctgctgttcctccaagtacagcgcctactgctggtagatttctctttatgccccgttattgatcttgatctcttccctcaaattctcttgctgttcattactttaagatttattcgttttgcacaagaggcaactgaaaaagaaccatagttcatcccctttactggacctgggaggcgtctggatgggaaggctcctaaagataaggatgtatcagcttcatcccctgcaaaacggcaagctaatgcaacaaacagcgtgcagccctcaacagcgtccacatcacagagcagttcatctcgtaaaaccacggaaaagcttgtttttggccctggtgggaaccgcacatctaaggaaacagaaaaggttggtatttttgcaatttatgcacctattggcagctgtctggaaaacgagtgctagttttggagctacttgagatgcaagaacctctagtgaccaatgttatctaaaacagctctgtcgattagagaaggcataataagttattgcttcgatgtgtttgacacacttttttttaccataatttgttttattttcaatgtaggtgcctgaaaaggaaccgaaggaggatcccaagaaagatgaaccgaaattctcagcttttacaggaaggaaatactcattgaagggctgatagccagatagtgtattatcacttatcagtatttccagagacagacatgattatggagaaggagtttgattgtttagttacctccttgaagcctcttttggttggaccagtggcatctttgaatgtttaatttctgtcttaactatgaatcatcctcgtgccagcaacggagaggcaactgatgtataaaaaaaatctattcatgcctgtttatgga

SEQ ID NO: 20355 - DNA, 1786 bp, Oryza sativa
cctgcaccccagcaaatgctccagataatttagtgattcataatctcatccagatctccacagattctgttggtttcggtgttaccctcatgagcaaaactcggtttcgtagcctgaattgcgggttttcccagcggcttctgtggatctgtcacatggaaatggaagagggctgaattgtgaacgatctgcatggcaactttgaggaaaacttcgaggaagggaaaacaccttgtttgcgtacgtttcccaaactactagacgatgtctttttttaataaaattttctataaaaaagttgctttaaaaaaatcatattaatccatttttaaaaattaaaattaatcatacgataatgacttacctcgttttacatatcttctcaatcttctcttctcctctcaatccctcccctaaaaagagcttagaagagagagttgatggcaagattcgttatgagagtttatctttagtccactgtattgtttctaatacctctctaaaatctcttattttagaatggaagcagtagtatttaagaggcgttttggtattttaaacacttacaattctaccctattaaaatattggtagtgccaaaacttatctagagtttaacactaccaacattttgatggtagggtactaaatcaaacaagccttaagttcacgacggacaaccaaatttagcttgctatgctatacttagtgaaaacagaaaaaaaaaagaaaaaagaacatcgagacatactagttaccttatgtgccgaaaggccagaagaggcggtgtgcttcaaaggatagcaaagcctctcactctactagataagatagcaaagggagaattggatgccaagagaaactaatatttacagaacagtttaactaacatcctttgcaagttacattcttttcaactggacagactttctatagaaagccatatgaaagctcagaagtgggaacatgccgaactagcagctcctgcagctgctgaaaacatctactacgagggggaacctcaaacctggtacaggatttggcgatgccatcgtgtaactaactagtcattggcgactaactctaagtttgcattctctaacctctggaggacaagcttcttctgtggagcaaggcctttcgcgatcgccacggagctcacgtcgacgaggacggtgtcgtcttctttgaagtcgcccttcaggacactgagggcgatctcgttctctaccatctgctggatcaccctcttcacaggcctagcaccgtagttagggtcaaagccgagagagccaagatgctccacagcttctggtgtgtactgcagatgaatcttctgttgcctcagccggttcttgactcggttcagctgcaagtggaatattttacaatttttttgttagatcaactgtgagaaaacctctaaagcacaattaatatttgatgctatggcacaggtgggtctattagagtagtcatgtaagaataactataagaggtttacctggatctccacgatgcgatttatctctgtggtgtccagcggctggaatacaatgtactcatctatcctattcaaaaactctggccggaatgactgccgagccatgtcaatcacttgcttcttcattatttcataaactgcctccttgctgtctgatgtgtttctaagcgtatcaagaatcaatggcgacccaatgtttgaagtcatgatgataacacagttagtaaagctgactgttctgccctgagagtcggttattcttccatcatccaaaagttgcaa

SEQ ID NO: 20356 - DNA, 6078 bp, Oryza sativa
atctgcccattcgaggcagtgatctccttcagaacagccttaagtctctcttcaaattgaccttggaatttagccccagcaagtaatgctcccatgtccaatgaaataagctgtaattttttgcatatgcatgtaacaaaataagaatggatagcacaataaattactatctatttcttcttcctttattttctcattgcattaacgaactgagaatgcattgtcctattggccagaagtattcctcttaatggatccacctgacgagaggtagatgaattgccactactcatggaaagatctcatggtatatctatcctcagctcatctggttgattgaatctgagtatgaaataaaagcaaggctactatcctagaaaatgttatgataaggacaagcaaaaaaggctaagaaattacctttctattctgtaaaggttcaggaacatctccccgcacaatacgctgtgccaatctgcacgaaataaatgcagacgaattgctcagcacatccttaaaatgacaaatgctgtaagctgtaaaaagtaacttgtattgagagagagagagagagagatagagatagagatagattttacccttcagcgatagcagttttgccgactcctggctcaccaataattacaggattattcttagttctcctgcaaaggatctgaatgcatcgtcgcacttcatcatcacggccaataacaggatccagttttccacgtcgagctaattctgtcatgtcaataccatacttctctagagcctggtacttcccctccggatctggaagcagcaccataaaaagagttatgattcctaaggttatcaaacagtcacactgggtacattttaatgctaacatgaaaaaccatctggctgaaacaaaaccattgccattggcagagtctcccctcaagttgtgaatagagagctgaacaaagagatacctctgtagaaaaacaactgcacaaaagaaagtaacaataaaggatgaagttacatagacatactctgatctgtgacccgctgactgccacgtacagcggagatagcttccttcaactcattctccccaattttgagatctctgaacagctgttgtccaaacctcttatcttctgtgaatgctcgcaatatgtgctcaacagatacaaactcatcagcatattctttcttatgcttccttgcattatccaaaattgatacaaagcttgacccaatgatcggtccacttgtatcgccaacaacctacaaatgcagcagactcattgttaacattgatgcatatatctcttaacgaattaactactacggccaatcagcactacctttggctgtctcgagatgaactcatcagtagcttgcaggacagatgtgttatctattccagctttcgaaaatattctgcgcgctaaaccatccttctgctccagaagagctttcatcaggtgctctgcttccactacttgttgcttcgacattctagctgcatcaaccgcgccgacaaccccctcccaggccatctcagtaaattctcctggagttatctgtttggtcgccgaaaaaaattacccatctattagtcagctgttgttggcaagagggaactttcccatattgtctatatatgactatatatccacaaactgcaaaccatatgttctcagttttcatagtaatcaccaagttttatcaaatctgatacatagctgttctcagttttcaccaaacctatagaatgatcagcaactgctttccttcaaggttttctaggcatgaaattgttaaacactgacacattgcacatcctaaattgcctgaaactaaacacttttgcatatgcactgcaacatgatcactgagcatagcagaacattacacatgtaaaccgtagtatccaattaatgcagtagattatcaaacatgtatcgcaaattcgcaactaaactaacagtttcattcacaatagcctcattgccgacacatgtacagcatccgcgagattgaattcaccaccactatagcaaccaactgacaagagaaaaataattgcacgggcgtagagaagcgaacccagacctgagacgacgacgaggtgctgtacctcgccgcctgcgtggggtggaacagcctccgctgcggcggcggcggcggaaccagcagcccgcctccaccgagccggcccatgggcggcgcgaaccacgcgggcctcctcgccccaccaccagcggaagcggaagcgtctccagcgagcgacgcgagggcgcggagcgggtcccggccgccagcgtggtggcgccgcgccgccgccgcggcgcgggcggcgcgcgcgagcctggacacggcggtggcgcgtgacatcgtggcgagcgggtgggggggtcaggggttcaatggcgcctcggactctcagggtcgccgggtgggagaagcgcgcgcgctctcgcggcgattttagggcggcggcggcgaagggtggcgatgcttggagaaggggcaagaagaagaagaagaaggtggagaagagaatcgaaggttggagaagcttctgcaatctgcaagttgcggattgttttgtttttgtttttgtttttttcttttttttatttaatttaactttgatcgtgttcggcagccaaaatcatcttatccggcccgtttatttccgaatcgacggtctgaaatttgggcccatatgagcagggtttccaacttgggttcgaaatttcctccctccgtttcatatctactttgaccaaatttgaaaaaagatttagtaatatttatgacaccgaattagtttcaataaatataatattgaatatattttgagagtgttagaaatattgctatatttttctataagtttgattaaacttaaaaagttcgattaaaaaaatcaaaacgatctatgatatgaaactgaggtagtacactgtacggagctatttcgtccaaaatttgcaagatttattcaaattcggtcgaaattcctccaaaatttatgtttcttcgtcccgaaatatggagaatttggttcagtaatcagttcaggctgtagttcaaaagcttctcttcagaaatctgcaatttcaatatacgcagctcaggtcttaaccggacacatgaatttttcccatcttcacaaaactgcaaaactaaaacaactacctttccaaacagcaacattctgctgaaatctcataagatgctggcattgcaactttgcaagcttgataaacaccgtcacgaaaaagattaaagagccaagagaatttcgatgattaacgagaattttaccaagcatactatattatcaggataaccggttatacctgaactaacatagttattatagtataagtcatgataaaaacacaccacatagccgtttctccacataaatttcacagactgactggccaactaataatcactaagctgaaaaaagaagccaaatgtgaaatgcacttgtgatgaaggctagccactatgaacaccactttgtgctgacaagtgagcatggaccaatcagcagccgacaccgcgaatgcagaaaaacctcgtacgcggactaatgattgaaatggaggctggctagaccagctcccagtccccatcgatgtaaggaacgccgtcgtcttcgcggtcctgcatcgatgaaagatggcgttgtcagatacatagtatactcattgtttgtacttcccagcatggcagttaacatattgattaagaaatatgtggtactgaaactaaacttagaaatctcttcagaacgaatatgaaatatttcaatacatatgttgctgtttcatactataataatatagtgcagactgcaaaggattaaaggtggtactatgcagcagaaaatatcttgaaggaatcaaacatgaacatgcttgtggactacatatgaatagagatgagtaacgcacatccatagaaaagtgagtgtttgatagactactactgtgtccagaaattttcataggtcactaaagactgatctgcttgaacaacacaaagcaatagaattctgaaacagaataccaatatagaatactcttctaaaaaataaatacaagaaagaatcataccggcctaaacatgtcaacaacaatgtcatctagaccaccactgagacccctttgcagcccagttgtccgcataagatcgtcattatagtttagctgattgctaacagcttggtgatgaatccttccatcttgcatgggagaaacaatgcccgtattcccacgatccagtgtctgccttggtacagccggattgtctaagctaaggttgggcaacgatgtgttgatgctggagttactaaatacatggctgttatttagcatgtctcttgagtttgtgctgcttccatagttgaatggtgatgtgtcctgattgaatgctattggaacattgctagctagtgatgctacttggccctgcatctcatttcccagcagcggaatctgattggatgatgtgaagcttgagacaggttcaattttggggccattcatatgcagggtggcttgcgacatgttatcattgtgaccacgatcctgaatgttggatggaaccgcagtttgccaagtattggtggttcttccaagatcaggaaactggggagactcaccaacaagtgtgctaaatggatctgcagaagatgaatgcacccgactaaggtgttgctgattgctcgactcaagaggttgcagtgatctgtttgcagttgccagcggtgcaccattcgatatgtttggaaaggagttaccagaaggaccagttagaattgttgacatctgtgcacctctgatcatgttaccattattaagccctcctaaatcattcagtgaagtgctcagattattttgggcatgtcctaactgaattggctgtgaatgcagcaaaccatgaacaccaacgcagaaggggagttcatcctagtaagaatgttgtttgcctgggtatggccagcagttgggactgtacggtatctaccatatgcgttgtagtttccaaatgaattcatgtttatgtaagcagggttccttcctccaaatgcagctgcaaggttagcctgcctgcttgcatcagtgctcaaccgtttaaggtacagccgatacttctgaaatgacaagcagagaagaaacatcagtgaagtatacttgtaggtgcaaacaagaggaaaaaaaatagctaagaaatgaataggttagcaaaactctgaatttaacactggtgaattagtacttacgattgcacaatcaatatactaggaaaatggtatgagaacataaatgttatattttgcttctcgtacaaatactgaaaaagaactcaacaaaatacagaacatgcaacaatatgaattaggaatattttagggctgtattatcatatattaaaaaaaatcctctttcagatatctgggacaataataacaataatttggtgcagtgataaaccatagtaaacaacatgatgaaatgaacggtcaaagataaggaaagaaattcgacctgcaaatgactagcaacattctccctggtgatgttctctacattcatgagatccaatattttctttggaacagcctctgaaaaaacaagcatacaaatattaacacatatgacattgaactaagaaaaatagccagccaatattctcagtagctaggttgtgagaaattatcttactctcgatgccaagctggttaacagcagccacaaactttcggtgcagctcaacagaccacacgacccttggcttcttctgtgttgatgagtctccattctcattactgttctcatcagaatcatcaccatcatctccattctcatctctacttttccgtgactgcctcttgttgcggttagcaccaatactctcaccttcattgttcattccctgtgccttctgaccagcgtcatcatcgttaccacggttcttagcatcacaattcttacgcctaatcacatgttgccatatcgtccttagctgctcaagacgcactggcttcagaagatagtcacatgcaccatgggttat

SEQ ID NO: 20357 - DNA, 26553 bp, Oryza sativa
tggttacaagaatgacacatcagatcaagcaaagcatgacttactaatgactgggaggtccatctcgaggccgacaagctcaaggagtttgaagccatccatgtccggcatgtggacgtcgctgatcaccaggtcaaactggtccttgttctccctgagcagcttcagggccgtggccgcctgaccagttgttgtcactgcaaatcacaccacatcaaatccaatcaggccagattcaacaacacaatacataggcaagtcaaaattatcaaaagaattagtactactactattttgctgcaacaaggaaaaaaggtcagcagaagataatccttacacaaccaccatgtgtgcaacccaaagaacagtagaaaggattggagattcagacagaagggttgaaattatatcgaagaaaagagaggggaaaaaaactttttttaagaggaaaggggcaaaacccgttcttgagttgacattacatggccgaagaaatagaccaccaagaacaacagaaacatctacgagtgaaactgtgaaagccaagcaaagaagaactagcgcatcaccaaaaaaaacaaaaattaaatccaagagagagagagaaaaaaaacaactatagaacagtactaaaccaaaacgaaaaaaaaattgatcgatacagcacaagctcaatccacaaccatggagagaactcgctcgctcgctcgctcgagctcgagagagagagagatggcagattagcagcatgccgagatactggcatcgaagcaggaggttctcgaggatcttgaggcaggtggggtcgtcgtcgacggcgagcacccgcatgccgaccgggaactggtctctcccgccgccgccgccgctcacaccatggcctcccaccctcccctgcctctcctccaccgtcatcttcctccaatcaatcaaccaatcaatcaaacacaaacaatctcccaaactcctccacctccaagcaacccaagaaacagcactttcttggatccttaaaaataaaaatccaaaggtcaaagcagggtgagcgagagcgagcaccaccaccaaagagagagaagtgcgggatggatgcgatgataataagaggagaggagaggagagagagagcgagaggtaggggatgatggatggatcgcggattgggtaaatggaatggattggagtgaaagagaaaaaaaaaatttcatatgcagtgcaaaggtggaaaccttttttttttatttccctcctcgcctttattttccttttacgcttcccctgtttcatgccatttattcgcctctttaaatccgtccatcaaatatggggctgtgggtcggggcgtgtttcgtgtttgtgctcctttttttgagagagtttcttggtcaccttttgaatttttactgttactgtttttgcatttatttggtggtggatatgggtcgtatgtgctttgtttaatttggacttaggtgaaatatgccgtatttgaaattcgcacgctttatagaacccgaatcggttgacatatagtaagatgatgtgcgtcactctaatgcctcttaagattctatatttcggtgtagggtttaaatatttttttccaacaagcatttatatgtatatatattttgttatgtaatcacgactttaaaataacgctagcaattacgcgacacctattcggagatgtgggtaggtgtttgtactctctttaaatctaatatcaagacaccttttgaattttattatttttcatctatttttatagtagatataagtcttatgtgtattacctatatgatttatcatatatatgcatgaaaatatgtgataaaaatatatacatgcttgaaaacgaatcggttagcatatgatttgtttacaattacgatgcctttaagatttttcattgtataggtaaggtttcaagtttcttttccaacatttgtgtatatgtatttgttgtgtaattgtggcgttagagaaaatgtactccctctgttttgggttatatgactttttagcatgctagaaagtcttatgacttgaaacggataaagtagctcgtaattcaatcccgattatctactgtattgcataggcatgtgagcccgagggtatgtgagtgatcctcgttcctcgcaattacacaactggttagggtggaaagcaatagttttggcatttctcaatttaattaattagtcatcatccaggcacctctttttctcctattgttggtgctgacgtggcttgagctggcctttgcggctggtttatggagtatataacttgattaaagtatattggtgataagattagtgatgcttgacagctagatgttacatccatgcccgtcttctcccacttaattcttcctctcatatttcttgcatgctaggcagcacgacaggatcaaagattcacagatctatatagacacgcacatatatatactatctctcatagcttggaaggaaggaaaaacattttaattagctgttgcaatcatccctaatttcttcagtttggccctagaattaaggaaggcatctaaattactgtgagatgtacaatttttttcactcaattttatcctatccaaatccttccctttgttagttttccatatagcaaaactcctaattccaagacatacgggtagagttcttttcccatgaaaaaaaatcatttaactatggataaaatttcctttttcacttttcataccctacataatctttgcatgtactttactgaaaatcttctaactgaaatagctgttgatgattttgctaactgaaaactaaagcaaaatgacctactcctattgagtattgaccttcccatattcctgcagggaatggccaatcagccgccaaaaaacccataaacaaatttgcacatgaaatagctggggttgtttaatatgcgtatacgttgtccttgcatcttatattatactgccccaagtacgtgagtgatcagcagtacattattggctcacacaccctgtgttttgtactttgtgaacaatattctttaaatttattattgttcctgcctttttaattttatatgagtattagatccgtggcaatattctaaggtatcagtacacgtcaacttgcccttaaggaatctcatcttgggcacaagagagctgtgggtgatttcttttttataaatctcatcgattatttttttgtaattaagtagctaaacacatagaaaattcgaagaccttaattataatgacaatgagaaattaaagctcgatcggatccaacaacgtgcaaattgttcgtgagaagaagagttatggtatcaaagtactggccacgataattgcgtaattaaggagggagcttgatttgcataaaaaattgtggcacacgcattacatgagaattaagaaatgtagaattaaaatatttattatacattcacaaaagcaatggacaaaacaagtgatttttgcatagctgtgtggattaattatagtatgtggtgaataaatagttgatgactaattataaagaattatatacatgtgaaaaccaataataaaatagaagtgtgtagacttcacctgctgtttgcccctataataatccaaggtatattttaaggacccccactaacccaacatatccatgcaagcaaagatgaaaatctcaaaggctagcaagtgtgctacacaaagtgccaattaagacagctcctgatctcatctcccacaactaaggcctgattttttttgtctctaattattttgtctatcttcctactcatggaccacatattctgatctgttttgttttgttgaatcctaagaccaaacccacccaaaatatgccccccatcctatatatcatacaacctagtgcttcgacaagttaatgctagctacaactaagtaggccaatgtcacatctaatactagcccatatattttgtcatgatatgtaactttggtcttgcatccatttgttggggtccctcccatatttattccaagtggcaccatgtatatataggtcttcaattcctttgtgtatatctgtcttttagctctccttacttttagcaccaacacaagtatgagaaaaaagagatatggtgcacttgaacaaaatttgaatgatggagttcactttaagtgcattgcatggtctagctcactccccccatgttgtgttatgtctccatcatgaaaagccatcttttgcccctgagtacatgtgacatattcctatatatccgaccataatagcaactgtggctttttccaaaaaaaaaatgttgttgattgaaatatttttaactattatggtgctctcatgtcatttggaaaccgaaacaaattatcagcaaggttttttaaaagcaaaaagaatatggattttgagcttgtaagttaagtatggttcaatgacatgatatcctcgttcttatgacgcctcctcttcatttccacatgtcataattcgaatacacacaattaattaacctttttaaaaaattaacatctaattcaaacggaacatatataatacacatgataactttgctagatttttcataagaattatgttgtcgatgaattttctaactacatccatctcaaaatattaaagtacaaagacagctaaaacatagtagtactatattttaggatatagtatgaaatacatataattcttgctgatataattaattaatgaagtgatggccagaaattgggtaaagtactagcactagctaaagatatctacacagccaaacctgacatgtattagtaaaaagacgagtaaatcaaataattaattaatcaatcaatcaagaaaaaaatgaatggatccagtaccttttgtttaccactctagcagagctgcgagtttgcattgacctagagagaatgcagtgctgatgagtaggagtaccaattcgtgcatcgtcactctctctatgggacacagctagctataacaacattcatgtcagattgggctagctaccaatgctgcttttgagcaccccggatgtggtactgctactaccaagaatggcctccatttcttttcctttctctaattaatctggttgctttgctttaagtttgcttctttcaagaagacactgattcctactagtatctcaaaaagaaaaagaagggggaaaaatattcagggtccataactaataaagtggtcagtattttggtgcaacatgtcagataaaattatggtcatttcctagcaaagttcagtcaagaaattactccatttttcatagagagagagagatgcagtacaatattttttgaccaataaatactgtatactcaacaagagaaaaagcagtttcactactgtcaaagctgcttctctgatctctctgctgcacatagtagtaatgttactattataatatctggaacagagcagtgctcggtttaagcctctctgattagctttaaaatttacagtgatttttatgagctactgacccagtcagccagccaggagttaatatgagccagggatcagaagttcagaacagagaggctcgtgcatggtcatgcactcacgtactctactactgtagtctactgtatctatctatgagactatggccgtattgcattttttttccttatctatgagactatgaccgtattggctttttttttttctttcgtaatttgagaatgttttttttacttggtctctatatccaaccagatatatgtagcctttttaaactaagaatttagtctatcaaataacccaatatgaaattcgctccagtggagatttgaactcaggactttggggtgctagtgtgctgctactcaggtcactgtaatcactaagctacatgcactttcaaaaataatttatgtatgaactgtaagaaatatttttatcatccttagtttacatggctaattaaattacaacggtttgtagtgataaagtatacctcgagtacgtaacgtagcaagcaatattattcatacacagagatgcacaggttaatgactagtagcactaaaaatcctttctcacataacaacacaagagtactcctactatcgtaagaaaaagttttatcagccattcagccttaattcacaaggttaaattacaacggtttgtagcaaagaaagaagaaagtatacctgtaatagtaccattgtactccctccgtactcgtaaagaaagtcgtttagaataatgtttaagtcaaaccttgggaatataaatcatgaataactcctaagttgttgagttttaaaatgtaaaaattatatgaatagatttatcttgaaaaaaaatacttttataaaagaatacatgtatcacttttcaataaatatttttatagaaacaaagtcaaaattgtgttttagagaccgtgtcgttaccctaaacaacttcctctatgagtacgaagggagcacgtaataagtctaatcggctcaaattacccttgtacaagaaacatggccattgcaatggctgcaactgtgcaaacacaggaaaagggtatcgaacatgcccaacgtagccatcatcgttcatgcgcaaaaccacaggttagtattaaaaacattaaaagtactcaaatatttttatatttgcaaaaatgttaataatacgaattatcaatatagggcctgttcggtggccattgctgcggctgcagctgcagccgctgcaacggtacatacgttgttcagatcgctatgatgcagcggcaacgctgcattgcagctgcagccacgggctgccgaacacagccatatttgttaaaaagtcagtggtgatatattatttaaaaaaaagaggtattaccaaatttttgtaagatagggtgaggaggccagtgtttggttcgatactttatcaaattttgagagtagaaacttatagaatcaccaaatgttggtagaattatgttggcaattgtatattgttcattgccttaccagagaatggtaagaagtgaataagctcgaagattttgtagaggccattactattaaacttgctcaaacgctgaaactaatctttgctattaattgcctgatacgaaattgaattccggttttgtacttgggcgcagtactactacagtacactactgctgctgcactatcccatgttaaactgcaagcaagtcagcaagtgcgcgtgtgtgggtgggcccacaaaaaaaacgaagctagagtgtgggggcccgtagcggtacgcgacaatgggtttggggggcttgtacgtgggtgggtaaagattccgtgagaagattccgcactcgaataccgcgtgtgctctgacatgtgggccccaccacccccaacgtttccgctaactaatgggtgcgctttggctgccacatttcgccatttttttttctcttttttgctatgcgcacacacgtctccagctatgctctgtttcatttcagctgctagctgctgctgcgatgaaagttttaggaaaaccctgttcattggtaatgccgttttcatctttttccacgtaatcttaatctcaaagggggcctatgattaagattgattaaggagcacctaagacgaggaagttactagtatatgatcaattgattttttcaattcttgtaaacttgaaaaatagatttgtttaatattttagtccagcttctatatagtattttttttttcacgaaactcaccgtctagcctttaaaaaacttgctaacataaatcgaggtataacctacatcttaatcagaaatgaatgggaccataaaaatgctagtagtgtacattttttaaaagaaaaacaaatgatgcatcaatgtcacaatgtggttgttttatattacaagccatgtaaccaaaggagtaaacatattgtgttagttgtaagaatggtcttataggttgtacaacagtacaaggtcataacgtcaatatgccatgcttgatacggtagcaaaagccaatggcattcatatatgaagcataacatatttcatccgagggatacttcaagttttgtaagatatgtttgtagtttaagaccgtttagagtcatttccaaaattcaagaccataaaagtgaagggataatttggacaattccatcgtaacgttacacgagttgtaaaaataataccatcataccattcatatgtgagaatggcaggcgggaccaagacagatatgtcaatgacatgtacaatggtattttctaacttcatgatttttgtgatggtaccaacaaactgtaaaaaaaagagagaaaaacttccacataaagattactagtatgtttccgcctatacaacaacagtggttgaaatacatacatttctcatgctctataacgctctaaccctaaacccttactacccccaaagtgtctttttctattgcttctccctaactccctttgtgcgcctgtgcgtgtgatatattgcccatcaccaatcatgcatgatgatgtatcgatcgttaccaaggagccagaccaaaatgtacctggcgctcacatgttggccgagatatatattactagctacatgtgatttgtgatttgtgagctatagaaagctagctagcttggcttgtgtgccccactcagatggatcaatttcacctagtggaatgtataattggaacctgcactgcacactatctattgtactatatatgttgactgatgaagaggcaagggattggtgatggctagctcatgctgcatataattggtccaagggatagatgccaacgttagacttattaataaccggcctttttttaatccttcagggtagatcttaaggtttttgttattcactattaattacttcctctgatttttaccatatgactttgcgtattgagttttgacatacattttactattcattttattaaaaacacgtaattatcatttattttagtgtgactttttataattaaagattctttaaacattacttatattttttatatttacataaaggttttgagtaaggcgaacgatcaaaacatatggccaaaagttaacaacgttatacattgaaaaccggaagggagtaattttcttcctatatgaatgtcatgtcatgggttgttaatgattttgctccatgttgcgctacgacgtgtggtcgagaccatcgttgatgcatgcgcaacaacactcaaatggctgtgttgtcaccaccaacaaccaatgccgctgtcatcccgatgaggcacggctagaggtagtaatggatctttcttctttttacaaaatgtgagggctgggctacaaagaattggactaaaatttagttcttttaaataagatatttaagggttaaggtaagttatgaaaggacccaggagttgtggcccattaccgcccctgcacatggctccatgccaaggcatcaccttccgtaggcgaggttgggcagggcatgtgctcccaattctagaagggccacattggtacatcacgagcactgtataaggggttactgctatccgttgatatcatcgacaaatcgtgataaccaatcaacaggaacaggtgaacttcgaacaaattttaccaaaagatttaacttctaaagattttatttgaacttggtcgaattgttgcgaaagttactgacagtaacgcaaatcctgaatcatgatgacgaggtatggtatggtggcgcccatatggctatttgcgatgaaatgtattcccatgacgtggtatggatctacagattacatctgcaaacaattcaagaatgacggtttctttttcctcttaccagcgaattttccacgatgtcaagtccaatttaaactaggtttcaaaaaaaaagtccaatttaaacgtacacaacagtaaccagcaaataaattaaaggatggagacattcgccggtaagggtcaaggagatcacaaacaacattcatcgatcttatcagtttcgctttgtcttcatcgttgcagtgacctgcctgtgaccaacaatggaattgtatgcattttaccccgtgtgcttgactgcttgaataatcaatcgtgcgtgactacgtgtgccgtgtacgttccagatagaaatttctgtgaaaccacgtgaaagcattcaaaatcactcgcaaaccacacgttttaaacaagatttaggtctctttcaaacaaattaaaaaaatcataggaacactagaatattttcctacgaaaataatacaatggtatcctttgaaacaaattattgtttcctacgtgaaattaatgggtcattttagagcaattctagaggaaaatgagtatgatgtctctcatatgtttttctccctcatgtatctagaatttctatgtttttcatgtgctaatcaaatggtagttttgaaaatccttagaattccactgaatatgacattatattcctacgtaatattgttcttttattactgtatttttattaatcctgcattttaaatgagcccatagatttatgctagtagtactaatccctccatccaaaaatgatcatcttatatatttacccaccaacgccaaagataatttaaactgtattaatcaaaacaccatgcatacattctcccacaatgcatgcatcgattaaaccatcacgtcaattacaccctagcatgtacgcgttctcccatgtggtattaattgtattcaaataaaatacgtgtctatatagttatataatgattaatttgaaaatttttggattctattacatgatgatcaatttgggaatgagagagtaagtgaacataacatgggaggagtggagacgatggtccccatcgtttggcttatttcctaataagccaaaacatagcttattaggaaataaaaataaatttgtgggtaaaacttttataaatatgttttttgtgacttaaaagccaatgttaaaaaagaaactacgttaaaaatatgtcaaaatcaatattaaaattaagcttaaaaatttaaaatttggttttttcttttagaggccatccgatggggctggatgaagagtagcttgcggtgagagtaaagttggcggtttgctggtttcctggaagcaatcattgcttgaggcttcttgttgaacgttcaacaagcttgtctcgagtctccacacaagggagaagaaggggaagttgcatgctgcgacgactacaatttcccacggtgacaatcatggccatggactcacgaatctccacgccacgtcggatcactctctcgtactagcagtactcctttcgtcttattttaagtgaaattatagtttctgtatctaattttaatcgttcgtcttatttaatttttttataattcgtatttttttattatgagatcataaaacatgagtagtattttactcgtgacttatatttttaaatttttttaaataagacggacgatcaaagttgaacgcgaaatttaaaaagggacggagggagcactattttttaatatattatttatctcttcaccctaaaatacatatagcatccacctaaaaacccttagggcacccacaatggttatctataagctctctacaagagatccatgtcagcatattttcctacttggaagagattaaatgaagagagagagcaaagctatctactaacatggagatagtctatagagaaaaacgaggcaatggattagagagctatagatacccatgtagacataccattgaagtggtttactattaatctagtctattattgaggtgtacatgttttatagatagcaccttactttaccattgcgggtgctcttatattttgacacgaaaaagtgcttcgacaactacgaattctcggaggttggagtagtcgttttcatctctatggtagattggtggtcgtagcattcgatctggccaaaccaaaaaattcgttccagcttcggtctttgagaaaattcggccatcacgacagaacgacatggtcgagctgaaaatccaatcactcgagtgcttttcgaattgataaattatgtcttttttaaaaaaaatatacaaagttatttttaaaaattatattattttgttaattttataataattaatatttaattaattatgtgttaatagcccatctcgttttacgtatcttttatttttcctttttcttaaatatagcgtaccttccaatatttaagctatttggtttggggaaatatccagtgaaaaccattaaataagtgaaaattcatgaaaaatatatctaaaagttttttaaattcatgaaacaattattaaagatggatataggtatgaaaaacattcataccaaatcttaagacaaactcaactttatttgagaaaaacacaaaagacaggtgagtagggttctattactattcaccacctgaaatttgtctttttttattactctataataaagttgggttcaaacttgagatttggtaagaatgtattttatgtctacacctaactctactaatttatttataaatttacaatctttgtggtctagttttcacgagttttcatttattcgatggttttcactagatatgtcctcgttcggtttcggttaacttggatcggttttcggtcatgaccagaatatatgaaggtttcaagagataaaaaaaaacttacaaataacaacaaaatttaagaaagtcctttacaacatattttgacaatcttcagactggcacatttctctagagccagggccgggataaaacacataactaaatcgactaatgcttgggattcatgtggttcttacacccgaattctaagttgttgacccttttgcttttccaacaatttgtacatatgtaattgtcgttctattagatcataaaaaaaagatgaaatttctgttttttcttctagatgaatacgatagtgtgatcgtttctcttagtgcaactggtttttttaagatgctctggaatctaattaaatagtgtaaaagaaaatagtaaacaataaataatgcaccaattcgcataattctttttttttttgaaatgactcacacaaaatagtgtgaagtttcatattgatatagtagaagaaaaatacaaaattataaccttagaggttgtaaccagggaaaaacagaaaataaacacaccccaccacctctcgttaacatctccgcatgcaaccacggagaagatataacaccaagccaactacctctaaacgtgtccgattgttgctaaattaataagggatcacaacggtccactgaatatcaactccacacatagaagatcgtcggcaagctcctggtcacatagagggattgagaaggaagaggaagataaagaagaagattcactcgtccctcacgtcaatctgattccaacttcttacttgtaacttcgtgatctcttggatgaagcggcaaaaaaggccaatccttcatcagcatcgtaagctagtaaaggtgcgatggaacggtgcaagactgctcaaaacaaagcgccatatggatgctaaaactagctcaaactagtgggtagtggctgcataaaaagaggaggagaaaagggcagttgaagctcaaaatttacccagagtttgtccacaacgaggccataaaaagagcacaagccaaacacaatccactaattttatcactctagtagcagtagtaatttacaatccgggtagagtaagagcaggtacaataatatcaggctattaaccagctataaacatattttaatgagataaatgatgagagagaagagtagcgggctacagatctaagctgtagcacggactccaagacacactgtgtgtatatgacagatgaatatattaatagtatagtaaacaatctttgtatgaattgactatatataaattggagctggtagtaggcttgtactattagacttgctctaaataaactcacaagtagtagtaggagtagctttcaccaaagccgaaggattctcattctccccgccggccgatttataaccgcagcagcagtcaaccaccaccgtaccttttctccaccttctcacgccaatttgtcgccgtaaataaaaattttaccaccaccactttctcccacgcggcggcgaggcgaccgctttgctttctccggcgcggcggccggcggctgaagcgtgggcgggggttggggcctgtgggggccccgggaggagaggaaagcggagcggttgctttgccggaaaaaaagatggagtgtagtgcggtttgctctgttgctcatatccatctcgtcttccgcttccctccaaattgcaatgcggctttgggcccaaatatggaacgggcctatgtctgggcctaaattgttcgtgggctttctgggcttccctttttcccctaccagaaagataagataacggatttgctattttacttgcgacggatttttgggcttctattttttccccgtaggattctacatcaagatttgcgttttttatattcacttatggttgcactcagttacatagaactcaccctcagttgcatggcacttacacttagttacagtacatcaaaattagattttacattttttttatctagatttacgattttcaacatgtttgtttcttttttgggtaattaatttaaaatggttcatatcaattgatcaaaaattctgcaagattcaaagctataaatatgtcgaaacattaataggtagtccactgataatggaagcaactttatttggagtatctttatcttagaggaatctagtacaataggaagagagggaaataagagtaaagtgcaccgatggtctctaaactcgtgtggatgtattatttatgttcataaactcttaaaatgtaattttagatatttgaacttatcctcggtgtcatataagttctaattggctctaaatcacctcatgtgttgatgtggcatgtaatgacagcgtctatgtgtaaaaacatcgttttcttctctcctttttaattttatttttttttcaaaattagaaaacattttttctcctctctcctctctctctttttttttatttttcctatgtgactgacatgtgggtgtcactacgcatagtggtcactgtggtgccacatcagcgcatgatacgggttagatcccgtttagacccatatgacactcagggcaagtttgagatccaaaaaatatattttaagagtttagatatctagatgatatacccatataagtttaaaaactgctcgtgcacttcgcttaataacagttcggcttgtctcctcatcagcttagatcatcactttgcttggcaatatgacaatagaggcagcagcagagggatggaaataattggtgcaggtgatgatgcgatgcaaccaaaataaccggataaagggggttaggtgtcaggatgaccacatgaatgaccgatcgagatggcataacatgataagcccatgcacacgagttaacaaggtttactcgacaattcatatattgccccccgagagtgtatgtgtgcacatatagttcttattgttatcttggttgtaatatatgcttaaaactatatttacaccatatatataacatgttggtccagtcatcagtatgacatgcaacagatacggttaaactttcattacaatatatttgtaaatctcgatgaataattataatatttatgatttaataatctaaaaagagatatcaatgttcagagtttcagaagtttgcatccgcgaaaagagtttcaaaaatttaacctagactatatttcctccgtttcataatgtaagtctttttagcattgttcatgtttatatttatatagatgttaatgaatctagacatatgaatataagtaatgctagaaagtattacattatgaaacggagggagtattatagaagatatcctttggaacagagaaaacaaatatatagaggattattcttacgggaactgaactatttcacgaaacaaaatcctgtaaaattaattcatgtattatataagggagccctagatccatgttttcaaacccgatggagagggagtgaatacatgtattgagatgaccactccagtagccttttaatttccattttaatctctgatctgatcggtaaactctcattaccatataattaaggtcgctagcaaaaatgtcaaacaagagatctaacatgatgacaccaagatcccggcatgtcgcttggtttctgccacaactttatgtcatcaaattaattactacattagatctctggagtttgaatcagctaaaggtgcttagctgcaggtttcttgcaagatcagaagagtgacatgcatcagcccaagactacagacaaagagtagtacaaaactagagttttattttccactgattatctcatctatctcatcaggtacatgtgaccaactcttaatttagtttcttaaatacgtttacagttacattaattagtatatcccgatccatttggtttatatatctatggttacttcgtcttcgctagcccgtgtgtgcacatttaaaaaatgaaaatgcatacgtgcgtgttagacatgttttttttttactagtaatggcagtataacttctggtaaacacaccaattatgcacatagtcatttttgtatgtatacatgcatcaagttcaactgcaagaaattaaaaatgataagagaaattaaacagcgtcagtctctttctctgcacgcacgtaaccaagcatgcgcacgagtgctccttcgataacgataagctatataattttgacatggatcatcatcagcttagtttagttttttttctgcggctagcaattaattacattgtaacttataagtaagagcttaattagttccacattgtgtagagtgtgtgtagattgatcttattcgactagaagatcgatttatcatttaagtttccaaaagatcaccggaggattagtttcagatgaactcgaaatattcagaaaatgatatgatatctcatgcagtcagttcgatggatcatctcctttatagttttccttttgtgtttcatttttgtgagctgttcacttctaactcatagtcatgcttagtggcccaataaccggatcgaaaaagatcattggatcaattcttttttagatcaactcgaaagattcggaaaattatatgatgtttattacggtcagggtcagtttacatagtagagcatacgtgcatggaatgatggaaagagatgccaagtaattcttggaattaaggttgtaaaattactagtatttatatacatcgatcaacacagtggggattatttacattactgcacctacagtagctgccattgaaatatgggattgggaccacccgtcaactactgctactgcaagtgcagtactgcagaggatccgtgtcccgatcaaccgggacaccagaaatgtagaagcaagaaaaaaaaatgcaggagaagaaaaagctagggtcatttccagcagcaaaaatatgtgtccatatgtgtgtttttttacaccagcaatttcacagctttagcgtcaggtcgagttgacgcgtttgatcgtctccgtcgcgcggccagtagtagccgacgtttccaccgccccaccaccaccgctcgccgccgccgccgtcgccggccaccgagatcgccggcggcgcctcgccgtgaagcacgcgcgccatccaccccggcgacgccgacacgaacgcgccgtggtggatggcgaaagacgacgacgacgcttgctcgccgccggcgcccgcgccggcgccgcgcctggcgagcgtgcgctcccgcttgtgcgcgttctggtggccgcccagcgcctgcgagctgtagaactcgcgccggcagtagtggcacgcgaacagctgccgcggctcgccgtcgtcgtcgccgtcgcgttcctcctccttcgccggcgccggcgacacgacgagcagacgaggcgccgtcgcctgccccggcacggcggcgcccaccgtgccgatgaggtccagctcgacgagcccaagcgccgcggcggccgcggccgccatgcgacggccgccgccgacgaacgtcacgtcgcctcctcctccggcgagcttgctcatcccttccatggcgcgcgctacgtcgacgaacaccaccacaccaacttaacttgagatgttgcgacgcagtgcaatgcaaggtcgtagtatatatgcaggcaaagtaccaaagtctatgcaagaagatcaagcaaatgatcgagacggagggcatggtcagctggtcacgttcacgtaacgtgacagtgacgtactccgtgtcaatgttgccattatgtcataaataagactatccgtttcacaatatatgtactatatttattatgtcctatccggtgaagaatttaagatgcggttactgcaaattactccttttaatctgccccgaactagatgtttcttttttccgaaaacgcagtacagacacggacgtttataatgcgcgcacattcacccccagtaaacgggcacacgtacaccatatccatatgagcacgtttgaaatattgacctgattgacgaagtcaccacgggcatacaaatatcatatccctatgagcacatccgaaagactgacccgacatatcttgagattgacgaagtcaccaaggactaacccgatatattttgattttgacgaaatcaccatgggacatatcttgagattgacaaagtcaccacggactaacccgatatattttgattttgacgaaatcaccacgggtgtctcgctgtcaataggtatgccgcatatcattgaaggaataattaatcgcaaatgcgagtacctatgtcaaatatagaatttgaacctggataggttggttccaacacaaggaacctaaccaattaagctttatatgcttgcaaagacacctacagatagacatgctaacatacaaatttgaattaaattggttcatgtatttagtagagatatctaagataatctcttatatatttttataggatttctatatggctgttgacagaaaattaaggctaatcttagctaggttcgtgctctaaccacctagatctttctcctctagctccaacgactggtgacgtcctaacgagttagagtttagggtctcagattttggggtgggggaagggagaagaggaaggagatcgcggggtttagagagatggctgtgggagacgacggcccaacggtccgcggtggacacaggcggacggcgaggtagcaatggctccaaagctgccaagatggaggaggggcagagggccgatgttggcgatgagggaaaatagagcttgtagttaggagatgacggttggtggtggcgtttctagcaacggggagctgtcgaagataggaaagaaggcgccgcaggggcactcgttgccgccaacttagagatgagaggggggggggaacgctgcgatgataatgacgaaaagagagaggagggttagtggtaaatggcacaaatcttaaaacaatccaatggtttagattttgcaagatttgtaatggcattttttcagtcaaacgccatacagacagtccctatcgtttagtagtttgtaagagagcaccggaggtgcagtgtgcatgatttcgaaccattacgattcaagccctacaacaacgaatatgcatgtgtgcttctaaggcctttcacagtgggcggaacttaccgtggcttcgtctcacgtggcaagaaaagtgggtggggcccatagctatactcggttctccggttcctagcaaagcaacgaggaacttcgctcgggcgcggggcccactcggggcgcgggcccacttggtgagcacgcgggcgacgacgactccgcgcccctatgggaggtcctcggccgctgcccatggcgagtcgccggcgcggctctctacttcaatcgccggccgcgtcggccacgccgcccccgatctggtcgaccggagctcgccggccaggagcggcccgcttggggtggagagggagatgcgggcggccccccaagctcagctcagcgcgacgacgacgacaccactgccgtcctcctctctccgccttctcgtcgtcgtcggttggagctgcttcgcgtcgacgtcggtggtggccgagccgccgccgccgccgccggagaggcgagctccggaagaagaggaagaggagagagcaaaatgttcggcttcgggcaccacggccaagaccagccaccccagcacgtcggcggcggcggcgcgcaccagcccacctttaatatcttctgccgccgaccaacccgcgcgacgagcaccagatcccgaccaacccgtgcgacgagcaccatatccgcgcacgggatgaaggcggcgcccttggccacgccggtcacgagcggccctaccgctcctccgcttgccgcttgccgaagatcagcccgaggacgccgccgccactgtcctcccgcaccgccgctgccgtcgtcctcccgcgccgccgccaccgtccttctcgctccgcctcctcgtcaccgcctccgggaagagggagagtcgggcgtggcagggacggcgcgcgccgccgcgggcggcggcagtgacggcgaccaccaccacagccgtagtgctcgctgacgacgggggcagaggcgacgggggcttgagcggaggcggcgagggaacgggcggcggaggaggggagagccggcgccgttgggtgacgagggaggaggaccagttggggatttggtgtcggtgaagatatttgtgggccccacaagtggtgcttgcactgtgaagagagtgtcttcatcctatgtgtcatcctgtggtaactcatatggggtgcttgcactgtgaatggcctaataaaatttcagtgaagttaatggatctataaacggttcaaatcctatgaccacgcataatcgagtgtgctttcaataaaaatttagcgaggattagacctatagttttgcaaaattttagtgaagatcaacagatctaaggtccatatcctacaaccacacacaagcggatgcgctttcagtaaaaaaaaaatgaggttcacatatctttattttcattatattttgcaatttatattttattttgttggattagtttgtacgcgtggtaaactacggacaaatattaggaaacaaagagaacagcacaacaatcatcaggcaaagcaaaagcaaacagagtttgcttccggcgaggggaaacggctcacggatggtcggctgggctgatgcaaccgagagagccgctcgtgcgggcgacttgttgcagagatgaggcaagtgatgccgacttgggcaataggatatcattgatccctatccccaactgaacaagtgtctcaaaacattccaacggccaggttaagaaattcagtaggaaaccatcatttcagagcaggtatgactgatactattgtcaaacaaaagcgaattaaaccatcattcagaaaagaaaaaggcagtggcggcagcagcagaatttgaagcctgtccacactggaatggatttgtcacctgagccaagcaggccaaagcttcttgcggtttcttgcacggttgtgctgcaagagcatgtttaataattccatgctatgtgaaggaaagcagaagaaccctgaggggtatgaagataaggaatcaacggtgataccattcatgctgtgatgtttcttgagaagtaaatagaccacacatgttttcctagttctgtaggcagttgtacaggataatcgatcgatcgaacgaacgaaccatcccctacgcgatctaggtctacgggcgagcactcagtccatccttcccttgatcactctctcctgaacctctgtgggagtcctgcattaaccaacaagccaggaaaacaaatttcacagattcagtaaggacaacgacagcattagagttttcatctaaactcccatgtttagtgtgagtgaaaaatgatcatatatggaacttacacaaggagaacataaccaccccagccactcaggcaatctcgatcaacagaagcctgcagcgcttgtgagatcgtctcgaatagttcttccggttccttcaccaaagaaaattgtgacagaaaaatgtcatgtttacagtgctcaaggagaccaaactataagtaaaataccattctgcagatagttttcatgtaaactaaccatgcttggcttatacatggactcacaagcaccatatagtgattctgaagcagtgccagaaaccacaaaatctttcgctagttccctgcttacaagaatcacctttgattagtatgaaccttaaaaatataaaacaaggcagtaaatcagcatatggtacaaagtgaaaagataggtatcatcaaatgctactgtgtttttaagaggctagagacttacagtgaagacgaaggtaggataaagtttgagaatggaatacagctatatctaaattaacagtgtgttactaagaggcttgagatttgtcgtgaagaggaaaataggaagttgggaagaatacagctatactaagttaacggtgtgactttttgtagggctgctattaaaccctacaatcaagacaaaccctcttaaatcacctaaatggctacgtatatgagcaaatgaatggaaatgacaagcataatcaaacttaacctgagattcaacttgaaaaattaagactaaactagaagtattaaatatgagattatttactcctacacacactcccaaggggtatgggttgtatgatatttatcattataccaataatacattgtttatggtaccgttgagaacttcagatcagttgaattttggacaataaatttagtaaacgactaaaatgagacgagagaatataagtgatacatacttggcaccaatgcaatccatggtacatataaatggctcatcattatctcctaatccagcaataactggttggcagaagtacggcccaaacctataccatggaaatattctataagctgtttgcatagttaagtcaatggagagagaaaatacaaaataagacgagatctgtgagtttacaataacagaaataccataggtttacaaaacttccttgtacatttgattatttgaatgatgaatgattcaaagataggatttgtgaatcacatatgatgtaaaggatgtgttaagccaaaaccaagaattttacacgatggttgttaaggatgtgcaataaccaaaaacaagaattttacacaatggcttcagcacagtgagaatcaaagctaaatagctaatatcttgccctacagatcagaggaaatcatatcaatcactagccccactcgaatagcagcaatgattctcaattttcatcaagttgatataagaattaacataatacaactaatacaaggcatgtaagaacgactttgcacaggaatttcacaattcagtaaagcaaatattacttcctactcatcttacacatgaaccagttacttagaacgcgatcatcatcatatcatcatatcttcaaacagggctagtgagcattctaacctcttctcgtagaggagcgcggagacgaggctagcgaatgcctggggcttcatgtccctctcctccctcagctggtacagtttgtgcctgaacaccagccgctggtacctgcaaacacacggcgcacatcaaaacccccccaaaaccctaactaacaagcaactcaatacgccggttctagagcaaaatccgagagttccgggacacccacagcgtctgggcgtcggtggcgaggccggagaggccgatgtagagcttgtcgtggatcttgaacaccctctggaagtcggtggcgaccgtctgcagctgcaccccgaggcgccggtcgctggcgatcgcgaagcagttcttccccaccatcgccaccacggcgctcccgttgtactcgaagatctgcagcgacacgaaccccaaatcccccgccatcgccgcggatcagacgctagggttttgtgggagcggagaagggggagggggatcgcggggggcactcaccgacatgaccggcgccgatgggctcgacggctgcggcggacggcgaggaggcggcggcggcggcgcgcggcgattccggttggtctccggcgagcgagagaaaaaaaataattaaagaaaaaaaaacaagcggcgagtgtgatgtatagagaagtgaactgtaccagatacggatacgtacatgggcccaaaatccagcccattactgataggcctgacgccgctaagaggcccagttttgtgaggcccgtataaacataagattatctcgtgggccctgcccataataagggtttacattttttgcaggccatttttaaagaaaaataaaaagataagagagattacgcaattatgctcaaatcccctgaaatttggtttgccattggatggagtggtattggagaaacatccatatggactttgtgggaaatatcatactcactccgttttttaatagataaccccattgacttttagaacacgtttaaccatttattttattcagaaattttatatatatgcataagatataaattgttgtaaaacaactcacaacagaataaataaaacgaatggtagtatgatgctggaattcatatgtattattcttctctgtatttgagcttttctgtgctaactcaactggacatgccatgttaattgctttgcttttactctactgcaatttaaaattatttgcatttcaaatggtccaacatatttgctactagtactagtacgcaactgaagcttgcaatcctcagatgcaaggacgatttgaggcgcattatacttagtactagattactagtacgacgtgagattaacttgagataatccagcatatgcacgtgaagaaattaaatgaatcagatgcattgagtacctcttccagtcaagaagcttgtacgattgtaccaactattttatactcctaaaatataggagtaataagttttagttctaattctagaaaaaaaaacttattttattttgagacataggtagtactagattattttatctttggaattgaccaatccattttatctcaaaatatagtttttttttgtttttcaacgaaattaaagaaaagataaaaagtaaatagtcggttggaagtcactgaggttgtggagatatggagtattttgaatattttatgactatatatagaccacccttgatactatagaaataggtatattttgcaataaaatgtgaatagtataagtagctatgttttagatggagggagtataatccaaagctactctaaaattttaaagtgtatttcaagacttaacaattcttggatggtaaactgataatgttctcaagcttgataagcaagaacatgaacagagagattggagaaatgaatgtactactaaaaaacacatctacattagactttatcacactaattttgaagctctcttcgcttgccgatgaatgtaggagaatatcctcctctagaattgttttatatatttttgtgatgacccaagctccacaattccatgaaaaggccaaaaaagtgtatccttttgaaatttggcagaaaattcctctaacaatcttcatttgcctttcttagaaatataatctaaataaaagacttgaacataaattaagcataacacactatacatgcatggaggttaagtgggaaaggggggatgactaagctaacagtcaattaaatttaagcataatctcttggactttttgcatgaacaactcacttgcctttcaggtagaatgagacattccagacaaagacaagaaaccgtggtgctctgccccccagcaccattgatgccaataattatacattcggtccaagaagacataaccagcagtgtcacattaatccctacttgctaaagcaggtatggatgtgtggtctccaactaacctcatcaaatactatctaattatgcgcagacatgtccccatgggtcattacactgaagttgctacaatattacatggctctttttcttgcatccaatgacaatgcaaccatatgatattatgatattgtcttgattaatttcctacctaatatgcacatgctcattagttcactttgtttttcctagccatgtatagatccttggattttgaaaagggttagttagacttggatttgaaaagggttagttaatctaccagtgattgtgattccatttgatatttgagaactgagacatatactcctgtaccagctattacctcaatgcaatatgtttcactgacgagtgggcctgctagattatactactgtaccagctaacctttagtttggtcatgttgaaaagtacattgccattgtgaataagacagcagaatagtagatgtctctattcacaaagtacagtaagtggaggtcacactactcactacacctaccaaatcattattctttgtacaatctactacttaaaacattctgtacaagactcat

SEQ ID NO: 20358 - DNA, 2177 bp, Oryza sativa
aaaaaaattaagtttgattgtgacaactgacaaatccactaattaatttgaatctttaatttcatctatatgcatgtatccctcacgaaaaagaaaccatccaacatatatcatcatcctccagagcacattggttttatgaggaaagagaaaaacacatccaaagttaatctcttatgtttccccttaaagatataatgaaagtacaacttcttgtctctgcattaacgagagaatgcacacaatcattacgctgccatgatctaataaagatgccaattgccaaaataaattagatcacatctaaagtttctctagttagcaaagtgttttttttccctggattgattattatttttgttcttccatgtatatatatatctcacttgtgtaggagagacatatattatatgccctaagattatatcctgagtacataatcacaaatgcttgctttgtccagaatatttgttggattgatgccctagaattgataggttttggcctatgttctatctaattaatttatgccacttttctcaccctaaaaaaatgttctaattaatttgatttgatatacaggatcgaagctaggtgatcttagctagtctatatagaaaacgcaaagttacacatttagaatctcatttatttaaagagtagtgttcctatatcatggtatatgtcattgtagcttggtagctaaattaattgcaatggtgtcatgaacttgacacaacataatccataattcaaggatgcatgcatgcctctaccatgcatgcatctagctaaaagctaacatggatcactaactagtggtaaacttgtaattaattaggccccattaatctccatctaggttaacacatttgctaggagagatgcaagctaatgataggacatggatgactgcagagagatgtgagagatagcattagctaggtcctacattattagataagcacaaagatatatattttatgccagggctagctttgcatgccatcatacacaagcgcacacacacacacttgttaatcctcctaatgatcaaatcaagctctcacacaagctattatacaaaaggccaccattgtttccttctgatgcttactttgcatatcacccattaaccaattacttaattacttaattgtttctcctcccatggcccccacatgtaatacacacaacctgccactctcatccctaacctgccaacctatgtgtataaattcccagctccttccctcccatctgagaagaaagcagcagcagcagagaattcatcacccagcaagatcagtcaggatcagctagctaataagctagctacaagcttgattagtcacaaaaccacaagacaattagctagaagtatatactgagatgggtgaggaggagaagatcatggcagctgggaagaagatggtgagagtgagggagttcatcatggagaaggacttaccggcggtggaggagctcgagcgcctctgccaggccggcctctccggcgacaacggcgccggcggcggcggcggcaagaagaagaagagaggcatgtcgctctacgccgagcagatcggcgacccgttcgcccgggttcgccatgctccggaccacgtcatcctggtaattagctactccatccgttccaaaatataaaaatttaggaccagatgaaatatgtcctagtacagcgaatctcgacaggcagcctgacactgtgttgttgcatgcactgtgttaatcttacagtgatgttcttgatgtgattagttgcttgggcgtgcgtaattaatgcgctgtcattggctgctttgatctgtgtataggtcgctgagtgtggagacgaggtcgtgggagtgatcaaggcgtgtgtcaggatggtgaccagaggcagcagcagcagcttgaggaagacgaagacgaagacgaacaagtttgtcaaggcggcgtgtcttcttggcctcagggtgtcgccgtctcacaggtgatcgatcatccacgccgccatggacgaccatgcatgcgtgtccaagctaagctttgtagtacgtgccatggcgatggcgatcgagctagctggtgctgacgacgacgaggtgttcggtcttttgcaggaggctcgggatcgcgacggagctggtgcggagagcggaggagtggtgcgc

SEQ ID NO: 20359 - DNA, 1979 bp, Oryza sativa
gcaggagttaaacatctaacacatgaaactaagtagaagctagataagaatgaagctaatcagaataagaccaaggagtattcacaatttctataaatcaaccgtttattgcaagatgtttaagaaaatttggtgtagtgagtatgagatgttaactaaaaacaacctttgcacggattagtggactataatcttgggaagcatctttgaacttcacctcagcaacatatttaccaatatgaattcttcttgacagggcctacaaagaaatgatcaatacatttcacagatatacactgattggaaacaatttaccattaatttgcaataatttgtgcaaattttgctttcgcgtgctgaaagattgaaagaacatatcctagtagcaactagatttatgttttttttaaagaacgaccaaattgatggaatatctaaaagaaacaataaacacagaacatgtaccttcagacatgcaaaatctaatgcaactgtttctgcatagttaccatcatctccatccacagtgaatagtggaagcaactcgttgaaatacatcttccatattgcatcattcacactgactgatgatgcaaaagagtgcaaaacctaacaacaaagcaataaaaactcagaacctcaacaatcattagtcatcagttcattgtaactaatattgtaaagcttagtatttacctttgggtaatctttggtaggaaatagaggtgaagggagatcttggggaaagaatggaacatcttctggcttttggtattgtccggcctatcagatttcacagatgtaattagattctgtagagggatgcttggaaatggtaatatgctaatatctgactgtcaacatagctataccaatgctgtattttatgttgattgattttgacagttttaataggatgctggataagatatacaagttgaaaaatagcataacaaaatttcccatttagtaaagtacaagaaaaataatagtaaatcatttatgttttctattattaataggggatggtacggttcaaactttttttctccatcgtcactatttttcccttctgatcactttcacttgttgaatgatccgtaaatggaagtgcctttaaaacacatgatttacctacacatgtagcatagccattcttttgttaatataaatctcatccgatactgtgtgtccgttcgaggtactcaaaatgaattcgtcaagccaacataagccgcaatgccgcatgattaccagaatggacatatcagcatcttaccctccgatgctatctttcaattcatcatggtacagtggagaccaaggtagataaactactgccaaaaaaacaatgtggtaacgaaatacaagcctagcctgtaagatctgtgtgactgaatttcacatacgaattcctcagccatgagtttactaatcactaaggtgactgaatagaaagattggcctcagaaatttcaccaggcaaaaaaaaatcttcctgtacaagttcatcatggctatgctacactacaacatggtataaaaaggatcgattttggtaaagaaaacgtaaggggatctagttgggcaggatactgaatcatgaatcaatggggagtcaagactcaagaacaacgagaggtggcgggcttaccttggcgtgcagaacctcggcttcccggacgaagaactcggcgagggatcggccgccggcggcggcggcggccgcgtatgccggcgcgttgcgcgggcgcctggcgcgctcgatgagggcgaagacgatggagtcctcctcccgcaccagcgcgtcgcgcaccgccgccaggctcagctccgcctcgcccatcgatgatctctcgatccgccctgtgatgactgatgagctcgcgagctaagggaaagctgctgctgctgatcctccacagctccactctgctttgccagtggtgccactctcctaggggcctctttggcttttt

SEQ ID NO: 20360 - DNA, 865 bp, Oryza sativa
tttccatgtactcgctcatatcaatccgtattagagcattctctgtgttgaaaaggaattcagctagtgttttccccagttcggtctttcctacacctgttggacccataaacattaagcttgctatgggacggttagggtctgataggcctgccctagaacgacggattgcattagccactgacttcactgcaatatcttggccaataaccctcttgtggagtacatcttccaatagcagtagcttttccttttcagattgttgaaggtttgacactggaataccagtccacttgctaacaatctcagcaatgtcaacatcagtcacctcttctcgaagcattgacttgcctgactgctggaattccatgagtttgttctcagcctcttcaagctgtttttgtagcgacagaagtgttccgtacttgagctcagctgcacggttcaaatcatactctctctcagcagcttcaatctccaggttaactctgtcagtctacaacaaagataagaaaatatgagttagagactatattacgtgccatggcacaacaaataacaattaaaagaacaaaccatgagcctacctcttccttgatcgatcttatgcgagtcatcaaggacttctcatattcccaatgttctgaaaggtttttctgcttctgcttcagagattctagatcagcttcaagcttgctcagtcgctgtttggaggctttatcggtatcattcttcaatgagagcttctccatttcaagccttatgatttccctatctacctcatccaattcaataggtttcgatgttatctccattttcagcttagcagctgcttcatcaactaggtcaatagctgcccatgacg

SEQ ID NO: 20361 - DNA, 2628 bp, Oryza sativa
ttttgccacctacatctgatttgctaattgcaactcttctagttctagcttatcatcacccaaattaattaacccttgattaaaagccaaagctattaattatattccaactccaagtaaattcaattcctccccatctagctaggcagctagcctttaaaaccatgcacaccttcaagatacccaagcaaggagatacccttgtcatccaatggaatggatgattcccttttggctccttttgttttgagataacagtacggcttataatatattctcctgtgctaattaaattagggttcatgctgagctagtactactcactagtactgatgtgagaggagaatgttgggtgacatgtataaagtcttctctgtgttgaactggacacgtttccagttttaagaggctgcttagatggctaggaaataaacaagagatggacacatggcaaacagctagcttaattagatgcctttctgtttttaatctgtattttcttcagatagtacatgtacgagtagctagcagaaaaaggtgttaagctttatttcatcattatttgggagttaaacctaatgaaagatgtactatgaataaaattaatattaattagcaatatattaagatatatacagatgagttagacttttgatgagaagcgtaaataaatatcttggggggcaccccgcatgctttcccaaataactcaacgtgatttttaatgggctaatgattcgccttatataagcatatgagagctaagctaccatatatatatatatatatatatatatatatatatatatatatatatatatatatatatatatatatatatatatatataaaattaactattgctgatagtttgacgaaaagccgtgatcttgttaaagcgatatattctcatatctatatcacccgttcttcttggtctaatacaatgttctagaagtgggtaatatgtgaaaaaagggaaaagttctctttccaagaattacatatatactatgcaaattaaaacatttgttacatgaaaaaaaagcatttcctatacaacaaaatatcaaatcatgctgtgttttttgccagaagaatttcctatacaacaaaatatcaaatgcaacaaaatatcaaatgctctctcaagaacacctaagagtttagggaatcaagcgagacacatcgcctactgcaacagcggaatgagcacccgcatcggctgggcaccgcagggtacatcggcaaggaggcaatatgggcccaagaagatgcagccgctgcagcagcgaatgtccatgccccgttttcagacatccctgaacaaagagctcgcaactgggcgcgggcaaggggtaaggtcaacccggatggctctgtcacatttgagaacaaaagagatgccgtcgtctatcaggaactggtgagttcactacttaacctaactaatttccgttcgtataaagtagaagttcgtataaatgactcttttttttctagttgggcttggttgctgaacaagcttcacaaagcaaggttgagtccgcgccgaagaggcgcgaagatgacatcctcacaaaggcgctcggaaccaaagaacatcctggccggactaggggaattggtagcgatgtgccctggaagcatggactcccgcagtacagttcccaatacaagaaacggaaagtctccaaggaagagagggacgctcgtttgaaggccgaacttaaggttgaggtcattcaagaactagaagctagcatgaacgctagggtggaagaaagggttaacaaggtcctcgccgacatgaatataccccgaggcacaacacctgctgtgcatccaactcctcgtgcacaacacgacgcgagtccgtcacagcataggagtagttgtgcatccacagaggtgctggcccctggtctcccggtcgcaccactagctgcagtggaccacatagaggtaattgatgttatctgatccatatctaataaaaaagcctttacacgttccaatattaaattcaaactttcacatatgtagggcgtagcacagtgtgtcctactggcgagggtccacccaactttcgctcccgaagtcgctgagggcatggctttcaagccctcggttacagacaaggtccacggtgcagacctgctagctgggtatgccaaggtgtccatcgatacagtaaaggacacctggtcaggctatccgctgctcgtgccccccaatgatgaaatcatgactttgggcgatgcgcacaagacgttcatacaatggcctaaagaagacatagttgtgaagatgactcctcgtccaagtcgaccgacggagcttacacctcccaagtctaagctatcaattgaggctccccgtggaccggcattgtcagtacctcattctcctggtggagctgatatggacttggcagatatagctcaaagcttggctccaataaagaccacaagaaaggccgatagctccccaccacttgtcaagggccagaagcgtgaacgcggcaaggggaaggtcggggagttggcgccggagccaaaaaggggcaaggcagcgacatcgatgccggtgagcaaagcggggaaggtcgtgagggcgccagcccaa

SEQ ID NO: 20362 - DNA, 12403 bp, Oryza sativa
gatacatgctcatcatcaaactcccaccattgaccattgctttcgtcctttacatgtgctacatagtgcccactattggcagcactacccttgtggatcaaaatagcagacaggccatacgtataactagatgaaggattggataaccgcttccccatatctagctgtcctgggaaactgaatgccgaagaaatctttttctttgttgttgtctgtggacgaaacgagttagacaaatttcttgctcaaatacacaatcaaacgaacaaacaaacagaaggaatataaagcaagctacacctttgggaggaatacatagcgtttcagctgaaaattaacaacaggaggaagtgagcgaagttttatgcaacgagtggcatctacccttttctgacatgactcacagaagtactggttctctccatccagtgcctcagtactcaaatagtcatccaaactttgttctagattatttaaacctttaatgttaagctccagttcgtaaaagtcttccatctttgaagatgcttcggaatcccttccacatgatgagcacctaaagcataggatgaataaacttcagctctacgcaaaattaaatgtactatgaactaagtatatcattccctttaacatctgcaggctatgtgaatgtgaacataataagtgcatgggaagcaaagatcttgctaccggaaagcacaaatctacttgatcttttcaatcaatataagaacacaacatcagtcttatcaatcaatacactgcacacatgtttttaagtagtaaaacaatataactatctggcataactagattcatgcagctaagaattttttagaacttctacacaacaaaaaacactaacaaaaaaaaagatatgtttgaaaagatgatagtacaaaccaacaagcataataaccttggaaaaaaaggaacttctacaaactagaaagcttatttccctttcctttccaaagcctaacataagaccattctaggaataagactcaaagatcgcatgagaagcatatagcatttaccctaccgagtaacatgggacacacttccacggaacaaatgctgcacaatggttctagcccctggaaccttggaatgacttagtgaaccctcgagcaaagacaaaaataatgtgaggaattcatggctgtcctgctggacaccattatctaattccaaggtttttataaaaggtgccgaatcaatgaaagccattttgctggagtgtagctgagcgaataaccgagcaagctgatccagcacagggtgcatcttcaagatgtcgggctctagagagaaaatgcccaagcggaaggaggtgttcatgtaaaggcactgcagtatgctgtttgcataacaggtagcgcccaggttagtcaatccagcaggcgtctcagtggagtcacgaagatccgtcgacgggttaggaccaagggcgcgaatgatctcgtttgttctctgccacaggccagatttcctcaccccattagcagcagggatcaacccgcagaaacaattgggtgagtccttggagttcccatggcaaccatgacaaacaggtttccacaccatataaagttgtttaatatcgccttttgtgattgctccagtggaatgtatcttcctgcatagcagacaccaattttttttcaaaaaaaaaaatcatcagcaagcaaaggcagcggcacctcaagactagcatatcaaatctccacagctttggccaaggcgacaaggcaatgcagacatacttgaaaacagcagacgggctctcgcagtcatcagcccgcggcctcttgctcttatttcgtgtgtttggcctgctcattgtaccatcaaaatcaactcaccaacgccaaaccaaaaccgccgccgccgctccccttccctgtagatggaaacaagcggaggctacagcattagcacatcagcgcgcagggaaccaaatccaacacctactccgatactccgaaacatgcaggaactacgcggaatctcgcggtcatactgatgattcgatcgctgaaacccgccgccagtgggggttagggattacctggaacagatgctcagtactccggggtggatccccccagtggcgcgagggggagaaggtcgccgcctggagcagccggagcggagatcggcggcgggggcggggaggaagcggcggtcgcgggggtcgccgtcggtcggggccggagggagcgaggccgaggcggagaggaaaggacggtggtctcctcctgccgcgcgcggttcggtgcggtgcggtgcggtgcgacgggtgcggtgagctcgggttcgggctcgagctcgcaacgaagtttaaacgaaacgggaaattttggatggataggcacggaaggggtagtaatttaaagcgtcattaatgcttggagattttttttcctttttattttgtttggccttttcctctaagaaaataaatgatggaagatttttttgggtcgactcgtagccatacgttgcgatgtcaaagctagaaggcccaatctcttcgctaatcgccgtgtgaatctagaagattttgttgttatcttccggaatcaaagctcaagatacgaaattcggataacaaaactggatctctctagtgcccgtaatgtgatcgatctgcatcaatagcgaatctgcgaatgggcctacatttgtaattggaagtagtggtagtatggcccatcaaattttgcagtccgggagttgtgttatggttgggctgaattgatgctgtatatcggcaagcctgagatagcccgttcgcactttgcacgatgggtcaggccagaagcatgggcccagagtaggagcggcggatggagcaggtgttgggccaggaggcaatccgctgagccgggacgtgaagatacgtgagctcaactccaacaagggcaaaatgagcagaataggtatatttactgatcaaggaacggctgcaaaaggaatggggaaatggaaaagaaattatctcagaccaaaactaaaagttgtatatcaacctgacaagcatattagaacgtagaattaaataatggcctatcgtaaaactcggaatgaaatgtttagcacgatagcaattaaagaatgtggtgcggcattccattctacttatgtaattaaagaatgtttagttccaaactttatttttaaactttcaactttttcatcacatcaaaatttttctacacacataaacttttaacttttccgtcacatcattccaattttaactaaatttttaattttagtgtgcactaaacacaccttaggtggccaatggcagtaaaaccagaattcaccgaacaaactagctacatccaaaaagaactcgccagaacgtgcccgcgcgcgcggcaatcatagcttggatgcaaaggaacttttcgtcactcacaggcatccaccaaccaccgacctctctaccctgacggcctgaccgtgacgtcgcaaaatcaattaacacgtgaattcgaaagcaggacgcttgctagggctaggggtgggttacttcattagcacagtgacgactgacggctcagtttgtttgaaagattagcccagtattaattataagagctaatgtttagttataaatcagtaggctaaacattagtttagggttgtatgtttagatccatgggctaattcaaggctaaaagttgaagagagagtaaaaagagatgagagagagagagagctgctttttgatactccccacacaaaattagccccattagcactttttggaggggctaatgttttaaggggggctaattcactttagcctcaaattagcccatctatttaaatccttgagggctaactgagagttaaaaggtggaggctaataattagcctatagaaccaaatagggccgagcttgcaaccagcggcttagctagcggttgagatttactggagacaccagaaagggagtgcgaatgtgcgatcgggaatcgtcgcgatcgcgcatatgaatgtgcaagaatctttcaggtcgacgtcgcccatattttacagcagcgttgggtttgcactgtagcagctgccacagagaaccgaatagtgcctcttctcgagttctccgttcttttgacttgattggcttgccttggcgaatgatcggccatttatatcaaaaaggaaaaaggaaaaaaaaagttccctctcctagtctccagagaaacaaccgctattttaaaattgtaataataccattataattttacaaaatttgatatatgtcatcctgataccgatgactcatatgggtcctacatattacttagataccgatgtcatatctcaaactttgaaaaattataatggtatggttccaaattacccttaaaaaaactgatccccatatatatgctgaacactgcattttcctttcaaatttacgtacttcacgtacgtaaattcgtaagaacatttttcctgcctctaattcacagcgtcaagtagctgtttcactcaatttttctggaccttctctggcgttggagatcatgcggcgatatactacagtacacgcctgaacggccgaacgcgacacgtacaggaacgtggcgagcgtcccgtgtagcagtactaaccaaaaaagcttttacatgcaaggacaagggctattacatgcaaggacaggtccattttacaagcaaggacacggctactccatttcgctacatgcaaggacaaaccccttcccacgtgggcccacgtcccccgccacgcggctcccctcgggatcacgcaacccggtgacagaggcactgcccgccaccacatggtgcgcgttgcctatgggccagccaccgcttgtgtcatcctgtgggttttgtggctcgcagctgcgcggcaccccacccccgcagcggtgcgtggaccgcgtccagggagcgggggagtagagtagacgagacgtgagccgcttcggttccctccaggaggttccgccacggtcgagacgcggtgggccccggcgcggtccacgtgacggcgccagcgggcctccacgcagccaaaagcgccacttggcgattctcggccgcacagcccacgacgggtggctgttttgcggtttgccccctcagatttctgtgtgtttttttttgctttcgagaaattaattaatgtggatgatgttttttttttgggacgtatatggaagagcagtataccgtatactccctccatccaaaaaaagacaaactctatttttccgtgtccaacgtttgaccgttcgtcttatttaaaaaaattatgaaaaaaattaaaaagataagtcacgcataaagtactaatcatattttatcatctaacaacaatgaaaatactaattataaaaaaattgcatataaaatagacactcaaatgttggatatggaaacctagggtttgtcttttgttttttttaacgaagggggagggagtacgttccttgatacatggcacgtcgacgttgcctttcccatgtaggagtagtactatgtactacatcagcacgtactagtgtacttcatcgtctacacggtgtgaagaaagtaccgcgatgtacttcgttcgagtcaccgtagagtgaaaattagcgaagtttagtcctatacttcggctttgatcgtttgtgcagcttgcgggccgcagctgcgagcataaacgatcagccttttcgttggacgaaaagcaaattttcaaataccagaaaataggtacgattggagaacaggaatacgtacccgagtaagctactagaatatatgcactcattttatgcgtgatcatatatggttaattactactatatcaatgcaaggttaaattcaatacacacatgaaaataaataacaaatataatgcaaatgtgatcgtacttttcgtaatttgctttgttagttttcttctctcttcatgcacagattaaatttaaccttacattgatatagtagtaatatataacatcacttgtatggtgtttaacttttcataattgcttgagccatttgctagaaacgaggataatttagagttaaataattttcctactaacaccttgaggatgcttaagattatgataaacacctcctgatcgagtaggcaactggtgagaccgaaaaaaataaagctgatttttttattattatttttagagaagggtatattacccggcctctagattcaaccttatggtactacttatgtcactgtaaccactggggtacatgcccttttgttaaagttgaaatttagacctttgacctctgattcattttctagatattctcatctatagccaccaattcttaaaaggacgtgactacacagctagtgataactggtttgtctaaactagctaccactccatatatgagagacactatccacctatactttaaatacaattttctcttaaactactcatccgatctacgatccgattacaccgttgtgttcgtaacaattaaatatttataacaagatcccacatgattatattttgatgaaaaattataaattgcttttataatatatctaaattacttttagatttcactaaattacttcttagacatatgaaagtaaattcaataaagcctaaaagtaatttacatatattatagaaataacttataacaaaaagaaagtaactttagtgaatgcctttttcattggacgtgactacacagctaaaaaaaaaggaaaaaacaatcgatgattaaatagatttatagagagttacttttgaacaatgcaaaagttactaccaattaacattgaagttacttttcaaaattgttaaacttacatgtgttgatccgtgctgattaaattttatttctagataaatttatattgttattcctacaacgaatttacttataatgtattgacaaagttacttccgttttgttttaagtgttaaattagttttagactatattgaatttacttttatatgtctaagaagtaatttagtcaaatctaaaagtaacttatatatattataaaagtaacgttcatatgtaataaaagtaatttacaaatataaatattttttcatcgtaatataatcgtgtaagatcttgttgtgaagattcaattataacgaacacaatggtgtaatcggattatagattatcacatagattctaagtatcagtaatcatataatccaaaaaaataaattgaaagctagaagctgaaaccgtattctgaaaaactatctaccaacaacagattctcataatcttatgctcctttaaacaaggccctattttgttgtagaacataattgttccctaggtaataactaatccaagaattcacccttcatccagaacacatagtaaccaataatgcctctaatgcaaaaacggtacaaccgatttatatttatttgtatataataatgtccttcacttagagagttaggttctgtttagtttccaaaacaaaaatttttatgttatcacatcgaatgtttggacacatgcatggagcattaaatgtagagaaaaaacaattacatgaattgcgtgtaaattgcgagataaatcttttaagtctaattgcgtcatgatttgacaatgtggtgctacagtaaacatttactaatgacggattaattaggtttaataaattcgtatcgcaatttcctggcggaatctgtaatttattttgttattagattgtggttaatacttcaaatgtgtatccgtatatccgatgtgacaaccaaacccaaaattattctccaactaaacaaggcctagaggtctcttccaaaatagaattgaaggctagactaggaattaatctcttacttatatatcgtaatccatttatcgtttcaatttccgttaccattatccaaaatatacatatttatttgtctagctatcgctattacatattaaaagaatcatagttatttccattaccattatcggaaaaaacattcatatttatctatttaattagttgttgctcctatatgtattaaaaaaaccattaattatttatatagtaatccctctacaatttttcgtggtgatggaaacatgatcaccctgtttgtatttttatcagcagtgatttatcatcagactctctttcacccttaggtttgctgaatttcagtggaaaatttgaactccaaacctctcctgtttaagctcccattggttgcccatttggccaaaatagcttatttggcttattagaaaattaaaattaatttgtaagtaaaacttttatagaactattcgtagcgacttaaaagccaacattaacaaaaaaaaattacgttaaaaatatttcaaaatcaaatttaaaaattcaaattttgacttattctttggctgtttaggccaaacaatatagctataacattgcgacgcacgggacgtatcagtactggtatcaaacaagcttttctaattttgtaactgatcttttactatagtagtttccagcgatcaaatgcaaatagccctcgaaaagaaagcagagacaaaacataataatcactcagaaaacccatccggagaggacgaacttgcaaacacagaactgtatgcctacccacgtactcctacggtcctacctactaccgtcaacttgagattttctccctgagaaaaactgattttaccgattccccccacgcacaacgcacgaaccttctcagctctcaccggtggatagatagatgatactcctcgcctcgccgcttgcctcccccattgcgctcccaccggcggccggagtcgtctcccaatccgacccaaggtggggaccaccctcctgctcggtgggcccgagcagcccggccaagtggccgccgaaacccgctataaatcccccacgctccaccagcctccgattccacagcctacctagcttctccttctcgctcgcttcgcccgcataagtctagccacaaacccgccgccgccgccgccgccgccgccgctagcttccgcggagcggggcgagatgttcatcgagagcttccgcgtggagagcccgcacgtgcggtacggcgcggcggagatcgagtcggactaccagtacgacacgacggagctggtgcacgagagccacgacggcgcctcccgctggatcgtccgccccaagtccgtccgctacaacttccggaccaccaccaccgtccccaagctcgggtacgcacccattaccctcgccgatcgatcgatctgtccaccgatcgctttcgatccggcgtccgtcctgttctcgttttcgttttcgtctcccgtttggtctccgtgtttttcctagctatagctagcgcccgatccagcgagatgtgggatggcaaaaggccaaagagggggactgcgagtctgcggcgccttttgttgccttgctgctcggccaccgtggaaatttgcctgtctctgggattcgatcccgtctgctcaaaacgacatttcttctgagttttttttatatccgctagtttttattattatggctttatcccatggctgcacctgcactgcatgtgaggtttccattaaaattttgcatctgcaagatcgagcagggggacctacctagtaccatatataccactggcaagaactcccaaatttatgactgtttattagcttcttttattagttcaccccatttgttttgtttttttttctgtccatgttggctacgtgccagcacacttgtcgatcatgtttcttgacccagttttatggctgtgggtgcagggtgatgctcgtggggtggggcggcaacaacggctcaacgctgacggctggggtcatcgccaacagggagtaagtgatcactcacgctctacttttctgcctaagctagcttcatctgttttttcttttctgaatttaactgatgatggtgtgagtttaatcaggggaatctcatgggcgaccaaggacaaggtgcagcaagccaactactatggctcactcacccaggcgtccaccatcagggtcgggagctacaacggggaggagatctacgcgcccttcaagagcctcctgcccatggtaatctgtcctgttttctttgacatgctaaccacggaaaagatggtagtagtaatacactgctaatgtgatagtagtagtgctagtacaatcataacatggccttggcctgttttaaaggccaaggttctaaatgaaaagaagaaactttgacttgtggtcatgtcctaaaaaagaaaaagataagtcctgtcacaaaagggtatcaaaagataagtcctgtcataaaagggtgtcaaaaggtgaccatcgtgtgtcacctttgtcatgttgtgatgatgcaagtcaaaatgttgtggtacaaccacaaggttccagcatctttggacaatgattgatctgttgaatacatccacaaatagttttcagatttgcagaacctgtttttccgttttctgatggttatgaaaaaaattcaggtgaaccctgatgaccttgtgttcgggggctgggacattagcaacatgaacctggctgatgctatgaccagggcaaaggtacttgacattgatctgcagaagcagctcagaccttacatggagtccatggtgcctctccccggcatctatgaccccgacttcatcgccgccaaccagggatcccgcgcgaacaatgtcatcaagggcaccaagaaggagcagatggagcagatcatcaaggacatcaggtatactggcatgcatggaattgagcccattttacttcataacaaaaaggaatagtattctgaattagttatgtctacgaggcatgaacactaggggcagaaataacggaataccttcaggcaccagcttataacagaaaatagtattcacatgatatggtgtcaaagcactaaatatatattggcactttcatatatcaaaagggctccccgaagagttatactactgaagtgaacttgtttcgtaagattagttccagtctgcattaagatggttggaacaacatgacaaacttgtgactatgaatgctgtaaacattagacatgatattttttttattacttaaatagggagttcaaggaaaagagcaaagtggacaaggtggtggtgttgtggactgcaaacactgaaaggtacagcaatgtctgtgttgggctcaatgacacaatggagaacctcctggcgtctgtggacaagaacgaggcggagatatcaccatcgacactgtatgccattgcctgcgtcatggagggtataccgttcattaacgggagtcctcagaacacctttgtgcctggtatgtaattttctgtgtagagtagtatgcggtttattttctcaggttcatggcttatttgtttactgtgtacagggctgatcgatcttgctattaagaacaactgcctgattggtggtgatgatttcaagagtggacagacaaagatgaagtctgtcttggttgatttcctagttggtgctggaataaaggtaccaaccatatatcaaatcctttggctagcttttcgcattgaaacgtcgatattcttccggaaacttttttttatatataacctgataagaactttggcttttgttttcgtagcccacctcaattgtcagctacaaccacttggggaataatgatggcatgaacctttccgcacctcaaacattccgatccaaggagatctccaagagcaatgtggtcgatgacatggtctcaagcaatgccatcctctatgagcttggcgagcatcctgatcatgttgttgtgatcaaggtttgcaatttgtccatggattcttctgcagcagtatgccattaaaaaaaaacttagttttggattaaaacttgtccatgtattcttctgcagtatgtgccgtatgttggagacagcaagagggcaatggacgagtacacctcagagatcttcatggggggtaagagcaccatcgttctgcacaacacctgtgaggactcactccttgccgcgccgatcattcttgatctggtgctccttgccgagctcagcaccaggattcagctgaaagccgagggggaggtaagagttctgatggactgagatcaattgactctctgctgctctgcaattgccaccctttttgccagcaaaattgactatgttgttgtttcacttgttatcctgtgcaggagaagttccattccttccatccagtggctaccatcctgagctacctcaccaaggcaccccttgtgagtgcatacatgcatctgtactgcccattaaccgttatgttctttcatgatataccaactgatttacttatgtcacgaaaaattcgtctcctggaacaagttcctccctgcacaccaatggtgaac

SEQ ID NO: 20363 - DNA, 40650 bp, Oryza sativa
ctgagcgttttattattttctcgccttgtaacataaccaattcccccttctctgttgtgtgctaaactgctaatccgcgaggcaaacaatgcaggaaactaggcatagcatcttgttgtgattttgtaaacaagatggtttatgcagaactgcactatatgcttcgttgctcgcgttattagccaactattatgcaacgaagaggagtagaggatggtgtgatcaaaactgaaaaccgcgggcagatggcgaaatttataggtgatgcccttaccgcatcaaactagattttctatcatacacctatatgagtatactcctatatcatcctcgtaagagcatctccaacagtctctccatcctactctccaagtcaaattttagccattctagcctaaaaacgtgctctaacagcctcttcaactggccaaaaccccctatccactagtcaaatttggccagccagaaatcactggccaaccatgggtcccacacagattcctcctcccctctccttcagctcggatgatgcaggcagccaagacctcgccaccgccgcgagcatcggcttccgtgcaccaggatggtacggcggagctcctcggcgcgggcgctaggccgccgccggcggcaaggagggggccgtggcggggttgttggggagccggcggcggagagcacgacggcgagcatcttgaacccacgctggagcgccaccatcgttgtcgaggtcgctagccgctgtcgccgtcgtctgcaccgtcgccagtcgtcctcgaggttgccgttgccgtcgtctggatccggcggcgaccgacctccgttgcctttgtccccaccggcgcgacgtggattcacgcggcctccgccgtcttgccgtcgccgccttgccattcgccgccgccaccatccccatccactgcggtagccgtcgtcgtttccatttgccagtgttgaggaagaggagagggagaaaatctagaggaagaggggaagaaagaggaaggagggataatagagactgacatatggatcccaatgtcataggctcagaatagagagtttagatggagaggttgttatagtcaacaatgagtttgaccgaccaaatcaattggttaactggctatatgggtatttagagagtctattttaattagtctgaagatgctctaacaaaattagaattttccaaacagacagacagcaaggcgaatcacatgagttccgcgagttcgtgcgtaacgtgtagagcgcgccttgacatctgtgttttcccctctgacgttcgtgcagataatcccgtgacgtgcggagcggagtatggcgtagcatctcggtgtgctccgcgcgctgcagccgtttcctccccgtcggatccgcccgcgccgtcgccgatgccgctgcctcctgcgcccggttgcctctgcggtttcccttctcttcagccctcgccacggtacgagacgtgacgtgcggagtagtacgtttacacgggcgtccgatcggtttattagacggatggtcttgcgagttgcgaccgttttgggcggtttgggccgtcgtgtctcgcggtggcccaagtcggcctgcgtaggtttcccattttgcatttcttttcttttctcggcgtggtgaaaaatctgatgttagttctgattttgcctgtcgttgtgcttgtgcagctccgtgctccgacgtacaacgcgcagcctccggaacctggtactactgcagttgacgcgcattgccttgctgaaaagaaagtggccctcagagagaatctggctggttaatgttgtgcagctccagtgctcccattatcgccaactcctgcgccggccacaccgccgtccccactgggatctcgatcgcctgtttcagcgccaaatagcaggactactttagagtttctttttagagaatggtattttttacccagcctatacatccaaccaagccctcaagcaacttaatctgaaattcgcttttatagagatatggactcaggaccataaaatactactcaggtcactgcaaccattaggttacatgcactttcgcaagctttattgcagagtatatatctagtgtacatgtatgactgccctttgctctctctctctcaatagggagaacaaaggcgtttcacgggcgcatttgtttctcatgtatagtattttcagcatcaatatagaagtgcatctcgcaacgcttactgcgtgatctgttggcgaatgtctgaatctgaatgtgatgtaagcgattcgacgaggcagcgtaagcagccactccactccagccgcgtttggcgtgcaccgcatttgggtcccgggcatggcttgaaaaggtctttggattccacttctcgtgccaatgtgcgcgcacggcttttttttttttctctcatgcaaaaaaaaaaaagctttccaaaagaccacacgatgtgtcaccaaacgtcagccctgtcacgatggattagacgagcatatactcgtttaatgtagctatagaactaacactgcccgtttgcagaaaaatagaaagagaggaaccatccaattgccagttaatataagaaaaaatctatacgtgttaaattttgttttattaaattcttattttgttttattaaattcttgctaacactacgtgtcatgctgtgagtatatttagtttttctataactacctgcacaattaaccatgcccgttttgttctgcagaaaaataaaaaaaaagttttgtgctgcagggaaaaaaaacagaggaaccatcaaactgggtttcagggctgcaggagaaaaaaaaacaatgtgaaagagaggagaaggtcagtcaatcagtggccgatcccaatcgaaagctttttgaaaagatgggctaaaatcaacccacatccacattccacaaagctagcgccgcggcctcatcattccaggcgcaccgccgctgccaccgcacgcacgcccgccacttcgctgtagtttatacgctcgccgtccccggctcatccccaatgcatgcatccatctgccaaagattttccaatcaatacattgccaatttgccatgccccgcgcgcgcgcgcgcgcgtgcgatcctccactagctacgcaccgtggcaaggcgccattttcatagacttcgctagggtgtgcgtgactttgtcagtgaggtcgccgcagtgtaaacgccaaccaaactcccactagcagagtagcagtccatcagcacataaacccttccattccaaccccaattagcactagatcgtcatcgctatcggctgcagcaaagaatggcaggagctgggaggactaggagcacggccatggcggcgtggtcgtactcgtcgctgctgctgcagctgctgcttctctcgatggtcgccgtactagacggcgcggcgacgaccggcggcggcggtgccggggcgccggcgccggcggcggactgcacggacgcgctgctgagcctggcgggttgcctgagctacgtgcaggaggggagcacggtggcgaagcccgacgcgccgtgctgctcggggctcaagggcgtggtaaaaaaggaggtggcctgcctctgccaggcgttccagggcagccagaacttcggcgtcacgctcaacatgaccaaggcgctccagctgcccgccgcgtgcaaggtcaagacgccgccgttcagcaagtgccaccgtgagtaaattaatttctgctcacaatttgatcttcttcttatcttcggggggaaaaaaaagaaaagaaaactgagtctccgtttcttcttgtttgtttatctgatgatgtggttcgtgcgctcttgcagtttctattccgggcgtgactggtggtgctcctggtaagttattgattgctcaattacaaagtcattattttttttcctgattacataaaagatactccctccgtttcaaaatatttgacaccgttgacttttagcacatgtttgaccattcgtcttattcaaaaacttttgtgaaatatgtaaaattatatgcctacataaaaatatatttaacaatgaattaaatgataggaaaataattaataattacttaaattttttaaataagacgaacggtcaaacctatgctaaaaagtcaacgacgtcaaacatttcgaaatggagggagtacatgcacacacatcgttacacacgcgcactgcacgtacctgtctagcctgcaaatgcataacgcgtgttcaagaggatttagatttttgaataaaattggcatgggttttgatgtgttgggaaaaaaaaggtagagcgataaattgcttctgcatgttataaataattgtttttacagagtataattattctgaaaagtaacattacaaaatatgcttttaaataactctttcaaaaaaaggaaatattacacatgcttaaaaaatatttacaaacaaagcttttaaccgtttgatttaactgtaaaataattacagaaaatctcaattaactcacagtttgtaaagctttgtacctatagccttttcaattcaaaaagaaagaaataccttctgaaaacagtcaaacaccgacaaaatggatcagttaacttggcgtccttccattccattaattccagctcccgctccattctccggggctccgttcttcggggggtcgtcgccttcggcatcgcctgctgggacaggaagcgactccgccgccgccaccgtaagagctccggccccatcgccgtcggctgctgtccggcccaaggagacaaaggcggccttgttctctgccgctgtaatcgccgccgctactctgctcgcgcaccgtgcctagttaggctttggcctgcacgggtccatccaacgagcgtgtcgttgcagttgttgacttgtgtgtttgcatatgtaccgagatgtatcttgtgagagtttttccctccatattactacacacttaaaccagcattttttacgttcatgacaaaggttctcacagatcatcaatcttttttagttgcattctcagttttacgacgtgatgcgtaagatcgataaggcctagaacgatcaaagtaaactagtaattgttgttgttttagtgaactagtgatgctggcctaagccctaaagcactagtttgggcccacctccttttgttctctcaaattgattgagcccatccatagtttgggtgtgtcagtttgctttatttcggaggccaagatttatatggaccttacccaagccagtgtcatctccctcccaacaccctgtatgaaaccaaacaaaactagcccgtagtcacacaaacacagctgcttcactcgagacagagaagcgcaatcgcaacttacttagtagctgcgatcatggccacgaggaacatacagcttatcatatgtacacgtgaggttgggggtacctcacatggaatgctcatggacattcgccagcaaacgcagctctggcaaaatctaggagctgcattcacttaagccaaaaagaggcttatagtttaaacttcagatttccgaacaacggatacaacaactgttacatcatccagcttgcccccagagtaacccagatacccaactgcaagagccgcgtcagagaaggggcttctacaggttgccgatctgcccacttccttcgccctagcaaccaggaactccgcaatctcctgtgattttatgcaaaatgatcatgtaaggacacttcacggacagttctatatgagatgggtgagtcttctctagtattttcagaagaaaagtgttaggatctaaccgaaggcttgaggccggcttccaatgatttggagatgacagctgctatttcttcctcatagacattgtcaaaaaggccatctgttgctgtcacaatggcatctccttcttgtagatcaattgtgtatttctgccagcaaagagggacaaaataagttttaagttcatatgaactttatacgaggaaccaatgatagcagggcaaggatgacagggtaagtgctgtggcacctgtacaagtttgaaaggatcatcccccttctcaatttgcaagggaaaattgaagccgtaagtcattggctttgatttttgatatatttctccgtttcttatcaccaagaatccagaatcacctatattacatgcatgaagtacctgtgaaaccaatgagttcacaattaatcaccattcgccaacagtgaaagaaaagagaaatgggcatccaagacatctacgaacatacttgaccatcaaagtgagcaaccaaaacagtggaagaaccaggggatcgtgcttcatctgcagccttagcaagaacttcctcagttctcatctctggagctccttgactctccataacagcttcttacaaccatccattaattctctggcatacagccctgcattgattcctgaggacggaagtcaaatcaacaaatgtaagtggccatattccaaaggatagcaagaatggtgagaaatggaatccacacttaatgtgaaattaggtgaagatagaaatattatccataattctcttcaaatcctccaatagtacatactaacaaactggcttacagactggagcaccctatatactatgtgatatacgagctgtactagagcagaaaataatattttgctgtacacaatgattctttagcagtgccttgtgcccccctgaaattcagttcagtgcctcatttacttagattccatagtttctcagtctcccctacataattttcctattcccctttctgctcgagggtaagttttatgacatttgggactaataactggactatggcatattttagcaacatgatttagtcctatttccatgtgtattacctattattccacaattttgtttggttttacatgttaagatgttgttcatttacactcaattgagctagcaacagatagagtgacaatttaaaaatcacaacaaagcaaataccataataaaatgatgaataaaaatgatgtagagtgcgatattgaaaactatagtagttctatttatcatttgtctttgccttaaacatcagaaaagaaaaaaaaacaaaaggaatgcagccatcattttttaggttgatagtcactgtcagtctctattaaatgtgatctcgcttcccactttacctggaattcttataacttgtctgaattttggagccttacagtagtaatcgaaaataggcacgtcctttatagttatgccactatgaacctaatctcaacatttcgcaatttctaagtctaatttggtgtgcaaatattctgcatcccatggagattaattatgccattagtattggtcaccaaaaaaactcaggagttcaacacatctgcaacgacgaggttacacaacaaatagtagttgagaaagaagaattggtttaccttcaaatgaccattgacctactccatctgctacaccaaaccaaccgtcacaagctataaaataagcatcttcaccacctgtcagcacctggaatattatgcagataacattgtcaaaatgactgaagaaaaatgcgaggttatctcgatggtaatacaacttaacatattcaacaaatcaaatacacgtggacggttacttcaggtataaaaccagatatcaaaaagttgcacaaagaattcaaccgatcaaaatacatgggatacttgggctaaatgttgatgaattatattagtttcaacacttgtttggatagaggctatacctttgtactttcacgtaaaggggtttcggacaagcagatagaacgctataattgtgtgtttgcttcaaaagcttatgttgatgtttctatctttacttctaaggtttaaggaatatgaaaactatagatcacatatagactgggaaaggagcaagaaataaaccagaagcgagataatagtgtttattattcttgtaaaatatttggaaatagcgtggagtggaatgaactttatcagcatgaaagtaaagcttatttcatctctatacaaaaaatacacaaacccattcaagtgaaaaatcaagatagtggtaccatcattctgaagtgcattttttatttgaaggacatagtaaatatattttacagacaagggtcagagaaaaaccataatacctttgaaggatgaggtagcattgctgcacctgaagccaatataagtgttggtagggttactgaagacatcctacataagaattaagcataaaaaatgaatatgcgatctctttgaatctctgcaggttcaaaaggaaaatgataaaaccatgtggaacatccaactttaaaagcaaacaaattacaccagaggcttcagttcaataactttatattcattcaaaaggatcaagctgagtcaaaaccttaaactctaaaatgctaaaagcaatagagctaagtagtacctgtcagagctcttcacctctgaactcttgtttcccctggccacttcacagatcgcttgttcctacaaaggggaagaacaaacatctgagcagaagaaaataacattaccatggtatattcttattcatatgacagcaaaagctccccgaaagttactgcagcctgcggcctataaatttctatgaacagggtcacttccaaattgtgcattgatatcacacaaaatctgagtctcttgagttagttgaacaaacacgcctttcagaaaaagtgatatatgaccgtatcatgaaaggataaccaaataactaacaaggtactgaatactgatatgaagtgtgaaaataaatgtagagcactcaataaaagcatataattgcaagaaaaaaatgactcactaggatgaggtatctaattttcagacgctgtatctttgtattaaaactaaactgattcatataaactgcaaacctgagttacaaacatacagcatcaacttactgatattaagcatagccacgttcacaactatctaggtcatgagtttgcagaaaaagaaataccgtgtgtgggatgtgcactccgtatcccatgtcttgttcttctatacttgaaccgctcgactccgtctccacgtcagtatcaaaatcctgcgtggttgagccgtctgaagcctcagagtcatccaaactcgtctccatcctgtccacaccttcctcaacctgcgtgatggagccaacagacgccacacacggctccagggctgtttccatcccgtccacaccttcttcagacaagacgccagtcacctttgagctcttctcggcgccgcctccatcaacgctcgacaccaattccccttcaccaaggccatttcgaccgtccgcatccgagccacgctccgactcgacaccgacctcagaacttgcatccctattagatgaccctacaacaacaccgggcataacctcttgttcacatcctcgggtatcactggtctctggcagggactccaacatgagaggggagccaccaatagccccagcagtatccaaatttgaactagcctctgacggcgacacctcaacgggtgaaatctcattgattgcaccagcttcatcggaacctgaagtaccacgatgcaacagctgctgctcatggattccgactgccggagaacctaatctcacatccagggcaccctgctcagccaatttgagctcagcgccatcctcagagcacaaaacccccggtccttccggcgcctctccactcaccacgacagcgccggcgtcctcaaaacacggacatccaggcacctgctcgataccctctgcatccaaaccaacaccaaaccaaaccaacaccaaatcaaatcgagaaccaaaaccgaaggagattaagcaagcatgaatgccccttacccacacctgtaggggagcagaggcagagctcggcggcagcgccacaggaagcagccggcgcgcggggcggcgctggggagcatccggcggcgcgcgcctcttcatccatggctaagctagagcctgagtcgaggggatcgagggctttggatcagcacccagcgagagagcgagcgagcgagctagggatcgcgagatggaggtgggggaggacgggaggagaggttaatgggggaggggaggaggcttgtgtgggaggttttgaggtgttggggggcagcgccgcgggcttccgcggctcggcggcggcgacgttttctctcgccctggcggtgcgcggtggggtgggggttttccgcgcggttttttttttatggaatttttttttccgtgtccgctttggtctttgtcggttttaggacaaagggcctcccagaagtttgtatttggcgggtaggagtcagtctctttttactctctttggccgccccacgtgtaaaccggcgtgaccgttggtggcttcccggttgtttatttgttggttcattattttttacgacttgggctgttaattaaatgatcgtactacaattaaagcaaaagatatacttcctccataaaaaaagaatatgtccaaatttattgtactacactatgtcatatcttgatacgatgttggttttttctgggacggaatgagcattcctttcatctaacttcatttctatcatatgccattgttcataaataagttaacatgcttttttaatatgagaaaaggggaaggtcttgccagacctttctgtttcataaaagatttctcttagtctatctcagtccataaattgacaaattttattcttccatatctcttacatatccaaccattcaccaatactacatctccattaataagatgtacttttttgtctttttgtttcattttaatttagtgctcctatgattaaaagttattttagacagaagaagtaattaactgatacagtgatcgatatagtatgtttaaatattcaaaagttagcaatgagttattttttcaagttagtaaatagaaaaaaaaataaatgaattggctcgtagttgttgtgaggaaaagttctttatatggcactatggtagattagaaatgtgtttattcaaatatctctcatgcattccgagggtcaaaactctcatcgtttcagccatcctcgaacacacaacaacacaaatgtcacacgagtaaaccttgtatacttcctccgtcccaaaaaaaacctaacctcgtaccacgacgtaacacattctaatataatgaatctgtacatactctatgtccagattcatttttctggaacgcagggagtacctttcaaaacaaaacagaaagtaaaccttctgtaatcaccaagggacaggcatctaagtctaatacacaatcttcccgcgggcaaaactgcaaaaaggagtaggagccgttgatcagtcgtcgctagtttcggtctgcggataattttgtggatatcaaaaccggcaaagtcgggtagggtcgccacatgggttcgtgcgtacaagtccacactttccgcaaactatcaatcgatccacaccctccacgtgtcgtccccgtcgtccggacgtgtcaccgccatccccagctaacgggaggatgcgccgggcccacctgacagtctcgctgaggccaccccgtgaccaaccatgccaccgagctgctgcaagtgggtttcccgcgagtggatcggatccgatcgccacggctgcgtgattagcgagacagggaggcttatctgtttctctcctccggataaggccctcaattattaaaaaaaaacaaaacttattcctaagttcatcgattggttgattaatgagaaatcatgagtgtgtttttaattagtattggttggataccgtatcataggtctgcggtattcaataccgggagggattgatctgcactgttctctgcttgacggatacgttccaggcaatcattgatgctttcttcccattcttttcagttcagctaaatttaacttgttgttggctactcataactcacctactgttctgttcatctaattaatcgctctcttggtagatgttgaaacgaacaaacttcaacattggacatattctatgagctaagttagctgaatctgaatatcatagtagcatgtactgtttaaagaaggcaagtacagtgattaggcaacaaagtttttggatgaagtgatgaacacaggattggatattgtactctattgttaggtcggatatagatatccttggggcgaactgagaaagactagctagcggatcagagtaggaaaggcttgtctctctgaaagagaatttaatcctgaatttggtttccgggagacatgacatgcctcactgcgaacctcatcttcctgtcagaatcaagaagaggatcgcaaccacaaaagaaaaaggaattttccattctcgcgtcggctcgagcacgcggcgaactgaaaatttcttctctgcaagtaatcaagttgcatgtgctatcttagcttctggaacagcccgatcagctccatttcttggccataccatcgccatagtcagaaattcagaaacagctgcgtgcaatgcaacaagatgtttttgcggtttctgcctgaacaagaacaaggtgtgatgcaattatgcaaaccacagaaccagctgcagcggaattcggaaaacgtcatgccatatgtatatacgagatgtaatcaatgcagatagatattaggttgccgtcattgcatcaatcaactgctatgatcgatcgatatgagagttgcactggacagataacgtaaaagattctgatgcaagttgtgtgtgtggtacaggctgcagatgagggataggatggccgaacctgctttcactgttccatgatgttgccgacttttaattctgtccttaattctttttcagcttgattccgcagcatgcggctgcaggtgcgcaaaccatgctcgccacagcctcccactagcgaattagcgatcgattggcgattgttcttcttcttctgaaaggagacaaaacctgtgttgctccactcacagattccctgcccattggtgtgcccaaatgggatcgctgctttgttgcaacctgaaaaagaatactcgtctcttggaagattcactgttctatcacatgtccatgtgatggtgcatacattgtcctggagctgaaagtttttctttaatggtgactttacgtagatgagatttattatatatttatatcttgactaactcggatcttggcttgacatctacgtgcgcggcgcccgttgctttggcgtgagaaagatgcctttgttctgtgaaaattctggtggcaggaacaagaacctgtaagtctgtaacggccgctgcttttatcctggttgcaagttgcacgaatatttggtctgcaaagttaatttgttcgcctgtacatcggaataaaatgcagtttacaggagattggaatggagagtttgttgatcggtttggaaggaagatgtaaaatgcaaagttgaaaacgtcattagactatacttctgtctgaagacgcagaaataattaatttggtgctgtctttctgcgaatttgaatctgactacctgggagaagcatactacgcaagaagtttctgaattaactttgcctcccttgaccaaaggcggacgaaaagaaaggtcaaaataacactccgaaaattgacgagcagagataaatttcagcagcagcttaagcgtgactttggatagtttctgtgtcggtggccggcacgagatgatggactccgacaacctatctcttacgatgccaccggccaccccagtgaagcaggaaagataattctaacactgaactattactggcttgagatcgaagccagaatatcccagctgcctcttgtcttaagaaatcaggacaacacagtgtttatgtttcttgcatctgatcccttgctccaatgcttgagcatgagtctcggctttcccttctcttttcctaaccacccaagggccagtaagagtgcaagtatctaatcgatggcctagcacggtactcctcggtaggtttgccatggcacaagaccggaatcaacaagccatgtcgctactggcccgtggcacatgctgtcggcgtctctctcttggacgcagatgcctcctgcccaatatctgcgcagatctaggagcagcagaagcatccattccttcccatctgaatcgattcctctccgattctcatgttgccttccattgcaggtacactgaaacacaaaccaaagcggccgcggtgccggtgcacacgcgcggcaacggatcggggagagattgcgtgtaaatccgtaggcaaactcgcgcacaccgacaggcgcgcgtcgcggagtcgcggttaaccgaggcgcatcgcggaggagtcgcgtgaccggtgacaacctaactgcttattagccactccttagccaaatggcgtcgcttctcctgtccgcgtccggtatcttggcgaaaatcatgtacaagcgcggcgtcctggtcgaccgaggctgtcgagatgtggcctgccctggccaggccaatcggttagccaacgaaaacttgtgacctcagagctgcgacgtggaagcgatcgagtcatgcgcaagcaagcaacgtcccaacgcgacggtgagatcagatttttttgcgatgcgcaacgcaatgctgtcgtgaacttgatgtgttcgagaccacacaaaattttactagtagcagactcggatgccacagttgggccggtatgtattaaaaaggaagcccactagtatgtaagcccattaacgcgcaggccttacggcccggtatgtgaagtgggcccggcccgtattcacttttacgaaaagcaccttggagaggaacgaaatggcaagcccactcttctcgctggtgtcgaggagattccccaaaaacttggcccccatttctttcgcatcgtcgtctcgccttgccccgtccactaaccctagcggcaactgcgatctccaaccgctcgatctctcgccggaggctccagatctgcgggaggtagtcgacctcgtcgccggcggtggggtttccgaatcgggggcgaagatgacggaggcgtgggtgcggcacaagcccgggatggcgagcgtcaaggacatgccggtgctgcaggacgggccgccgccgggcggcttcgcgcccgtgcgctacgcgcgccggatccccaccaaggggcccagcgccatcgccatcttcctcactaccttcggcgccttcgcctgggggatgtaccaggttggccaggggaacaaggtccgccggtaagttcgccttgcgcatccatgtttatgttaaactgcaattcgttttactgtgtctgtttagccgcgaattccgttggtatgggacacccgccaaaaatcatgccttccagagctgcttcttgttatctatattctacgctacttcgaatgaattgttgcagccggcgatttggtctgagaaaaaccttttacacgaagtacggtaatggaggtggaaatgcaacatacaaagaatttagcaagaactagagttgtagtagttgtatcacacactgaatggatgaagttgctgcattttctcaaaaaaagaaataactgcgttaatgatacactactattcagcaccttatctgattagttaatctgaaggaaatctgattcttgctgcccttccgtacttgtctgtctccgcataagttcagaatcaagtagctaacccgagaccgatcggagtcctatgagcaaagatattgcaaaattgggaatccagtgaactctgcacaacagtttgcttagaatgggtcccaactaattattgatctcgaatttaggaattaaatcattagattagtaaaatgagagtccaaggttgatacagcttcattttttgttaatttcgaatttaggaaaaaccttaggatatctaaaactaaagattccattgtagtaaaaactaaagaatctataatattttcaatagcatatttttaactcgaacttttaatacaatctatggttgtgataattcaatccaactaaccaatggccagctctatctggttaacgtgggagtcccctcagagtgcccaattagtataggtatagtcttgtatgtagactgtctaggacagttggatgttactattcgtatgcatgtattacaattctactcctttagtaacccctttgatgatgtgagatcttccacatatttatgttaattttatcagttcctatactttgtgaccatttcagtatttttagcatggattctaggatttttgtgctctgtgctccactcttcagtattcagttccaggagaaattttcattaatgtgacagtgtgggtgaaccataactttttgttgtcatcgttgagctagttatatgcagatttgattgcagtggcaatggcatcatctgagttccgttgccttatttattcaatttagtgatcctgagacatttgttaggtcacagtataactttggactggttagattaattgtgaaagtaatccttaatcaaggtgcagcacctaatgatatcatcctccttttatctaaatgtttttttttattaatgaccatacacattaaaaaacaagtgtgttgattcctgctatgctttcctgttatgttgtttgttacaagtaggcctgtagctctgatgagtatcttgccaaaccatgctgtttacattccccaccctcccagtttatgacaaaattgcttgctcatgtttgtcttctggtgcagttcatgttgttttttgttgcattttatatttgtcaattgtctcatcgactgtgctattgtttttgtagtgcactcaaagaggagaaaattgctgcccgcaccgctttagtgccagtgctccaagctgaagaagatgaaaggtacagctcaacaattgatgccatactctatatttttcccacaacatcctcagtttcatcttacgcataagatccatggtacttccttagatttgtcaaagagtggacaaagtctcttatgtgggaggaaataattatgaaagatgtccctggatggaaggtcggccaaagtgtctataattccgggaaatggatgcctcctgccaccggcgagctgcgtcgtgaagattgatgaaatccaaggggcttgccgcagcctaccaaagatgccatcatgtcttttgggcatgcataaggcttttgaaccagaatacccaaaaaaaattgctacgaggaactcactcttaaagcactcgctgtgcatttgttgtgttgatgaaatcttggctaataattggacatgtcaaacagacatttgtttcacatgaactatgctcttttgtggacggaacatctgttttgccctgatgttctcccttctctatgttttatttttttctactctgtactaagcacttcttggtcagtgctttaccttactgtaaacattcgaatgtattcagtctttttagacaaagacacaggaggaacattcaatgtcaagcgcttggatcggatgggtatattaccgagatagtgaacggaaaactcaagaagtcagaatcaagcccgtgatcagatagggagagccaaaacagtgtcactgcgtactagagataaatgaacaagcaaaaggcaactcaagaagtcagaatcaagcacgtgatcagatagagagagccaaagagccaaaacagcgccactgcatgcgtacaggagataaatgaacaagcaaaaggcgaccgataatatgtattccattcgttttataatgtaagactttttagccttgcccacatacatatagatgttaatgaatctattttataatgtaagactttttagccttgcccacatacatatagatgttaatgaatctaaacacatgtatatgtctaaattcattaacatctaaatgaatgtgtgtaatgctagaaagttttatattgtgatacggaggaagtatcacattttgacagtttgattttgtactgtactaggtttgatgaagattggaatgcgaagattgctttgagaaaggcccattgtacggacctcagaacacctagctgaactagcctgggctttattgtttcggccttgatgggctgggctccttctgtgttgacttcccggtagaactggaatcggaatcagagcggaaaaaaagaaagaagaaagaggcagatcagatgacctgacctccgattcggctgatcggagcccaggccccggccaagtttgccctcgtttagttttcaatttttatttaaactttcaacttttccatcacattaaaatttttctacacacgtaaatttctattttttttaaaaactttcaattttaacgtttgtcgagctcgccgtcgacccccctcgtccgcgccgcaggctattcttcctcggtgcaggatggacaggtgataatgacaacagaaaatggcgttcgtgctgcgcctagactcccctagctctgcgcctggcgcaccgttgcgttgagggaggcgttgagccgttgactcgccgctgctctcatgctgtgtttagttgctgaaaaaaattgaaagtttgagaaaaattggtagtttgaaaaaaaatttagaagtttatgtgtgtaggaaagttttggatgttatgtgatgtgatagaaagctggaagttaggggtgaagtaaacacgacctcagtgctcgttaacgtcaccccgattctgatctttgcatggctagctgcatgcggcttctgttggctccgtgacctgtgttgagccgataccctacccaacatttactgcatgatggcactgtaaaagtcacaggcagcagcacaggatccgaagacagtttgcagatgcatgcaagccgagttgatcgtggccatggatggcaatttgcaagggaaagggagcgataaaacaagtgatcggaggtgccagccgtctggccatggctgagcctgagtcctagtaactgacaggagctgcgcggcagtagtacagttaatactgcggcacatttattaatctgacgagacgtcttggcttctcgtgtgcctctgccatgtatcgatcctggccggctggccgctggccgggccttgttgcttcctttcctccgaaacgtttccacagtctactctacagtataattgtggaggtgtgtcatgagaaatggctgcagcagataagacgtcactgagctcattgtgcagattaaaagcttcaggggtgtttagatcgtgttgttaagttttagcgcgtcacatcggatattatatagggtattatatagggtattcggacactaataaaaactaattacagaattcgtcggtaaaccgcgagatgaatttattaagcctaattaatctatcattagcaaatatttactgtagcaccacattgccaaatcatagagcaattaggcttaaaagattcgtctcacaaattagttataatctgtgtaattatttatttattagcctatatttaatacttcatgcagatattcaaacgttcgatgtgatatggtgtaaaattttatgattgaatccaaacaagcccttattagtagccgtagcagcctttcctctctcttttttctttcgctgggtcttctgcttcttctgtgcagttgttccatttggtgatttactgcattagtaacattattacagcagctggcgcggcaaagtccaaaagcgtgagtccatgaggcagtgctacgaaccaacgattgccccatgcagccatgctgcttcaggcttccgctttttacgtgagtactcccatttcgtcgtccttgctgcaactgctagatcatcggacaaacagacctgcgcctgctggtcatgatggattcatggatgtgattgcgcgaatgatggctagaatgtggtgagcaagtctaacagcacagtgcgcacacacacacgttggatttagatttgctaggtgtattttgaacatactcctaagttgatactgatagtactcctaagttacatgtacatcacccggtctgagcatcaatacaagaaggatggtacagtaattgatctggtgagttcagagcgacatgtgggtcaggcttggtcgcaatcaggcagctaaagcattgcattggttgggtgtggccatgaaaattgatgtcgacgtagtactacatgtaggactactgtttactcagtggaaatgctctgcatcaatagaacaggggcaaaggcaatatgctggtactcgctctggctagctgtgccttctactccatcacagtagacatgaacctatcgacccagcccatgttcagccctggcctacgctgatagatggagagtatttgcttgagcgacccaactacttcgtccctcttgtgttctgcttctgaattgctgcatggcgacatggcataatccgtgcaagtttggaacggtacatctagcgcaatgcatgatatagggactaaacataccgtcggtacgttgccttacgctaacaaaccgaatgcataagggacacacttcaaccctcgactctccaggaaatggtcagattgatcaaaccttattgaagcagaggagcagaatcttcagagcattcattgtgaagagcaacacgtaagaatgggcaaactgtatactgctcgtcaccctacatcgtttttcatgaattaatatcaagaacagaagggatgccaggattgcgcgcttcatttctttttattcactagcatttgtagcaccgcagtgtagtggagtagagtaaggagtacctacaagctactgattactctgatcttaaataccctgttcctagctacatgcatgaccatcggggatgagataatagcatttgtagcacgcagtaatattaagcatttttaagattcagaacatgtgctctttttctattttaagtatatagcgttgttaacttttgaacatagtgtatgaccatccatattatttaaaaatttagtgtaaatatgaaaaagaaagatgagtcatacataaaataccgtcactaataaaataaggcataacaaaactagtaacacgtgtacatagttctttacgagacaaatagtcaacattagccgtttaaatagaggtagtatataatataaatatttccatagtactatttatctcataaataaaactttgactgacaataacttttaaaatatttagaatgaagaaactatacttcaaaagtattgccttcgtcctattcttttagggacggagggagtactttaataaaattaaatatttacgtaaattttaatatgttacaatagaaaatcatagtaaaaatatgttttggatatgtgttgttgtccaaaacatcaggaattatagaagcggagtatgattttctttttcctctcttcaatgcacttatatacacattcatagaggaaaaaaaatgtaatgccgcctcattttctccattctggagtgtcagtagcaatgaaataatttgacgcataaatgtattacctgatcatcacgttttcaaaccgataaacgatatgcttttttttaaaaaaatatatactatacaaaggtttctttaaaaatcaaataaacaccacttaaaatttataatagttaataattaattgattatatagtttcgtgtatggcaaaaatgcaaaagctaaatgaggtatcaaacaaccctttatactcctacagtacatgtctcgtagtaccactgtagctactgtcatgtttttgaatttttaaagaaaaagaagacaataaataccagtactagatttttatacttgctgcgatgaggtacatttctgagctggtgctatatatacgtctgttgcagacttgcagtgtttacactttacagtggcgcatgcatggagaggagagacactgtttggtcttgacggccattgatgcagctgatgctcgctgtctgatgagtgtctgaatagtgtcttccattgggtgtctagactagagtctggaactctggatatgtgcatgctaatatagcaaaatgccaggaatgaatgcaagaaacttttcgccttattatttttatttgtaaagtactctctccgtcccaaaaagaatcaacctaaaacctctcacagtgcacctacatggaccggtgctccaccttgctagcgaggattttcgcttacgtggcagaaggaatcgcaccctagcagaggatctcgcacccatggagggcgacgcgaaacctcgttcttgcgagtccatgggcggagaagaaaacggctagcgctcgcactgtggagggcgtggcttcgatgcgccgtgtcctcttgcgaagaaatccctggtttgcccacgaaaactcccctcccgccacagccattcctcccctcccgccacaggcaagaaaatcttcggattcaacaagaaacacacattggattcaaacagaaatatctcacagatcggattgaaagaggagaatcgtttataggttaaacaacgagaaattgaagaaataaaaatcaatagaaaaactaacagatcgaggcgtatgtccaccacaagatgaaaaagaaaaaagaagccgacgccggtagtggtggccgacgcagccgcagccaagaaggtgccgccgccgccaagaacccgctgccgcccaccggatccactcccccacctcctcctcctcgccgccaccgcgtgcactgtggaagaccgcgccgcccactgttgcttgggaggagaggagaaggaggcacggcagcatgggaggcgaggaggcgcaggaggtgaggaggcgcggcggcgcgggaggcgaggagcgacgactgaggtggagtgggaggagccgagctcgtgaccgggaggaggaggaagggtaggtgaaggaaatttatttccttgtggtcatgcgccgagtcacgcgcgttgtggcactctttgccttgtacggtgccttgatccaactaggtcacacaaaataggatccttgcattgtgagaacgagtgtctttgagtcttttttagggctaagctacgggagctggtgcttgcactgtgaatggcctaaaaggatatgcgacccgttctaggacaatgcatttggatgtgacccctcttaagttgattatttttaggacaaagagagtactctgtctcttttcttttttatgatattggtcaattcaaaaatgaactagcaatggagagagtagatcgttagtgtgaaactaacctgggaccgggtttattaaggcctggtttagttctccaatttttttccccaaaaacatcacatcgaatttttggacacatgtatggagcattaaatatagattttaaaaaaacctaattatacagttagaggaaaatcacgagacgaatcttttgagcataattagaccatgattagccataagcgctacagtaacccacatatgctaatgacggattaattaggctcaaaagattcgtctcacggtttccaagcgagttatgaaattagttttttcattcgtgtctgaaaaccctttcgacatcagatcaaacgtccgatataacacccaaaaatttttcttttcgcgaactaaacaagtcctaaaagccaaaaactcaacccactagacactgttacaggagcactgctggtagagtaaaatactgcgagcaatgtcacttcaaactgaactaaggaggtcaaagtgttcaaacttaatcatggctccataattcacgagattctaatcagaccaaaactttcttctgctactgcgaccacttgatagcctgattattgtcctggcaaggcatgcctgcgtgtgtgcgtgcaattggtgggtgacacgaaacgattggttcgaacaagattatcgaaaagctgcaggttagtgccgtttcccatcccatcaaatcagatccaaggacaccgctatcctattcctcccctcggctcggccggctagtttccaaaagctgcaatccagaggctcctatataaggccttgttagttggcaaaaaattttgcgctacatgtcacattgtatatatggacacatatacaaatttcaccaagaaactacgagacgaatttattaagactaattaatcaatcattagcaaatgtttactatagcaccacatgttaaatcatggcacaattaggcttaaaagattcgtctcgcaatttcctggcgaactgtgtaattgatttttttctacatttaatactccatgcatatgtctaaatattcgatataacagggtgaaaagtttctgcgtgggaactaaacagggcctaagtaagatttcaaaatttttaactttggtttaaaaactttcaagctaagatttgaaaactttaaactcagttttgaaatttttagttaaaaggttttaggttttaagttgaatgttttcaaattttgatgtgaaaagtttgaattttgagttaaaaattttcaaaatttgagttgtcgttttcagattaactcgaaagttttcaagatctgagttaaatgttttcaaattttgagttggaagttttcaaatcttgaggtgaaaatttcaaattgacttgaacgtttttaaaatataagttaaaaattttcaaatttcggttacaagttttaaatgtcaaaagtccaaaccgtgcaaaaaaaaaaagcaatgtgctaatcgaatttaattacgtgaatcattaatgaagcggtaatagaaaaaaaaacggtacgatttcgttttccactacatccaaccatcggaccgttcgctgacgcgagctatgttttcgacgcttacacacgtattaggattctcgccacaatcttggtccctgaccccgtcgcaactcacgcaccttaagggcgtttacaaattacaatgtatctacgcgacgttcagtcttagaggaagaaacggcatattcggtgccacgtctccacatgcaagtgagaaccgagtagccaaagttggtcacctgttcttgggctaaaaagcgcacagacgcagctgagaagaggagagagagagagagtgggaaaagcagcataagcaaaagcacagctgcccgacgccgtcgccgctcgggccacggcgcagaggttgaaggagaaagggagaggcgccgagatccgagcgttggcgcgccggcttggggaggatggccgcctctccgcccggccgccccgcgccgccgccacctcctcctagggaggagaccggacggggagaggaaggggccgcgtcgccgccttcggccccaacgaggagaggtggaggcgtggagctcggtgtcggcttggggaggagcttcgtctgcccgggagagagtggtgggaaagtgtgagaggagagagagggagagataaaagtgagcggagagagataggtgagacccactccaagcaacatgtattatggagtatgtagctaatatggttctttagcctagttagaagcccatgcgctgtattttgtacgatacactgtgagtgctctaacaccacacaattgggaggggggatgggggacaaactaggtcgactcaactcattaacaagctagcaaaaggttagcttggcttaacttatgagctgctcattaacaatctcatttatatcatactaaactattttatcatatattaacataataacacttaatggtaattaataatcactaagtatataaagatatggtgatatcttatactaacgagctagctcgttaagcttatggacgcaatagggatcctggatattctatggaataccaaaaaaatctgcaaaatttaatatatgtcgatcaattatatgtctatgtacttaattggacataatacttcattatcgacttctattttcacaacaaattcactccttctatggtcttagctcatgccacttctatcttgatagccaattgtctcaaatctccaaactttagctcactaaacatcaatgatatgacatttgtaattgttgattaaatactcacactttggtggcgaaaaaaaaacctcaccttctatcactagggcgttgtttggtttcatgggctaattattagcctccatcttttagcctgaatatgaaaggtgagggtttttttcgccaccaaagtgtgcccccaaaaatccaaaaaggtgggctaatttgtggctaaagtgaattagccaccatcaaaacattagcccctccaaggggtgctaatgagactaattttgtgtggggaccattaaaaagcagctctctctctcttactctttctccaccttttggtcttgaattagtcaatggatccaaacatgccaacttagactaatatttagcctactaattaatgactaaacattaactctcaaaattagctctgggctaatcttccaaacatagcctagctcagcttgaccaagttctagcttagagctttttatccatccctccacacctccgcaccggcctgagctgcactacacaacacggtgccctccccaaccgctcccccgatcgcatgccgcgttcgacgctcgacgacccaactaaccaacaagcggagaccccgcggcacaagcgcaactgcacaagaccgcaccggaacacaagacctcaccggacaccgcgcacttattgcgcaaacagtgcgtgcatggatggagcgatgtcgctgacgcccgctcggctctcttctctcttgcagtcgcatgcagcctcgcacgcacagcctataccctctgctgtccgcacccgtttttctactggatttttctctgcgtcctctgccctcgattgctggcgttgctagatgcactgcacatgagcacatcctaaaatcacaactgcagatgagctcatgagcacatcctataaaatcacaagtagtactacacgggaatggaggagtaatgaataaatgtacagagaaggagggtgcgtgctgtaaatactcgagatgggcgcttggtacttgcatgtttccattcccattccaattccaaccatatctcctctactactcctactcgagtactagtactaaaacctgtgggcccaactagccaccggcgctaccggtcaggagtgatataagccgctgcgagtgtggtcatcagtggtgagagtgtgagagctagaggccaaatggaggcgacggtggaagggaggaaggtggtgggcagggcggaggcgagcccggagcggggccggccggcgtacgcgccgccggtgaggtcggcgccggcgaggccgatgaggaaggtgcagatcatctactacctctgcaggaacgggcagctcgagcacccgcacttcatggagctggctcagcatcctcaccagccacttcgcctcaaaggtgcacatctgaacatccctgcatcttgttgtatctgcatgctaaatgcatatggtgcttagtttagttaaatcttctatggtgatcaccggttctgattcttttctctttttctttggcggtgtgcgtgcctgaagatgtgatggataggctcacgctgcttaggggaaaaggcatgcctgctctcttctcatggtcttgcaagaggtacctaactgaaaactgcggtcattcatgcatgcttcccacttgtttctctatcttttagtagtacaacacttacttgagcttgatgtagtagtaacattgctgctcatttgtgtgcaaacatgaaggaactacaagaacgggtatgtgtggaacgatctatctgagaacgatgtgatctacccgtcggacggcgtggagtacgttctcaagggctccgaaatcttccctggctgttcttccggtatgtactcatcaggccatcactctacaaagtactcactcggccaactccacctgctatcactactccgtatctttttcatgtgaaactattattgatggactcgccgtttgattgcactgggagaggtcgttcaaaaaaaaaagtactgggagtagtactggaactgccatgactttgcatggacaccatggtcatggtgcatgtacagcaataatttatcgtctttttcagtactcacaagaaagaggccatcttatcaatctgaaaaaggctactatcttcctaaaataagtgctgccatagatattcgtgtccagcgttttgaccgtccgtcttatttaaaaattttattaaaaattaataatattagtcacacataaaataatattcatgtattatcatctaataacaataacaatactaatcataattcttttttaaataagacgaacgatcaaacgttgagcatgagcagtgttaaaactgtatttattttgagacggaaggagtaatttttttctttgttctcacttcacattgtcaactcgtttttcaaatgtgaaaatgggccatgatgggtgctgatagtaaaacacaagtacagctttcttacaccttgcacgtttccttgctgcacccacatcgtaaatcgtgtgtgaagacttcactacgaccctactgtctgaggttaatcagttaattaatgcgtggcggtagaagaagtctctcatactgtagcagcatccatcatccgaattataatggtcacctgtctctgccaaacctgctgtgtaaactgttcaattgtttttttctcctctaaaatttgcagatcggttcccacaccttcgtgtcaccgataggtctccggcgaagcggctggcgttgccgcccagccacaagcagtacgtggacagctaccgggacgacgccgcggaggatcccgaggacgacgagctggggtacggctaccaccggcgagccggcggcgctcgcctcgctgcgaagcccgtctcggcgcgcaccaaccggagccgcccggtggagctgcccgtggaggagacctcgccgccgtcgtcgacctcctccgacaagccccctgccgcgccgcagctgcagccgggcggcggccgcggtagtgacgagaccgagtcgaacagggccggctcgatgctcctgcagctcatcgcctgcgggtcggcggccggcggcggctcggccaagtgccggaccgagccgaggcggagctgcggcctggtgagccggctggcggcggcctcacgcgccggcacggaggtcgacgacgacgaggaggccggcggcggcggcgagctgagccggcggttcggccacctggcggtggaggagaaggagtacttcagcggcagcatcgtggagagcggagtcaggggcactccactgccatccagctcgctcaaacgctccaactcgtacaacgaggagaggtaaaccttaccattaccggaagtggtaaaatcctttgcaaagtcttcgatcgcctaacctgccgtagctagcttgcatctggccgatcgagtgactgactgactgacatcgcgattgtcgaatgcgtatggctttttcctgatatctcatcactcgattcgtcacatctcttgtctaattgtcgaatgcgtaggtcatgtgtagacgtagcatgcaatgcttgtctagactaaacggaaatcttggaatttagccatgacacatgacacaacataatagaggtcaacgaatgagcacgtccttttttatgttggagaaaaaaaaaacgacagcaaaaactgcagaagacagcaaccggcatgcatgcttgccgtttaggaggactaggaaggtggcccgcgcatacacttatatattattgaaaagtaagattattgtttgttcagaaattttgtctcatagattcagggcaaattaaagtttggataatgttattttataataatttaagggttgtatttttcttaaggtatcttataaaaccaatcataaacttttgagtaggagatggattaagtacttacgacttttgaatcattttttttctcgagtaaataagaaactattgctagttaattatcatacagtacatgtatatacataccgtgtagtatggtcacaaattaaaaatgcgagtgcaagatactaaaaattcttttgattaaatcgtctcatgaagacgcatgatatagtaataaaggaagggaagcatatggatgggaaaaaaagaaagagaaaaatgaaaaaagggaggggaggcgtatgtacccgtgcacgtaggtgtgtacctatgtcgaggtgggacctcgtagtatttagtttgttttaagatcaatttaatctaacggtttataatattggacctaccagtttaagtgaaaatcaaataatatatactttgatttttttctaagaatttctaatatttgccctaatttattatagcaccacgtggcagcttgtgagcattttaaggaatttgaaatgactaattagaatattaactgcacaatatatatgtatgtgacatatggtaatatttgttccagcttcgtccatgtttatatacatgtagagagaaattaattttgtggctagcaagccattagatgtctaattaatagcaattaattttgacacctatttacaattgttcagatcaactcttatatattcatcttacgactttgatgatccgttgatcaccatggctcgcatgaaaaaaatatgtacttcctccgtttcacaatgtaagtcattctagcatttcctacatttatattgatgttaatgtgggaaatgctaaaatgacttacattgtgaaacagagagagtagtacttaaagtttaggatagctgaaattgatgaattatataatttatgtgatagctattcgagggtataaatgaatggattgacttctaaaaagttagaaagttgtttaaagatgacaccatttagaaactcataaagcgtgcaaacaaaaatccaaaatatggaatcgggaaaaaagagagggccttaaactccctttatcacccttgtcgtagtaagatttgtattgatattcgtcaatattgcgctcacatttataacataatgattccttttacctgtacaaacaaatagtacaaaatccaaatatgacataacataaatacattatagttgttatgtaatcaactctcggtttcaacttaaacagagctaattagtgtagagaaaaacacaacccatggtgcttaattattctcttgtcgcatcacacctttaattttctttttatgttatttacaaaattaatcatctacatatatgatttgatacgtggcaaagcggtagcgctataatggttgtgttcaccttagatgtctcagacactatgctttatgctttgtaacacgtgcgaaaggcaaaggtgcagacgtgcaatgtgcagcaggcaaaaagataattttggacgctttatttattagcaaacaatagatctgatgattataataataggtccatcagttctagtgtaagtgtaaattagttaatatagattttaaattgttaatttaatgggtacataatataatggtgtagaccttattttgaaatagtgcattacttgagaataatagaacagtgtaataaaatgtagatccaataatttgcataatggagccataagtttaagtgcacatataaattagttaatatatagatattgtttatttgataggtacacaatataattgtgtaaaatttattttaaaatagtgcattatttgaaaataatagtacaaagtaaagagtacaccggcttaagttatatgatggtagattctttgtttgtaaaattatgattatttaaaaaatatatttatatatatatatatatatatggaaaaaagaagaaaaaaggaaaaaggggggggggggggggaggaagcgtacgtatttggcacgggaggagaggataggtgggacccatggtttttagtttgttttaagatcaatttcatctaacggtgtataatattggacccaccaatttaagtaaaaatcaaaggatatatgttttgtttttttcttagaatttctaggattctctctattttattagagcgccacgtggcggcttgaaagcgcttgtagaaagtttcatggacttttagtatataatagatagatttaagttaaccaggcatggcgtatgcacgggtgtgtgcagcgagctgtagtacttcgaattcgcatttttttgccggaaaatactcgatcaaacgtgtacagtatctcgtttggttgcatgctgtgcgccggtgcgttttggcatgaagacagtaggttctttcgtgcttcgtcgacgcgtcatgtaatcgtgctgcacaactgtagactgtgtgtgcatattggtatgggccatcgtccaggtccactcatggctctcgtcaagctcaagctcaatcgctgatggattctgtactaggttctactgtgtcagcgtacgacgttgttgtacatagtactgtaaacgtacggacagaatcgaatctctctgtgttacacctttacacatcgtatgcttttgcctgtaaactttaaaggcatttatttgcaaataacttttggtttttaacctcaggagctcgatcaaggctgtgttacacttttacagatcggtatgcgcttttgcctgtaaactttatggcatttgcaaataacttttggtttttaacctcaggagttcgaggcttggtgtcagcgaggagagatcaacgacggatgagcagatggaaggggaggaagggatgatcagggggagatgcatcccgggcaggaagaagcagcacaagtaacttagctaggtgcactccaaccatcattcagattttcaggaactactgagtagaacattaatctagctagttgtacttttctaagaggaattaaaggagactactcactgtattactacatgttgctggtagatctggaatgttgaagtcattcatcactcagttcagagagtagagtaggggattgattctgcttgtttggtttcctttctcggtgaaaatatgatgaacgaggtcagcatgctgatgccagatgtgcttggtaacagatggtagtatggggcggtgtgtgacgctcttgggtccactgcgtaaaggatggcaatgaataggccccgatgcattgcatccgctccataaattcgtgctccatcgtcctgagttgatgagctctgactctgagcctctgactgtgttgcaggcgcgtcctagcttttgcctgattgtgtatcgcccagcgctcgtatgggcatatggctagaaaaccggtgggaaaaacgggttggctacagatcgaggtttggaggttgtcacggattgactgaaatatgcgtcaccctacacacataaacacagttgcgatcgagtctcgaaagacaccaagagtacagcgagaattcacttccgatccgacgacgcacgagtgcacgacgacacgttgagctcctcagctcggccatgccatgccaatctccctagctacgtatggcaactggtgcagcggtggggcacacgcgcgctaggcgtcgtgttgatcaggttgcggcggtgggagcggctgcccccggatgaaggaggagacgagcaccagcgctcgctccggctggtcgatcggggccatgtgcccggacccgcgcaccgtcgcgaacaccagcccgtcgtacgcgatcacgtacccggcaacgtccttgccgtccgccgaccacggccgccagtccgccgccacccgcagctggagcctctccatcgactgcctcgtcgccgtcaccggcaccatcgcatccaagtcgccgctgcagcacacacaaatatatgtacattgtcaccaaagaagagtacatgacgatgctaggcaggatgaacggaagagctagcgatcgaacacgcagcatttgacggacctgaatatccagatgcggatgcggccggttatcactgccttgatgtatggcagcattgactttggcgagtcgccgaagtggtctaggttgtaaaccctgtcacatttccatcctccaacgtcagagatgggaaagcaagagcgtgcttgcgtgagcttgacaccataaatacctgcatctagtccagggatacttcaactccgtgttcgcatggatcgtcttctgtacctggggctggttcatgtacgcctccacgaagtattgggagcacggatcagccaaatcctgcatgcaaatgcgggtgtttcatgcggtttgataattaaattcaacctgcaaaagcgtgcagtaatatatcatccgtaccatgcacttggaggctgagggcctgactttctgttcgtggcaggtggacgagtatatgttgtagatgtcgatgttgccaatccggctatacgccgctttcctcgccgactcgcagagcgccgacgggtggtcgtcggggtacttgcagctctgcgtgatgagcgcgtgcgccgagtccgatatgaacgcgtgctgccacaggtactcgtacagctgcgtttgctcagccgcgaactccagtatgccgttcccgatctgaacgtagaacatcaccagaattcagaaaacattacagcttcgcggctatctgaacatggccatgcatggcgaatcctgcatactcacggcgattcctttgagcttgatgggggtcgcgtgcgggagcaagttgttgtcgaggatggtgacggcgagctccgggacgtagtggccggcgtagctctcgccgacgatgaagaggtcccgggtcttgtattccgggaaccggtcgagccaccggagcaggaaggtgtgcgagtcgtgcgccgtcatgttgtcccctatggtgctgtacacctcttgcggcttcaccgccgcgtacgagaagcccacgcccacggggctctccaggaacagcaggttcccgtgcgccaacccgcggttcaaccgattgtcagtcacgctcacgcacaaggaaggagaaagtattttctgcacctagtgccatgtcacctaggtgtatgtatgtaatttaaacagttatataaaaaaatataaaatttgataagatggactttgataatataagacaatatacaaatatgcaagtttaaattcgatcgatatatgaagaaacaaaaataacaaattttatctacgttgtacgggtactattcattgtctgattttattatttttgtttctctaattgtagatcaaatttagttctgcatgtttgtgtatagacttatatcatcataattgatgttactaatttttttttaattttttctataactatttatgtcgcatgcaaacgatgggtgccatggcacctaggtgtagaaaatccgtgtccgttgcttatgcttatgtttaccggtcaaaatttgaattttcaaacttaaatttaaagttgattttgagggtttttttatcaaagtttatttttcagccattttttagatcgctaaaaacacgcatatcaaagttttgtcacttcacaaattaatttttatttataaatatgccgtctcgcttatgcttgaaaccagccaaactatggctttttttttgttttttttatataccgatgtaataatgtaacgtgaccgagaaacgtatcctgaccagtaatccaggagtgcgggttccggcagagcgtcttgccgtccgtgtccacgcggaagggcccgatctcctggaacgctccgatgcccatggatgagcagccaggccctgtaaacacagcagtaatttgatgaagaattccaacatgtactcgatctgtttcgatcactattctgaacatactgattgggaacgcaattggatacggaaaaattacctccgttgagccacaaaagaagcggtttgtgggcagcatcaacggaggcttccacaaagtagtagaagagcgacttcccggaagtctcattgacgttgatgtagcctgaatattgctgtagcttcacgtccggtggctggcccggcagcgcggcgatcttgtccgcttccttggagccctcgccggcggcgagagcccggcatgattgcacggagaagacgattgcgacggagagccacaaccacaacgccctgtagttcatcatcatcattgggaaacagaggaagaggaaaaaaaaataatggcgaatgcagattattggcaaacagcggatttatagcaagaaacaaaattttgtgcctgttttctggttattcagttgaaccgcggatgccacgttcgtctttgattcttctctttcaagaccctcccaaatttaaggacgtccttgccgataatagactgttctttcctgatgagctggttgactattttaagcactttattgcccgttaaactttaccttattatcactccaaattaaaattttaaatgtttagttcaaaaattttaaaaatgtggataaacaatactactactgatttgttagatcggaaaggaaaactaaaggcccatagataatgagatcaagcccggcccaaattcgccagacaaccagaagcctaggccctagagcggcgagctgacgccgtgacgcggcgacgaggtgagcgcacgggcgcacagcggaggcgccgatctctctctccctcccagaacccgccatggggagcaggaagaaggcgaagccgagcaggagcaggaagaaggcgaagccgagccccgaccaggccgtggccctcgactacgtccgcgcctgggcgcatcccgctgcctccgcgccgccgccggagccctcggctgccgatgccgccggggacgacttcctgccgcaccaggccgcgcgcatggcctctggaggcggagggagcgtgctgttcgagctccactcccactccaaccacagcgacgggttcctctccccctccgagctcgtggagcgcgcccaccgcaacggagtaagtacacgatctggactctcctccgtttgcctggtagccggtaggtgtttgaggaaatgcctgtgaggtctgtaactcgtatagcggttatattgtgcgataaatgggctcctcagagctgcttcgttgtgtaagggagtaagagctagtttaacagtgagaactaacatgtattagagctgacatgtacaatggattagctataaggttgcctctaattctcttctcctctctctttttctcacttatgtaattaatgcatttaccttggagcatatatagatctagatcttgcatgagagctagcacccttttttttttgggttctttctcattcatataagtttatagatggcttatatagcctactagtaattaaacgtgctctaagggaccaagggttgcacttccaagcatcaccttgacaccttccaatctgttttccagtttcctgtgaagcagtaggtaatgtgcctactgggttcaatattggatgccagccgcatagcctccgtgtttccttaatctgttaactatatttaaatgctgtgatcactcgtactcttggagggtacttatgcccttgaatcagtaccccttcaatgatcatggaagcggccatcggctgattgcgttgggtagttcagagttcagatcgtgctttgcttgacagtgcagcatccctttttctagtgaagtgatcttcatgtatatgctatatctcattgtcccaaagtttgtcttatgtattgggtgcttgttcagatgttaaatcttaccatgtgcatgccacaattttgaatggtagaaaaagaagaagagttagaatggctaaattgtatatgtcggtactacaggtgaaagtacttgccctgacagatcatgataccatggctggtatacctgaagctgtgtcagcggctcacagatttggcatgagaataatcccaggagttgaaatcagtgcactatattctccaaagtaagatatttcttgtttcccatccatcttttgaataaaaaatagcaatgcgatggaattttaacaaataatcgtagttggttcatgccctcataactcaggaactatcatcgcactatatgcctgttccatcttataatattctgttatgttactttgttgtaaacaacatttaagtaatcacaatacgagtgaagttgtttcgttcagagattcctgtaccattactgataattgtagtgaacaagacttcattgtcgcatcttttccgtaaaattgtgctagctagtctagtacctttttgacatatcattgagctatcttgattctaaagaccaagagagttctgttggtgtttacatgtcagcttaacagagcaaggtaaaatcaagcgtgaggatcaagattaatcaccttataaaaatgcgccaaggaatactagctcctctcatctattcaccttatataaatgactattaactacaaaccaaatatgccaatctgttatcaatggtcactttaaccgagcattatatatgttgcattttgtccttgtatgttcatatagctgtccctgatcttcattgtcttaaagggaaatcgctggtactggtgagcatgttcatattcttgcatactatggtatgtgtggaccttcaaggtttgatgatctggaaaggatgctatcaaacattagagatgggcggtacttgcgtgcaaggaatatgctggcaaagctagatagactaaaggtgccaataaagtgggaacatgtaactaaaattgctggtgagggagtagcacctggcagattgcatatagcaagggctatggttgaaatgggtcatatagagaacattaggcaagcattcaacaagtacattggtgatgatggccctgcatatgccacgtaagtgctattgataatgtacgaaaaattcatcctggtgattgtttcacgcggaggaatgtctttgttaaataacggggcccatattttgtgcagaggaagtgaaccattcgctgagactgtggtgcagttgattaatcgtacagggggtatatctgcattagctcatccatgggcattgaagaacccagatgcagtcatccgagcattgaaaggtgctggccttaatgctctggaagtctacagaagtgacggaaaagttgatggtatgtctcttgtaccatacataaatcatttcaaatcttatttgaaagcagcatatgtttgttatttgttagttcatatccaattacaggatcgttgctgacacgtatggactctattccacaggatttagtgaattagctgagaagtatgaccttttgaagatcggaggttcagatttccatggaagaggtggaaaggatgaatctgatattggaacagttaagcttgctattactactttgtgttccttcttgaagatggctcggcctatctggtgtagtgccatgaaagacattctactgaagtttgcagaggaaccatctacgactaatctgggaaagatggttttgtttggagaactcattaattttaatggtttttcatcaacgggttctggtatggatattgttaatctgtgcttatcttcttggttaagtaacaatggcatggaagaagtggaacttgaggaggtaagattgaagcttgcccattgcgtaggtaaaagataatctcaaatgcatgactaccttgaacaatgggtgttccctttatctggaatgtgttttgcaactcaacatttatattttgctatgttcttaacagcccatagacctaatacatattttatcagttagtgatggtgttgctaaaagtagagatgatatagaattgataagtcattaacatttaatcaagaatgaatattcctttggtaatttaacagcttgtcaagagctgcacataattagagcatgcaagtatgctactggttttttaatggagaatactcatttcttcacgggtgtatcagtgaagcacacatatactctcctgtatatgtctccttttcaattctaatcagaactgtcctgattgcttatgtacattgtgtgtgttgtcaattgtgaggcccagtctatgaattgagcctatatggtccatgctgtagttatgagtgcaagtggtaggagggagggtagttccactttgctagttgagtgtgaggttcataccctgtccattggaacagacctgtccataatatccaacttaaacttatgaccattataacaagaagctaatatatagttaatggatatccaattcgatctgatacgtatccattgaccagaaattgtatggttgatgatattcaattcctttgcttcttggaaatgtgaaggtcggcatcagcatgatattgcagttattttgatttttttaacaggaacatgctttcttttcttatttgtcaacaataaaccattatatgcaatttcacgtttgattgttcatctattttcccacagaaatgaaccagggcaaaagatctctgtttgctatatttaattttgaatatctcatgggtttctgtgacatggtaattttatagtcgaaaaaaaatgaatcttccactggattcatctatctatttatttttgctcccatatttattttatacaacgtgatcttggcttcttcctgtcattgtcatggtccaacctaaagatgtgagcgtttcgtttatatcagcaatggctcctgtagtccggtgtctgatcacttcgctctttttgtttgtttcttttttttcttttctttttgactgtgtacgtaaatgtaaacatctaattaggttgcagttcttaactgtgcaaaaacagagtaaattgtacttcggaccacaaattcttaccaaagtgaagtactacccttacaatgtttttttcactttacactaggtattgtcgtcaaataggtat

SEQ ID NO: 20364 - DNA, 3865 bp, Oryza sativa
  unsure (1)..(3865): unsure at all n locations
attgtgctattggctatgagcatggctactaagttggtcaaagtgttacctttttatttcttcctcgtgagaagatcagagaaataactctaacgcctcctttggattgaaggattcatgaaaattttgaaggtttcaaatccttggaaattttttcatatgaggtcatctggaacaaaggaataggatgttaaagttcctattggccttctatgcctccagttctataggagaattattcctacgaggaagcaccaatgttgtggtggtagagttgtgggtgtatgactctatccaccagggttcacaagaaatcctagtgctcacaagaaatattacacacatgtggatgagctttcaaaaaggatttttctgagatgagagatgtgtcgctggtttttatctactaaagcatgtgttaggtttcgtagaggatttttttgagatcagagatgggtcgctggtttttatctattaaagcatgtgttaggtttcgtaggggtgtgggtgtgatattacatgtgtagtgatgtatgtatgcatctgccgtgtaattgaaaaaaacaatcctatgcctaggtttcaaagagccctaaagaggttcatcctctaattgtttgagcatatgaagtcatttctataaaagaaaaaacatttttagatttgggtacccgttctctccaaccttacaacaaacaaagatcttatcatcttaagctaaagatgatgacaatactacaagacatacctcatggttaggcaatttctcggatcgtggatctgaaagaaagccactaacgactcgttctttcaagccctaatcctgccgatggaagccagacacgtggatattctccctcaccaaatcattctgtggctcttgattgctccagcctctttcttctccgatccctacctccttttttcttccccttcgtcgccgatcgaccattctcgcagcggccagaacacgcgtgctgtcatctcatcttgcccccaaacaggagctccatgaccaattttgcaaaagccactttctgcagcgacacaacgttcgcaactgcactgatgtttgctttattgttattgtattccttttctctggattagattgcaccgaactgtttggttgcccaaacggaagaggctgtaaacagtgagccactgttgctgatcgctttgtttgcttggtcacaaaaaatggctgcacatgctaattgccaggccgttactatccaacccgttggcaagtgtacagtgttgtttctggaagagaaaagagaatcgtttgcctgcaatttttttttcgctccacacaaagaaaagggaaatgggtcatgaatgaatagtaagtaaaccagacgagcaaatcagatgtgtgctggcgccatcgctcataaataaatggccttgttggatcaaatcatgaaaccgaattgcctttaacatcgcaatcgtatctaatagtagtagtagccagtagagtaaaatacacaaatacacagagtactagtagtacgtactcactcggtactcgtaaaggaagtcatttagaacaatgtttaagtcaaaacttaagaatataaatcataaataactcttaagttattgagtttgaaaatgtaaaaattatatgaatagatttgtattgaaaaatactttcatagaagtaaacatatatcacttttcaataaatatttttatagaaataaaaagtcaaagttgtattttgtagaccgtgtcgctgtgctaaaggacttcctttacgagtatggagggagtactagcactacttttatattgccacacatgacacatctctgactatgtgtaatcattccgttacaatttatacttatcaatttagaggtttgttctaaattaaacttatcttggccattaatttttaaaaaatcgtgtagtaagaattatatgctatagaagtatttataatggtgattggtagatcttatgatgtttgttaaactgtgtgaatttttaaaaagtagtcgttaaaaatataaatatttaaattaggataaatttagaacgatagctgatttaaaatagaggaaatacttcagctttgtttgcctcgcaaatcctaggatctgactggctgaagaaatatggttttttagctcgatcacggcgacgagatctaacactcctcggcgagctcaccggtggcacgcaggttgccgcgtagttcacgcccattggccactggtatactcacaaccatgtgacagctagatccgtgtgatttaccaggtcaaaaccacttctcgaccaatcagcatccgccaggtgtccaccgttttaccggcacctgcctggagagccattgtcctagtgcggagaaggatcggcaggtggcggtaacaaatcagcgtggacacctggcgtcacgccattggctagcacccactttcccgccgctccgcgtgcttataaaagagcccggccatggctgctcttgctcatctaccatttgcctcttcagcaacagcttagaattcagctcagtaaatctgttgattgctcgtttcaaatcatcatcggtgtttcgtttcttgatttcttgatccatccaggcgacgacagtggattggtgtggccgtggcagcaatcttcctgctgcgatgtatgacatggtggtggatagcaaggagctaatgggcgcgcttgctccgtccatggtgtccttctcctacccgtgttccgagcagagcgcgagctcgcttcttgctggcgccaactacctgactcccgcgcaggtgctccatgtccaggcgcagctacagcgcctgcgccgcccgggccggcgagcggctgcctcgccgggcgccgccgctccgatgaagcggcatggcgcggtggcggtggcggcggcggcggcggcgcgggcgccggtcaagctgtaccgcggcgtcaggcagcggcattggggcaagtgggtggcggagatccgcctgccgcgcaaccgcacccgcctctggctgggcaccttcgacaccgncgaggaggccgcgctggcgtacgacagcgccgcgttccgcctccgcggcgagtccgcgaggctcaacttccccgagctccgccgcggcggcgcccacctcggcccgccgctccacgccggggtcgacgccaagctccacgccatctgccacgggatggacctgccccaaccccaaccccaaacccagagcaatgcgacgacgacgacgatgtccacgaccgcgacgaacaccccaagccccttcttctcctcggagagcccggtggtcaagagcgagcccgtctgctccgcctccgagagctcttcctcggccgacggcgacgtgtcatcgacgggctcctccgacgtcgtcccggagatgcagctgctcgacttctcggaggcgccatgggacgagtccgagagcttcctgctgcacaagtacccgtcgctggagatcgactgggacgcgatcctttcctgatgcagtggctgaatcttcttcctctccctgttcttgatccagctcttggtgtcctgaacattttcacaactcagagagtgatgctctccttgattagctacatgttaatctaggttttgggtttgatcatgccatcgattctgtagcatcaacccctggtctgcttggttttttcaatggcattgccaggaaggaggtctcagtgctttggtttctgcgagttgtgcaaccctgcatgcaaactcttcattgtatataccaaatatttgaactctacattgtagtagttcatatatccaataaagaaccattttagcacattcaaacgtctaatggatcatattctgtcatatatatgttgcagttcaaacgagagatgg

SEQ ID NO: 20365 - DNA, 4744 bp, Oryza sativa
gcccgcccgaccgagtacgtacgtggtgggtgggttcggagcttgggatttgttcgctaaattcgttttcggcccagcccaatagaaccaagcccggcccagcaaagcttgtgggctgtaaatccagggatgagcccaactttgtgaaatctggtaaaagttggttgggctgagtctgcctgagtgcctggcctgagtcctgttatcagcatacagtggaaaaaaccggaccggaccggcggttcgaccggaaaaaatcggaaccagaggtgaccacggttcggtttcctttaaagaccgaacatgcaatcgaaccgctctgaaccagatgaaccggccggttttcggtgaaccggacactaaaccggcactggttggaccggctagccatactaatgggccacagtcggctgtttaaaggcccatttggtgcagctggtggtctttttttttttttggcaaaaatagcaagaaatggtgcgctacgtgggattcaaacctgggtccaaaggttacaagagcaaagagctagccatcaggccatccaacaacatgtgtatataagtgaatatgtaatatacatgtactttgtgaaccgcggttcgaccgcccgagtcactggttggaccggtggaccgttgaaccgagaggttggccggatcacttaccggtccggctttttttactatggttatcagggtttactccaggtatgtctcgttttagggacaaattaaacctttccaaaagttaatgtagctaaattttagtaaggattcataccatgagttttggtaaagttaagactgtaggagtcatatgtgggtatgtgtggtttgttgttgttttttttttgtgtgtgtaggtgatagatagatgttgaatcctggtaaggtattggttattcctcacgaaaattgataaattgataggttggaaatgtagtaaaccaccctagtcatatatccaaccgcgcctcctaattttccaccagtagatttagcatcacctatacgcatggtacggtccagtgaattggattgttgttccattatttttaaaagctacctgtatatataagaaaagttatatataaaaggagtactgtgtttgattgccagaaaatgaggctcttctcgcggagattttctggaccatgataatccactaattttaaggagcgctaaataatcattggataatctgtacttaggcggaaaatccttctataaaatactcagggcagggttaagaactcatgatatatgctatatgagcctttgagaggacaattcgatgtctccatactaactttagcctttgaatcataagaatggaaaaaccgagaaatagaaaaaatatatgattctaacataaatataaatataaaacagagaattgtaaaacacagaaatgacattttgattggatcacaggaaaaacatatgaatcagatgagatgatagatttaaaggaattattttaagaggattgcccatttcataggaattttgaaggatatgatataattcaatcctttgtttctaaggttttcatagggtttcttttcatatgaatgaaatcttttaaattttctatattttttctataaattaaaggtcccttaaattatttaggtccaatagaactcataatatttatattagacaatttagtatgaggcaagataccccttggtacggaagggcaagggcccacatatcgtgtgttatgcatcagcttaattacgagtggtcgtaattatcccgccaaaaactacacacatagtctttacgtgataccaaatactataatattgatatataggtaatcattgatgtatttttttttcgatgtatgataaagttttggtttataatatatttcttactatagaatttagcacaaaactcagcacgcggctattcacatactatcgccaaaagcctctccttcatgttaggcttctcatcagtaaatatatttttcaaacaaaaatcgtgaatcacgttttagatgccaagcatatgttagctgaatcttgtaaaacagtaataatcttcaggtctgatgcctcctacaaactcgaaaattccgatagaaagatctcagatattttgttctcatcacctcaaccgtatgtgtacgtgcaacgccgtataataacggattgtatcgttatacgcgtatatcggccgcggagcggaggcaaccccaggcatctcgggggggttggggggctatataaacccccccgccgctagtgcggcacggcgcatctccccttttgcatgcctcaccggcctctccacctccccctcctcctccgcctcccaatgctctagctgcttgctcccgattgatttgatttccccccttctccgagtctacgcgatctgcggattggccgtctccccactcttgattcagtccagggagttttgatctgaccggattttgcggtggggttttcttttttgggttgggttgatcttttgggtggtttgatctgtggtggcgatgatgtgtgcgaaggtggtggcggcggcggcggcggaggagagggagatggagttgctgctcagcgagatccctcaggtcaccgcgccgcatgggcagcgcggtggccgtggcggcggcggcggtggtggtggtggtgctgcccagtgctacggcttgcatggacctacgcgttaccatgcgcacgcgggggcgcccgcgcgctacggcggggatccgtgcttccccctggtcttgaaccgtcgcgacgatggtggtggccagcagggcggcgctcgcggcgccatccacgtgccgctatcggggggcttcgcgtcgtcgccggcgtcgagcacgtccgccggtagcgcgccgtcgccggggtcggaccggttcgtcggccgctcgccgtcgccgatggtgcaggcgacgaccgacgaggacacggagaggctggcgagccagctcgacggcttgcttgtcggggacgcgcccgccgcggacgcgctcgccgcagcgctcatgccgccgcagggctcgccggcgtccgccgccaagaacgtgtacctgccagatgtctccgcggtgcacggtgcgtataacaatggctacaactttggggagccgggttactcgcttcaccatgagcccggcgtattagctgatcaggccatggcgtccggttatgtcgccccatctcagtgctttccagtggacgtcggcttggatggctacggcggcttccctccaagcttgggtaccagtgttggcagcttcatgtacactaggactaggaacagctccggcattggttgggaacaagggctagtgcaccctgatcatgctcgaccggtcttgcttcctggacagtctggtgcagaacacaactgggggtacgctggtacgggtcagatttccctggactcccgtggcagaagtttgccaaaatcgccctacgaatacagtgttgcagcagcgagagacattgggtacatgaaaggtggtttcaatcaaatggagccattttgtgatgggaggaagaatgtgccttttctgaaccgtgcaaaggagaggagatttcagcagcatgtcaacaataggtcagttgagctggggagtcctggtatgctgatgtatgagaacatagttgagctggagagtcctaggatgctgaggtatgagaacatggttggagccaagggctatatctacttcatggccaaggaccagaatgggtgccggttcttgcaacaaaagtttgaggaagggaaagatcaagccgatctgatatttgaaggtatcatcgaccacattcctgaacttatggccaactcgtttgcaaattatcttgtacagaaactactagatgtgtgtgatgaggagcagaggctgagaattattgctgtactgactgaggaccctgtgaagctgctgagagtctctctaaactcgcacgggtaatgatcttttgttaaaaactgatatgtacttcaatatgatctgccattattaacttactaaaagaaagcgccgattgttgattggagaatgttgtaactttaggcaggaccaagtgtactttgatgctaacattgtaatagctactggacacaatgaatggtgatgatttcttttcatttatttcaggacaaggtcgatacagaaattgattgagactgttaaaaccaggaagcagatcatgctcattatttcggctctacaaccaggctttattcatcttgtcaatgatcctaatggtaatcatgttatacaaaaatgcctgaaaaattttgatgcagaagagaacaaggtactttggcaaatatctagtttgcaaactgatttttgttaactcttcttgactactacttgttatgccattgatttgagaattatctgttgtagttttgacagttgcacaccataagttagagcaacattctaaacacatggaatttattggctgtgtcctatcccatacaattttctcagtctgcatacaattttctcaatctggagcaaaacatttctgaaactgtagctatacctagcatcatgttctgaaacttgcatcgatactctatcagattgaagtaaagtaatttggtgttgtagatgtcactatatctttctataaacttggtcaacttaaagaagttgacttagaaaaattataggaacaaacatattcatactgtttacatagaaacttgctcatggagcaaatacaatctcttaccaattg

SEQ ID NO: 20366 - DNA, 3084 bp, Oryza sativa
attcctgcaccccgaatcgtcatgtagtttttgcagcacgccggcaacgctgtagcgttgtattttctttaaaatttctagttctttctgaactgcctgttctgtatcttctgtaatactctttttggttgtgctaaacggagtgaccattacatttcgtcaaagttgtcatacctgtgttatattacatagttgcatcttccaagagcatttcctcttcaatttggttaaatgaaatagatgcttgtgctattgggactttgaactgtgaagagtgactcatcaccatattttggtagagaaatttgcctcgtcaccatattttggtagacaaattttaggtacttgagaaaacatctcaaggtatttaaattttgaacttttcttttgaacgaacgaactaaaattatgcgttttggtaagagtacactttccaaaacatctcaagtcatcgttggaaatgttgtgtgggtcggagaaattggcatgcttcactctcgtcgaacgtacttctggtgttttgtgtgtaagtagtgttttgtgagtaagtacgacttcttgctatgcaaaggtaccctgaaatcctgaatcctgacgctcatggagtcatgactgtttcactctggtatccctttgacttggcatttgttttatgtgtaagtacgacttcttgctatgcaaaggtaccctgaatcctgacgctcacgagtcatgactgtttcactctggtatccctttgaattggcattttagccggctgatgcatatagggtgtgtttagttttttttttttttttggaaaattggaaccatgccattataattttgcgttccaattttccctagtttttttggcgtaaagtttttaaagtatatagacacacatttgaagtattaaacgtagaataataacaaaacaaattacagattccgcttgtaaactgcgagacgaatttattaagcctaattaatttgttattagcaaatgtttactataacatcatattatgaaatcatggcgtcgtctcacaattacatgcgaactgtgcaattggctttttctcccacatttaatgtcccatatatgtgtcaaatatttgatgtgatttttggctaaaagttttttaatctaaacacggccatagatggggaaatgaatccaagatgaacgtgactttcgtgtgctttgtgtatagtcaaccacctactttggatgcaaaggcaatgcttacaatgtaaagtgttgacaacagaaatttttttttttaaaaaaaaaaacagataaagagagtgaataaaaagaagaacgactccactggggatcgaacccagaatctctggttccgtagaccagcgccttatccattgggccatggagtcgctgatgggaggagcacaaatagttaataaataaaatgtagtgagatattttcaagtcaagcacatcacaaaataattaattaatgaatgaatatattttagagaacccatgttttatagtcaatagttacatagcaccctaaatattatgactagtggtgtatgaccctatatattatggcccaccccaatacatgtaaagtacagtagctgtttacttaaaatttgaaaatataaagtgtttatgaaaattttaattattcatttcttgattaaggcagttggtttttaacgactcttcactactttaaaaagtattgtttcatatatcctaaaactaattgagatttaaatgaaatattatttcataatcctaaagctaagttcttgtgctttgatacgactagaaggaaaaaaaaatatcatagtattgcctaaaataaataaaatcataattttcatgaaatttgtttccgtctttttgttatagagaatactcaccttagtttgattttatatgtaactatccatttatagttagttggtatgtaatgttaaatttgttgacctctttttgttatagagaatactcactttagtttgattttatacgcaactaaccatttagagttatgttaaatttgttgcccacttttttgttatagagaatactcactttagtttgattttatatgtagctatccgtttatggttgccacaaatcataatatatcctaatatatatggtattttaaacttttggcacaacttataggttctctgaaatttactttttaaaaaacttcagtacagaattacagataggttttctatataagcatgtttatttttttccaaaattaaggacaattacagttctttgtccggcacataatgtcgttgtagtatagtggtgagtattcccgcctgtcacgcgggtgacccgggttcgatccccggcaacggcgatttttattttattttaccctttttggggtgctttggccatagattatgcggtataaaacatagaaacttcagggaatttttgtctgtttcaaacctagatgccgctgttaaaaattacacataaatattctctatactcgaatcggcactgacaatccaagctacctgaaattcactgtgtgtactaatttgaagtctgaactctgaagcgacctcgatttccctgaatacaaaactctcagcaggaacaaccgcctgctttctgttcttcttgtgcttctgcccctgaaggtatttgcccggaggcagcaggccgtaggtttatgtccaccatgtcttcctgctttgccgatgagagcgcctccattccaggcagcgatgcagcgatcttgcgaaacagtggctgtggttcaagttttcaatcagttaccatcaggtgttttgagcaatgatggacaagaacagtggtagatttgcttgtcaaagtgaaacaaagtaaaggctggagaccttgatgttgaatccagcttttgcgctggtttccatgaacatggcgccgtgctcctgtgccttggcttctccttcgtcagtggatatttgcctgttgacattccaatcgacagaaaggagtaggttaactgatatacctcaattttttaatatatcacaccgttgacttttttttttaaaaaaataattatctttcgtcttattcaattttttttaaaaaataaa

SEQ ID NO: 20367 - DNA, 9085 bp, Oryza sativa
aattcctgcagccctatttaattttgggagcagctggtacttttatgtaaacttaatgaactgctgatttaagaactaaataccgacagatactaacctcttgtcaacaaggtctgttttatttccaacaaggacgatgatcacatctccgcctcgttgtgtatttacctcttcaatccacttcgatatactcaaaaaggactgcctgtctgaaaacaaggacgatatgagaccacaaaacaaatatacagtggattatattatattttctgataaatttgtattccaagggtatcggcaattcgccaatccctgattcagtgacatgttcagaataggtgccaaccttgttagagcaaaagcactgtagtttacaagagcactggagggcaaaggatcacaaattctttctagttacaacagcagagagaaaagggtgtagatgaagttaacttgccagtcacatcgtaaacaatcactgccacagaagaatccctgatgtaacttgggatcaagctccggaacctctcctgcccagctgtatccctgcacattatcatcaccataaaactctcccggtttttactagctgaaaacctcccagttttcactagctgaattgtcttgtgcgcgtgatttcagttcaccaggaaaggataaaaaaagggcaacaattgagcattaatattgcctccatcagcaaaacgaaatcaacgtaattgagggtggaactgagactaaaaatcaagacttcgaaactagtaggcactaggattatatggtaataaagcaggttgtgcagagtaaaatcggtgatcggacaagtaacagcagctaagctgcaccaactgaattctcgtaagcaggacaagcttgataagcagagtatgatgataggggaaaaacaaagagagagagttttcagaatctcagataccaaagctgcagccgtacggttcggtcttcgaggtacatcgtcttggagaggaaatcgatcccgatcgtcgcctgcacgccgccgccgccgccgcaacaacatgaacaccgtcaaattcatcgaacaaaccttgcccaaaaaagaaaaaaaactggaactctctccagcgcgtaagatcgatcgatcggggacgcgcgcgacatcaacgaacctggtaggtggcgtcgaacttgtcgtacatgaagcgggtgatgatggccgtcttccccaccgcctggtcgccgaggaacaccagcttgtacttggccagcgccgacaccaccggcgccatcacagcacgccgacgcctagcctaccctgcgctgcgctgatcgattccgcgtgtgggaggagagaattggggcttcgaaaatttcgaaatcgagtttgagctttcttgtttcggagtttggacgaacgcgtgcagatgatggaaaagaggaaggtgtaaaggaggaggaacgaggtgggcttgctttgaacggagaaggaaagaggcgacttttgcgtttcgaagcttttgtttttgttttttttataataaaaaaaagagttggtaggtcgatgtaatagagtgagaatacgttcaaccttggggagtccgggcgttgactctatctatgaaccatacgaaacgttacatgttcatgtttgaattctcatgaatttctttcaaaaacagttggttttcagctgtaaccgccgtaagacgacagtttcttcgtttccagagatgctgcttgcgtgtactacaatcgcagcagcctactcgaccaagttgatcttttcttccgatggctgaccccagcacatatttttcagccagcaagatatatataccatgaaaaagaaaataaactcaaaaccctcgtgccaaaacggaccacaactcgtgcgggccaaacgggccagcccaaaactctaagccgggcccgtccaaacgcaccgtcctagctgggccggaaaatgagcccgtgtagaatgccagtggatgtcaaacaggccgagcgaaagtacgagacggtcagcgactcgaatttttttcatttttaaatttttatttttttaatatttacagaaatattgtaccggtgaaaatatttacagaagtagaccctgcagccctcggggagggcggcagggtgacgtgagggacgcataagatgaaaaaaaaactagaaaaatacatttttagcatagcgaaattacatttgcccccttgcaacccttgtagagggcggcaagggatctcagtgcaacatgcgcacaccttgacgccctccacttgagcggcaggggccatttctgtaaatattttggatggtacaatatttctgtaaatattaaaaagtaaaaatttaaaaatgaaaaaaattccagcgactcggcgtgtacagaacagaactaccgaggcgcgccctgcctaactcagaagtcttaactgatttggcaacttaaaagtcttaactgattgagatccactccggtgccttctacttgtagtagaaaataatctgaaccgttgatctcatttgatcatagggttcagatctatttctactaccatcacacttaatgatagtagaattgtagagggatatttttgtccataaaaaattatttgcatagggatattttcgtctttcccgggctccagctgccgccgccccgcgtgctgctcctcctgctggccatccatgtcaccaccgccacccgctcgccaccgcgacgactcgcaaggggaagcttcatgaactggatcgctggaatgggtttcacgcagaattccagcgagatggccctattcacgttacattagctcgggtaaagaggaagcaaaccacaaatttaatggaccaggctcacggaagtttagctacttcttttcatagcaaattcaggttcttgattctggtatagcaatagagcatactgtccatgtccaaattaaattcttattcagattcagaatcagattcttgattctggtgaagtcatccacgaaaattaacattaccgtgcctgctgatgctgaggctacagaaactcctactctcccgcaccagcctcctcaacagccggctccacgcacgcctgtagctgtcgtcgcagttgccgccgccgccggcggcgtcgcgcgagaggaggtagaaccatgcggggctcctctgcaccaccgcccctgtgcgcacgccggaagtcgtcagggcggcgccagaagctcctgcggcggggaagcggacgccggcagagaagggaacagaacaagagggggcgccggagagtattgccgccggcggaagggaacgtgatgcacaagcgccggcagcggaaggagtcgctctctccacctccgctcgaatgcgatggatgaggaagcggtggcagcgctgcttttcctgaaacatccgagcgatccacgacgagaaataaattaagtgccaaatttatcccaaatctatctcagaactttactaatctacccttaaaaatagacggttcagattagttctactcgtagtataatactaccagtagaaagcaccggagcattgctctaactgatttggtagggtctcaataaaaactgatttagcaggggaactgtattaagctagcgttacagctgacagatacacttgacagtaaataaactgtgcagcataaaaacggacacggacacgggtggattaattggcacgccaaagtagatgcacatatacgtctatatactttaactagctagtcgggcctgataacagtgacacaaacagtgcgttagcgtaacaacataggggcaaaacggcatctcaaccatcgatcaacagtaacagtagtactcagcagagtaactagtatagacgtagtctactagacaaatactagtactatgagcctcactccggtgctttctacttgtagtagaaaataatctgagccgttgatcgtatataatcgtcaggttgagatctagttctactaccaccacgcttagtggtagtagaaacatggaggggtatatttgttcatagataataattcacgtaagggtattattgtaaattattattcagtaactctacaccttcgcccttctcaagcgcctgaccccatccatcgtcgacttcgtcgcctgtgcatctccctctccgcctccatcatctccagcgcgatcgacatctcctccctctctagcgaccaagggtggcccttctcctcttcgccgagccgctgaaggtccttgcccacggcggacgactagtcctgccatgtagctttgaccaagacagaggagatagccgggcaattggacagcggacgacgttcgacgggttccggcgaacggctgcgaggtaggaggaatgggcaactgtgaatgaacgagtgtagtatggggatgtggtggacggctcggattgtctaagaaatgagctacggcagccggcgatgtgcggtggcggagctcgagtgaggcggtggcatttggtcgccgccggcgaccgtacgagcggctaagggacttgggaatgaggcgtttggatgctacatgaatagggactgtgcatgacttcactagctgccgcggagctaatgcaaatgcttttgcataaacacgacagtagaccagggagtttgcagcaaagagtgaatcaagatgttctaagcccccattagtagacattgtcctatgacttgaaaaaaaaattcaatctagtggcaattgagcgcttagctacccccatatgagcaaaagaaaggaatcatgtagcgatgattcagagcaccagaatatgacaaaatgcaattagatgtttcaatggtatgaaatataaaacaaatcctgaattacagctctgactgaaatgcaatttacatatgggcaaaactctgatagtgaaaaatctcatttaagcagtttatcagattttttcagtctcactttttcaggagcaaaacaacttgtttactgatccaggagcaggatggcatatttcagttcaaattgcctggactcttctcaccccatcacagttgcacacaaaaaaatgcacaacacactgacatggtcaacacattgacattactagtagtccctcactattcaccttttcttttttacttgaaccattactgaacaatgaatatattgggacagtcacaagatccaataaacaacaatatctcaaacctcgtcaattagtcaatgaagtattcgacacataacaccatacaactgaatattacaagcagaatgaactgggcaggccttcttgttgtcactgaaccactttgcagtgttgcaatcctcgtggaagtcatgcccgcaggagagcgtgcggacatcatcgccggccaccatcctgagctagcagatcgggtatgccgcatgcatcgttcagcgcccgatccagtgtcctgacgccgccgagagcacggatgtgctgaaacctctgagcattgcggtctatcaggttcgccggcgacgccttccacggcagcacgcagcgagcgacactgttgcatattctgaatctcatgccttgctcgcggtcgaggaggtgctcgccatgcaagccacaagactcgggcacgcacggaggggaaccggggagccggaatgtatcgcagttgcctcccaagtggccgcagcccacacaatcggggcaacacggaatggagatcactacccgccggcggaatggattgaatcctccaaagtgggcactgccaagaatctcaggtcttgcgcaggggctccggtggaatcggacgcgcgcggaaggccactcgcagcggacagaaggccacgacggcgaaccaggatgccggcgtggaatacaggagaggagggggaacggatagacaggtgagaggtgggaggaggggacgcctgagggtttcgccgcgccgcgccgcgccgccgcgtgctgggaggagtagtgattagcaacgtgcgtcgggcgagatgttgtgcttgcgtcggacctgacgcgatcaagccaagaccgaccgagacagagaaaattgatccggccaaaattactcctaatatatattaggagattactaatctaccctttaaaatgaacggtcgggattaattttacttgtagtataatactacaagtagaaagcaccggagcattgctcctagtactatacattatacactgtgctccacattatacgcccacgcatgttgacacgccaggatgtacaatcgatatagatataggcgagccagagagagtgggtgtgagggtgatcgatcgatgcatgcgtgtattccatgcattatccgctgctgcaactgcaagcactcgattgatcgattcacagtcactagtcgcgtccgtatcaacagtgcggcgcaggcacacattgcaggtccgtaggaggtgccggcgaagaaggagatcatctaaaatttaattacttctccttaattttgagttactgataaaatagaggatttacatgccagtgacctcgtcagaaaatcttaatatccggtgctagtcggccggctccgttcgccgacgaagttacggcgggcggcgggggtcagtgtacgcgcgccgtcgacgagcgcggccggccggtgcacgtacgcgtacggggcgccgtagttatcgcagccttaaatacggcaacccaacttaagcctctgaccggccggccacacccggtagctatagagctagcttgcgctgtacgctgtgcatgcagtgtgtgcagcaacggcgacaagtaactagccactcctccgaatttattgtctctcgagtataattgagctctcctactcctgcactgcacacaccagtcgtcgttcgtacagtactatcatcaagttattagcagcagcagtagtaattgatcgcgagtaaatagtattgtacgtacgtggggaattattgtatttggagaggaactgatcggagtgtacgtcggtatcatgtctcctgtttgtgcgatacatattcagagattcagtcgtcgatcgtgttcgatttcatggcatctacttactcatctgcatgcgtcggcaggtcattggcagtccaaacctaattaattaatggactgttaagttcggcaggttcatgctcgatcgcgtacatgcatgcatatatccctagatgcagtagaaatgctggctagatcgacttgctaacagaacatcattggcgtgtgcatatgcatgcatgcattccagcgtacacagtggctagctaatagcaaagctatcattgatagagagtactagcgcgcatgagtagtacttgcgtttgcgacatatttccgtacgcagaaatttcctatggattgatttctactgtgtgcatataaaaaaaacagggcttaattagtttttgtcgctaggtcgtgcagcagttaatatgaatgtttcagatcaacgtcggtacctacacaagcgccggtcatccaaaaactacgtacagtaaaagcatagtactacctctattctaaaatataagtataattaaaaatgtttacattttaagacgaagttagtggtatctataacctcgaaggctcgcgatcgaaccctccatcgtaatggcattgagagtagtattatattgcaacaatggatgagtggaagaaaatatgtaattttttattatccatcacaagaacaggaaactgagagtgcaatcaacgccatcatctactccagttcgacacatgcgtgaacaggagtcatcaggagagagatcgatcagatcagatcagatcatcagagcagcagctagcaaatctagctagcgcacgtgcgatcgtggcacggacatgcatgggcgcgctccacgacgatgatctattgatctgagacggccgcgacgcatcggacggtcaggattatattacgtggtttctgcctctctctggttagcgagatcaacgtcgtcgatcgtctcgtcgccatgccatgttgcgttgcgtgctggcaggttgaatggggcgccgacgttgcgtgcgcggacgcgcattgaagcgagaattgaaggggaagttaatgggagccggtggactcggagcagcagcatgacgccatgacctatatacttccagcatttaaatgttgcgcgagagaggggggtcgagttcttaatttcccccctcttgacgggccgagtttagatcgaaactttttctttaaacttctaacttttccatcacattaaaactttcctacacacacaaactttcaatttttccatcacatcgttccaatttcaaccaaattctaattttaacgtgaactaaacacttttgttttctcgtaaggatgcaaggttcaaaaatatccccacttgtacccaaatctaggctgttctcatatgcatatatatggtcccggtatacctgatcacctctcctcctatcttcttcctcatcgatgaatttcatgccaacttcctacacatggcattttcggtcgattttgctatgctatattattattagcatgttttagatatatagttcacggctacgaatttttttccccgtctataacaattctaatattttcctttttccaaattttatactactataaaggaaattaactattaatcatgactttttattccatagtataactgtctatttgtatccctattcactaccgtgcttatggacttatccctaaggcttgctatcgccctaccttattgcactaggagggatcacatctcttcctatattaagtttttttttatggagagagtaggctttaagcctttaaagattgtttcttcctcccatccccacctactctaatcccttgtaaggttgtcaaaaatcttgattactttacgacttctattacgatcttaattaaggtggctgattttaagattttatatttgtcatctatacgatttcacaatttttgatatacaattatatgattacaatcataactaaaaatttcatttctaattaatttaggatagtaattttaacaaccttgctcctttttaagtatatcgagttgcagtcatacagatatatagttacagagagtacaacttttatggtctagaattttttaaaaacaaatatttgagaaat

SEQ ID NO: 20368 - DNA, 1042 bp, Oryza sativa
tttggccaaattttgttctctaacacctatgtactgagttagtcctacagtatgtatgtagcttcttgaaatgttcctacttcctcaacacttgtatatgaattagaacttcaaaatgtagattatccatataccatgtcagtgctttatttctttttaatgctgtagctcatttctcacattaaaaagctattttttctgtttgacaattatgtataacaattcaaaacttctgaacatcccaaaccactctgatagcagcttagccattcacacgtgttgttgaaaaattactcataactcatgtatatatgcatgttaaattctcagtgcttgacgtaatctgttgcatctcacaaacagatcatttatgacggtgctgacactcactacaagaattctctgaatgttttaacgtgtactctttgctgacttgagttgaaaacatctgcaaccaaatctatcttgtagtcattagtcaaggactccacataaaggatttttatttatgttcgtactttgagattagtttattgatatttttatgatgttcgctgacatgtaaatccacaaactaaaattctttcctgtttccccttattacaggaattatgtgatccaatatgtcctggatctgaaaattccttttgcaaatgcacagctggcatctctgtttcaaggaaattatgtgtatctttcgaagcaaaaggtgggcagcaatgtggtggagaaatgcttgaaggttttcccagatgatgacaaagctgccataatatgggaattaatctcagcctcccattttgagcaactgctgcaagacccttacgcaaactatgtcattcatacggctcttgtgcagaccagggtaagtactagttcttttgaatttgacagcgcattatgttcaacatcttctaatcttactgttcttgatagggccatctccgcagcgctcttgttaacgcaatcctcccccatgaggaagctattcggaccaatccctgttgtaagagaatctctaaagtcctctctaggaggtaag

SEQ ID NO: 20369 - DNA, 1196 bp, Oryza sativa
cagagctaagcctatgaacagatatctgacatgatcgcatgaacatgccaatcaattacgccgtgcaaatcgatcgatcgatcgaatgaaatcaggcgtatccgcccttccacgcggcaccgcgataggcgccgcggttgtccctccggttgttcctgaacgcgcagcagccgagggagtagacgatgacgatgaagacgaggaagacgatgcagacgacggcgacgcgcttccagtcccgcttcagggtcgccaccgcgccggccttgcacgactggcagttgtagcacagctgcgtgccgtcgtcgacccacgtgttgcagtccgggtccgacgagttggtgggcaccttcgtccagttcgtgccgctgacgtagaggaagttgcagctgctgggtggcttgcagcatccggactgcacgcagatgagaaggaaagagatgtgaggtttgatcagttcagaattgtatcaacacacaccaaaatttaccagaattatgtgcaaattctactttgtatgattacttcaaagttttcagttatatttctcatggaacatggttttcataatattgcagttatataattctttcttaacctactcatacagatcaaatggtttaaagtggatattagaaaacgtgtgctactatttcaggactgaaaatttcagacatcttccgatagaatactctgttccgatagttatcaaatggaaattttcgtgaggcagttgagttttgcgacctaaaagtttggtgaaagggcaccggaccgttgaattttgaagatggcgccaataaatttttccccttgatggtcagaactttgggaagtgttcagagaaaaggcatgctttgagttgaagaaactccaccacaagatagtctaatcctcccgttgacaatatcaccacgagtcatgaagcagtataaaatgcctagtgattcctaatctaagcattccaaatatgtttttttttcaaaaaattattctgattattcgactatgcgacaattgaatctgtatttcttgagaatgattcatattttaggctattgttttcaggtactcttataaacagtacgtgagcagtatgacagataaaaagaaacgatgtttgcgtagctaataatgcacccaaatcaccttatcagaattaatttccattagaaaaatactacccgggctgcagg

SEQ ID NO: 20370 - DNA, 647 bp, Oryza sativa
agaataaacttcaataaaaaaaacttaaaatcaactttaaattgaaggttgaaaattaaaattttggctgataagtacttcctccgtttcacgatgtaagtcattcttacattttccatatgtctatctagatttattaacataaatataaatgtgaaaaatattagaatgacttacattatgaaacggagggtgtataagtataagcgataagacgtggctgaacgaagctgaggtgggtccaattcttcaaaaagttttttttttcagggcctgttcttcaaataagttttcaagaggggtcaaaatgtcaaaatttcagcttcctcgacggctcgacgccatggcgcgccgccgcggcccgcggcccaagccgccattatccgctcgacgaacgtcgccgcgtcgcgctcttcccgggggctctctcttttgccggtctctgtagggctccactaatggcgaaaacgcggcgcggcacgtcagtcgccaagggttcgggagataagaggccatccacttatccaccctagcctcctctgtagggaagacccccgccgaacgctgcgccggtcgtcgccggagtccgggctcagcagatcgaccccccgtagaggtttgcctctagttcccagacttcaatttgt

SEQ ID NO: 20371 - DNA, 692 bp, Oryza sativa
tattggtgcaaagtatatgacagctaatcctgtttttgatgctcgcaccaagcatatcgaggtagattatcactttgttcgtgagcgggttgcaagaaaacttttacaagtggaatatatatctaccaaagatcaagttgctgatgcttcaccaagacactgtcagtcagacagttagagatgtttagaaacaatctaaaccttacaggttcagattgagggggagtgttagatatttctcacatatgataatgtaacaaatagcgaaggataagagttgttgggatgtttagatagataagataagtttcctatgttttagtagatgcacaacaactctatccgagctatatatacctgtattctgttaagcccggttttgtggcaagtaattaacacgtaaactcctcgctgaaggagttctctccacagtccctcctggggctctcgtcaaatatgacatcgatcgcgagcgagatgcgcatgtacacgctgtatccttgcatgaaggacacgatacccccatctcatctttgtggccgatgaagacgtcggctgttctgcggtcgtcaagctcacgcacatagtagtttagatccttcacgaacgctaggcctctactagaaaaagcattttccccaacattagagtcttatttttacagtcggacatgacttttggagccaaatgac

SEQ ID NO: 20372 - DNA, 654 bp, Oryza sativa
cgatcagacaggccggaggccgtgcctgagcgccgctcccacacgacgtcgatgcggtccacgtcgatggcgcccacctcgtggtgcgtgtacccctccaggaagtgcaccacgcctccggcgtggcacgcgtgcaccaccccggctccagcgagtactgcacaagatcagatcagtcatgtgtgatcgatctgcaaaccagcaaaggaagacgacgaggaggaggctgaattgatttcaggttgtggttctgacctcgcaggcgccgaggccctggacgtccttggggaggcgcatggcggcgagcttgccgtaggtgcagtcgcggcggaagccgatgattggggggacgacgaactggtggaagtgcgtccccggcggcgcccaacgctgctccctcggcgacagccacttgccgacgatccacgtcttgcagtgctgcgccgacctgtacttggtcacctgcaccaggtactgctggtgctccggcgtcgcctccctctgtatcttctggaatctctccgtcgacagcgtcatcatctgcaccacacatcatacgtctcagcaacagcgaccgatcgatcgccatcaatatgcagctagaaattagtagttgggtggtggtgttggggttgattaccatgacgcggactt

SEQ ID NO: 20373 - DNA, 3290 bp, Oryza sativa
cagggatccaaaaaatgatcaactatctgggtgattagaaaaaacccctaaatccacctcgaattaaacctttaactccatcaaatacccctgaatccaacccccaacatgaacacccctgaagaaaaatcgaaccaaaaatacaaaaaccctcgtggattagaaaaaaaaacatagaacaccatcgaatctggtcgtttgcaaacaatggactagtaacaaaacaccctagactgaactgaatcaaactataactaaaaacttagggaatccaaaacctaaacggattccaaaactaaaacaagtgattctgaatcagatccatacgttgggagcaaaaaaaatcgtcatgtattgacccgaatcttctaaacctagccctattgacattgaaaaaaccaaaacacaagctaatgatgccagcaaatcagggaagaaactcaaaaaacactctctctcgagttgtctcccctagcgagcgcgcgcgctctctctctcccgccggggagctgctcgtgctctctctcgccggcgagctctctctctctctcgacggagaaaacgagaagagaaaagaaagaggagaaagagatgtagagaaagagcgagaataaagaaagagagcgaggaaacaaccaacggttacggacataatagcgcggaatccaaaatttaacatgggttggcccacattgactcccaggccatctgctcacaggccacacggtctcatccacacagggaaatgcacgaatcatggcgcaaatcctacggatagaaaaacgacaaatattgggggtgaaaatctgttgacaaagatctagcaaaatcgatacggatcatattagctcccgaatcagtaaatcacactaaatttatcaaccatgacaattattaagttgctttctacagagatgctaggtttgcctgaggtgctatattaagtttttgataggctgctaccacgatatatatgtttagagatatatagcagttcctgaaactactaatcaaatgtgagcactgaaaccctcggcgatgacgtacggtaccatggaagacgacgtactgcatgtcggtgagggtgcatcgtgcacacggtgtccactgtcgaacaacagcttcggccggtcggggccgcacgttcacgagcgtgtacgtagccgcgctcggcgcgcgcagtctacgacctccacgacggggtggccgtcgttgtcgtggcggagaaggactcgggggcgccggaatcgtcgtgcgttatgtggtggggacggcgtgtggcgtgcgcggcgggatggcggcgcgcgcgtgccgccgccgccgcgctcccgctgcccaggaggtggcacgtacagcagcaggcgaccctggttatcgatcgatgcatgcatggctgcgagcgtgtcgacgtccgtgacgtgcaccagcgccgccgccatgcgcacgtcgtgcgtccatacctctgacgccacgatgtttcacttgagggggctcgcctgtcggaggtgttcgccacgctcatcgacctcaagtgcaacatcgtccttgctgatcagctcgatggccatttgcgtcgcctctgcctccaccccacctccaccctgaccgaccgttccggcacccgaaaactcagcgacccagctcccagcaattcgcctctgctgctacctaggaagagaggtatatgcaacccatatgtaggacccactgcccatgttttgctgcatttcacctacatatgggacccatgcgccgactcagcgaatctaaccacggtctacctgccatgtcagcccaaaccgattctcaaccaaattgatttgagtcggtttttgtagttgggagaggcgttacccgattgagggatgcaattcgatcgagggtaagacaggagggagacaatatagacttattccttaaactcggcctacaattggacgaacgtaaagtggacctttttttttctttggaataagttcaccggaggtccctcaacttaacagcgagattttttaagatcctttaaccacaaaaccagaaataggggtgggcaaaattagaccgaaccaaagaaccgaaccgaaaagaccgagaccgagactgaaaaattcgggtagttgttcggtccctaacatcaaaagaccgaatttatttcgggtatttcagttattgggctcgattaaccgaaatacccaaaataaccgaactggcccaatagactaggaggcccagtaggccagtactaagcccactaaaataaaccctagatcaccaaccctacccccagcctcccacttggctcggttccctcaccctcacagccgcactccccactcctcccgctcgcgccgcccgccttcgcctccaccgcgcctgcgccgcctccgcctccaccgcgccggcggccggcgccgcctccatccgccctcggcccactgcgtcggcgccggcgccgccctcggcccaccgcgtcggcgtcgcctccgcccgccctccgcctccctcgcgccgtctccacctccaccgcgccggcgcgtccttcaccgcctagctcgatttgcttttcagtttgtctttctgaatctgcttgatttcctagttgcatgtgcagatcagcagatgcatcatctatctattgagttgccttttgatttgtcaaccatacatttgttgtttggcttttgtgatttttttgttcagagacttctgctctcgggttagttcggtcatgaccgagaccgaaccgaactaccgaagtgctcggtcttcatttttttttggaccgatcggtcttgagtttttgatgaccgaaattttaaaaagaccgaaagaccgaaccgaatttctcggttagaccgaatgcccacccctgaccagaaagaccagaaatgtgtacccctcaactcacacaaaccgttcaaaggaggtcccataacagtatatgtgggtggtttcgctgacgtggcatcctagtcagcaaaaaaaattaaaaaagtacgtggggcccatatgtcagttgcacattttctttcttttcctttccttctcttctctttatctcagcgatgggcgggcagcgtgcgagcactgaggcacggcagccgagcgacggcgggcggcggcagctgagtgcggcctacaggcgagcggccgagcacggcggcgattagagcggacgagcacgacggcggacgagcgcgagtaacccttacaccacaacagccatggcgacccggccgcagctcgagtaacgtccattaattcttctgtcacatacagataatctggtt

SEQ ID NO: 20374 - DNA, 713 bp, Oryza sativa
cccaatcgtttaattgggatacatactcatgataaacgagacgtggccattccaagaagcactttagaacttagccttaaactcttttcaaagctcaatattttgataagcacctagtaaaaatgtggaaaagatggtgttttatagctcctggtttctaatttattttatataatcaagaactactaattcttatatttcatatgagaaataatttttttttcgcgaacgcgcaaaaggattgcacgtcaatatattagacgaaaagagttttagttacaccacacaatcagacagaccagcttatgctaggggaagggagaaaaagcaaaataaagaattgaagctagagaaactacggcggctaagaacaaactccaagcagcgggaagaggcctagccgcgctacactcccaacaagtccccaaaaacggcaacgccagctaaaaccacatatggctctccgaacgaatggactccagaaccactgagacgaaagagagtgcggagtcgaaaaccctagaatttcgttccttccacaactgccaagataccagaagcaccagggagtataagccggcgcggagatgctcaggtaagaaggccctggagaatggctaccaattctggaaccagctgccatgggggagagagggcagcccagctaggaggcgataacacccggaaccagacctgtcgagcgaacatgtagt

SEQ ID NO: 20375 - DNA, 4642 bp, Oryza sativa
ttcctgcagcccaattttaatttgaaacgggtatgtaaacttttgactaataaactttgggtctataaagtaatatttgaattcaaattcaaatttgaatcgggtatgcaaacttttgacttataaactttaggtctgtaaactttaggtgtataaactttagatgtatagaaatactatatataaaaaatattttaattcgaattcaaatttgaatcgggtatataaacttttgacttgtaaactttgggtctctaaactttaggtgtataaactttagatgtgtaaattcgaggtgtacaaactttaggtgcataaatttactaaaataagaaagtaatgtggtgttaaaaaaaacccacgtggaggggggatcggccctgatcatcccggacgatcgctcgcccattagcaaaaccgtctccaacccgtctatcctggccgaccaaccgggcgggtgggtttggatcctaaaccacgtcaaaagtcaaaacacacaaggtggagtatacatggacaactaggcctgcaatgcacatgcacggcacgggtccaatgatcgcccatgtccagagacggccgtcaaatactactagcagaacagcaaaaaggctgctgtacgtgcccgtcggtgtctcgcactctcgcggtctcgcgccgctgcagcgcgccgcaacttccaatcccattggctttagagcaaggataataagagcaagtataatagtgggctataagaaaactaaatggtgagtggataggagaagagatgagagagatgaaaagcgggctgtaagtttacagcctgcttaggcacaggaaccaagaaaattgtgagacagacatgtggaccatatatttatagtgaagagttaaccactatataagtgagctgatagataggctataagtaagcagctggctgtattattatccttgctctaatatagctcacttcctactactcccttcatctatttttgatagtcatatttccaaatctgaaaattttatttttgataggcatatttcaatccaacaacctatcatcttaatgattttctcgaatttaatgcatggctctctattcttccacacatgattggctatatgggctttgagaaatgtaaatattaatgaatcgtttgtttacgaggaatgaccagtagcatgcttaaatgaatgataagtagaactacttatccttggtctgtgtgtcaagatgaaatatgactatcaaaagtagatggagggagtattagcctatactaaagtcaacacatgtaatagattagctataaagttagctatgattttcttcttctatctctatctctcacttatatatttaatgtatttgtctttaagcttgtgttaagctagctcttgcatgagagccaacatccttctttttcttttttgtttacccctctcctccacgtaagattatagtaagcttatagctcactattatacttgctcttatacttcagctcgcagtcgccggctgtattaatattgtgcctgattttgcgagagttatgagagcgtacaaaccgcgcgcgctgcgccctataaacatccttccacttcttcacgtacgtacgaatcatttttcgtttcgtcagcaatggcacgcttgccttctcatcgtctcgcggctctcctcctcctcctcctcgtcgtggtctcgccgtgtcacgcggcggcggcggcggcggcggacggtgggcagaggccgactaggccgaaagccgtggcgatgccggtggtcagggacggcgcgacgaggcagtacgtggcgacgttccagcagcgaacgccgcgggtggcggtgaaggccgtggtggacctctcgggcggcgccacgctctgggtggactgcgacgccgccgccgggtacgcgtcgtcctcgtacgccggcgtgccatgcgggtccaagccctgccgcctcgtggagagcccctcctgcagctacatcgccagctgcctgggctcgccgccgtctccggcgtgcctcaaccgcacctgcaccgggcacgccgagaacacggtcacgagctccgtcggcagaggcaacgtcgtcaccgacgtgctgtcgctgcccaccaccttcccctcggccccggtccggcaagggccgctcgccaccgcgccggcgttcctgttcacctgcgggcccacgtccctgacccaaggcctcgccgccggcgccgctggcatggcgtccctcagccgcgcccgcctcgcgctccccgcgcagctggctggcaccttccgcttctcccgcaagttcgcgctctgcctcccttcggtcgacgccggcgtcgtcgtcttcggcgacgcgcgctacgtgttcgacggcatggaccactccaactcgctgctctacacgccgctcatcaccaggacgacggacaggtcgagcgaatacttcatcagcctgaagcgcgtcgtggtggacgaccgcgccgtgccgctgaacgcgacgctgctcgacgtcggcaccaagctgagcacggtctcgccctacaccgtgctggagacctccatccacgaggcggtcacgcgcgcgttcgcggcgtcgatggccacggcggggatcccgcgcgtcccggccgtggcgccgttcgagctgtgctacgacgggagcaaggtggagagcagcgccatcacaggggagccggccgtgccggtggtgttcgagctgcacgtgcagagcgaggtgaggtcgaaggtggcgccgtggatggtgtcgggggcgaacctgatggcgcgcgccgacggcggggcgctctgcctcgccgtggtggacggcggagcggcgccggaggcgccggtggtgatcggcggccacatgatggaggagatcctgctggtgttcgacctggagaagtcgcggttgggcttcagcccaaaccttggggccttcggcttgtcctgcagcaagtttcgcctcgggtagcacgtattggcatcgtaggctcgtagctaatctttctcgggcctcaaactcccaaaatctatacctgcattttgccgtcgcatgttggaataaattgctccctcctgccgtcctgcgtatctacaacccggttataccccacgatggaggtgtacactagtaaggatacactattacacgtttaaccattcatcttattaaaaaaatatataactataatttattttattgtgagttattttatcatttaaattactttaaacatgatttatatcttatacatttgtataaaatttttgaataagatgaattgtcaaatatgtgttcaaaagtcaacgatatcatctattaaaaaatgcagggagtatatattagggaaagtccattttacaccctcgaactcttatgcttgtctaaaatacacctccgaactacaaaaccggatatgatacatccttgaactgttaataccggacacttaacccccccgggctgtttttaccgtggtttttgccacgtcaaccctagccacgtcagcgcaaaacataaaatgggccaagcccatgttcacttcccctctctctctctctccctccctgccctcttcgttctcctctctctcatgaccattagcggcggcggcggtggcgcggagctgtgacggcggcggcggcacggagctgtgaaatcgacggctacggcggcggtgtagagcagcgagcgcggcggcgactgcgtaagatctaggtcggcggctgcggcgtcggcgtggagccgcgagggcggtggcagcggggagatggtgctagggcggcagcactgccccagttgcgtggacggtcgccggcggaagcctctgcgcgcagtcgccggaggtaggtccgggcgtcgtcactgcacgcgcctttggatatggctcagcagggaagaaccagctcgacacgtggtggaagcaacgacgagctagtggactgttgtgccgacggaacaagtagatggaggggcatgagcagctctggaaatggcagcaaatccagtcaaggcagaagcaatctgtcagggttatggataccacatacctaatattagttgactaaatctccgcaggacccaccacataccatgtcttatacggaaacaactttcggatataggaggagttccgcataaggaaggataaataaagttctacataaaaacgaaaatgactactcggattgtatccatattggtttccctagttctacttgtacagggggacatctatgggtataaatacaaggcctcctgggaggagaggggacacggaacaacagatcaaggcacaagatcaacatacaagccaacatgcgccaagacaagatgccagatatcgacttcagagataagtagggctagtcccctacggtgtctacagatattgtcaggagagacatagcgttgtcttttatcttgccggatgtggattcgaggagaaaggctaccctgttgtcgactatgagtcagcacttcagaccgccaagtcgacaacagttagataggctaccctaaatattgtactggtgtgattatggtgaataagagcaacgaccggcttcggccaacaggagtagggttattacctgaattcaggggcccgaacctgtataaaaatcctcgtccccatctcttttatta

SEQ ID NO: 20376 - DNA, 1167 bp, Oryza sativa
taaaaacatgtttattagtttaacctgcaaagaacgtcattcccaactagcccatttataccttctccgtgccaatctttcttcgacatggttgagagctcataccttcaacaagacaaggctgaaaaagttcggcctaaaacttattaggaaaaagtccactttaactcccttaaatatacaccgaatctaattcgtacccctcaaccagaaaaccggttaggacgactcccccaattactaaaaccggtataaattgactccctaagtggtttttgaggatggttttgctgacgtggcatgctgacttggtctattgtgctgacgtgtcagcccagtcaccaaaatacagatgaggcccacatgtaagtgataggagaaaatataaaaagcgtagggcccacttgtcagccatcttctccctctctatcttttcccccaaatcccccaaaaagaaacagcagagcaagcggtcgaggaagccgagcgcgtagttgctgtgcgggcactgcactgcacattgtcgcaggtgtagacgagggtgtggttgttgctgctcagcatcagctctggctcgctcctctcctggtactgtgcagccgcgtcgccggacccgcacggccccgccagcggcctcgcgcccggcggcgacaggtccggcaagcacttcgccgaccgcttgctcccgaaccgccccggtgctgccgctgctgccggcttgagcgtgcccctgccgcggatgagccggtggattccgaggtccgccaatagcggctccatgtcgacgtcgagcaggatgttgctcggccggacgttgccgcacgaacttcttgtcgtggaggaaggccagccctctcgccatgccgcgggcgatgcgtcgtcgctgccgatcctgcgcacagccagcacggcgccgtcgtccagcaccgccatgtacacgatgctgctgcccgccgcgcccaggatgtacgccgacgccttcagtagcgtctccatctccagctccacgtcgccgtccaccgtcaccagcaccgcgccgccgccgccaccgtccttggccttcttgccgccacatcgtccgtcttggcggcgacgacgccctccttggtggcgaaggacgccgacgtgtcagtcacctcctccgtgtcgtcgctctcgtctccggca

SEQ ID NO: 20377 - DNA, 734 bp, Oryza sativa
ttcctgcagcccaatttgctacaggtatacacccatggtacctcagatacatcatgttccagccgttgaaagaaagttgcattcattctggtgattcaaactttctggatcttgaatggctttcaacttgagacaactcaagcgatgaaaggtgtttactttggcattgctattgcatttttttttagcgttttcgactgacataatatcatcttcacagtgacagtcaatttaatttacacattttcttttgccttagtgtaggaaaacattaaggataattattagttgattctcctgtaaatttcttacccttcatgtttaatttcatatcaatctaaattctagagttcttttgctctcactgcatttccatgtaataaatacaaatatgtagtctcgtgttgtatcacttgatataactatctgtattgagaggtaaaatgaaaattatgttgccacacttcctaaatccaattaataagtgtcttctgagcttccagtatgttcactgatactgatttgaagatatcctctgaaacatttttttttaaaaaactcattaatactgatggattgtacttggacaggtccattgcaattaatactccggatgtgaacctttcagcggagaatgttattgccacaatgtcttcttttgactggtagatttgtatgatcaaatatagttgtatcatcaccatggacacattactctgatcattatgtaaaac

SEQ ID NO: 20378 - DNA, 1058 bp, Oryza sativa
tgagttcttgggagcaatggcgccgccgggggtgggggtgggtgtggcgtacctgtgggggaaggggaggggtgggcggaaggggacgccggtggtggtgaccatggagagtcccaactactcggtggtggaggtcgacgggcccgacgcggaggcggagctgcgcaccgccgcggtggccatggacaagggcggcgggcgtggcaggagcaggagcaggaccgccaggcagctcacctgggtgctgctcctccgcgcgcgccgcgccgccggccgcctcgcctccttcgccgccgccgcggcgaggcgcttccggcgctcccccgctgacgccgccgacgagctcggccgcggccggggacggctgatgtacgggttcatcagggggttcctggcgctctccctgctcgccctcgccgtggagctcgccgcctactggaacgggtggcgcctccggcggccggagctgcatgtgccggaggcggtggagatcgaggggtgggcgcactcggcgtacatctcgtggatgtcattccgagccgactacatcaggaggccaatcgagttcttgtcgaaagcttgcatcctcctcttcgtcatccaatccatggaccgtctcgtcctttgcttgggttgcttctggatcaagctgaggaagatcaagccgaggattgaaggggacccgttcagggaaggatcagggtatcagcaccccatggtgctcgtccagattcctatgtgcaatgaaaaggaggtataatttagctgaattctcatcggaattttgtatactctgtagttttgtagtgtgttatgttcattcattgtgtgtgcttactatgagacaggtctatgagcagtcgatttcggcggcttgccagctagattggcccagggagaagtttctgattcaggtgctcgacgattccagcgacgagagcattcagctgctgatcaaggcagaagtttccaagtggagccatcagggtgtgaacattgtgtatcggcatcgggtgctgaggaccggttataaagctgggaacctcaagtctgcaatg

SEQ ID NO: 20379 - DNA, 1759 bp, Oryza sativa
ctagtggcatagcaatcagtctatattagccacccgtgggcagagcatagctaagaaaatttggttttgtataggcacgtgtttggtttattaccaactcctgggcatctgaggcttagtattttcagataattcatcatatggttgaaacagattatttgctttacatttttttttaaaaaaactacagtttcttaaaaagaaatttcactgtattgctcagtttattagttttaaactatttttaagtttgtttattacaaatattttatttatctttataattaaataggtagtctagagcaataattcgatcaataatctgttgtaaaatgagtcatagggtagaaccagttaccagtccaaacccatgccttgggctggtctaaaaatctacattttctttgcatctttttgtgggattttaaggtaacccctatgttgaagcctttattagaccactggtccatttgtcatataggagtatactacaacttttggtcaaaacttacttgttgtcaaggcaattctttttctgtgccccaaataagcagattctttatagatttttcaaaatataaatattctagaaaatccataatacagtttattgcggttagaccactataatgaaaaacaattatggttaacagacaatatgcgactcatacaagatttttcatttgcttaactgtatcatgatcgcacaaacaaactctttctgacactgtcataagcagtctgttttttttttgagggaataagcagttactttgtgttcttactgataatctgatactgtgatctgatccgacagactagaaaaggtggacctcaggagagtgaggagcttggcgaagatattcggcaccaccgtctgcgtcggaggagccatggccatggcgttcttcaagggccccaggctgctcaactcctcctctctgatcgtcgacctgaactttcttctccactcgtcagcgagcagcaagtgggttatgggcgccctgttcctcatctgcagcagctgctgctggtcactctggctcatcttgcaggtgccaagttcgatcgcctcactcaaccatatgcagccatgccaccaattgccaaatcttgttcagatgtaattgtacatcttggtatatatccagaactgataatcctgacaagatgtgttgtaggtgccaatctgcaagtcgtacatggatcccctgacgctgtcggcgtggatgtgcttcctgtcgacgctgcagtcggcggtgctcgtctccttcctcgtgccggacatcaacgcctggaagatccactccctattcgagctcggatgctgccttttcgccgtaagctataagctcgctcgatcgcctcttcttcaggtgatcatttctactgtgatgttgcaaacaaattaactcgataaatgttcactgccgcagggcgtgtttgggtcaggcgtgacgttctacctgcagtcgtggtgcatctcggtcaggggccctctctactccgccatgttcaacccgctctgcaccgtcatcgccaccgtcgtcgccgccgccttcctccacgaggagctgcacatcggcaggtgaaaaatcgatccatcaattggtctaatttcatgtaatggagttgttctaacgacgagatatttggttaatttgtgtcagcttgttcggggcgacggccattgttgccgggctgtacatcgtgctgtggggcaaagcagcggatggcggcggcaagagcggcgggagtg

SEQ ID NO: 20380 - DNA, 1992 bp, Oryza sativa
ttcctgcagcctagaaaaaacacacatctgaaaacattgaagcaatactagggttcctacaataatcctactgttggtttcacaatgtctcatatgaagacttttgctcttggcattgttgtccttgctacactagttcttgcatctgagagtcaaatttctcgtaaagacttaagcatcgaccttggtggcggtggtggtattggaattggtaccggaattagtataggcataggtggtggcgccggtggctccggctctgggtctggttcagggtcaggttctttctcaggctcaggctcgagttcaggctcaggctctgcttctgggtctggctcaaggtcgagtgctggttcaagcgtagggtcatcagctggatctagcgctggttctggagcaggctcatatgctggctctggtgctggttcgggatctggttataatcaaggtcaaggaacaggtgaaggtgaaggtgaaggtcaaggtcaaggttatggctctggccatggagcaggcacagggtcagggtatggcgagggacatggtgaaggaaatggctttggctcaggatatggtgaggggcatggcgaaggctacggtgaaggaaatggctctggctcaggatatggtgaggggcatggtgaaggccatggtcaaaggaatgcctctggctcaggatatggcgacgggcatggtgagggccacggttatggtcaaggatctggttatggtgaaggccatggctcaggacatggccaaggatcagggtcaggctatggtgaaggatatggtaaaggttcaggcaatggatatggaaatggttcaggctcaggctatggtgagggccatggctatggctctggttctggccatgggaaataagacaattaattgttgaatttgccaccatgccagtgtctataaatttatgtttgctcatggaaattctatatgtataaaaataaataaataatgaactcccgttgttaaaggtgaacaaatttgcactcccaaagatgaatgttgactgtcaagctgtcaacattcttcttgcttgacagtttcaagtgtaagggcaagcccaatgtatgtgtgaaccggggacaataaggtggggcccagtgcaggtagcaatagctaagtctctcttcacaatggttagtgtgagtgggaggtgttaaagtgggtcccggtggtcccaccatgtaaaaaaaatatcgacacctatctacaaccatggagtcattcgcgcgagaaaaaatcagcgtcctcagttcctccgcccgatccctaatttcactcgatccccaatttctctagcggcggcgcggaaatttggccgcgtctacctcacagctgctcctgcccatgccttatccggtcgccgagatctgcgaccggcgggagcacctcgccgtgccgcaactccgaccttgtgccaccatggccttgcctgcagatggcgtcgtgctcatggagcctgatggtctggcggtggtcgccttgctgaacgaggtccacgttgccgtgctcctccgcgtctgtgccttgacgagtacgcgtcgactccgtcggggtttcagggatgaggtgattgatcccttcttcttcatgttcttgcttacattccatcgggtgattaaatccatgatttgtttttggttgtgcaagtcttgccaggaagataaactatgtttgcatcatgtgaatcgttgctttcaccttcccatggatttttggttgagcgtttagttgtgcggcatcaaatcttaataaaaaaaactgagaaacaatacacttgtgctccgtcgagggattaatgcaatagtactgctgcatacttcttagcttgtgatgtagtgatgcagaggtcatacaataggctagtactaagggatcccttctcaattacgaatacaagtaattttgatgatttaaataaaaaagaaaaatacaaggttcataatggactgataaactctagttttattg

SEQ ID NO: 20381 - DNA, 704 bp, Oryza sativa
  unsure (1)..(704): unsure at all n locations
cctcagtctcaaaacggacacactttttcagctgttcgtagcatccaattccagtgttagaaaaagtacaccgaaggaccctcaacttgtgagccagataaaaatacgtacttgaaccgtaaaaccagatatataagatcccttaactatacaaaaccggtcacccgaggtcctagggcagtattgacgccggttttgtctcacgtgacggctgagtcagcatgggacccacgtgggtcccacatgttaggatgacacgtcatcatctctctttttccttcttctctcccttcctctctcctctcttctcgcttggatcggagcttcttgtggacgcagaggaagttgatcactgccatgcggacgacgtcgtcgcgtgcgcggatgctcgcggggacaccgaagatgaaggcgacccgcttcttggactccctggcgcggacgccgatgtgccaggcgcggaagaaggaagggggggtggagcgcccagcggaggaaggcgatcatcttcttattgtttctgcagacgttgttcctgcagcttgcagcgctcgcnnnnnnnnnnnnnnnnnnnnnnnnnnngagctcgccgtcgatatctcatcctgcaagcacacgcaacgcaacacacagggtggctcaatcttgatcgccatgcagaagcagccattgatgcatgcaagctatctagctggctagtacca

SEQ ID NO: 20382 - DNA, 1536 bp, Oryza sativa
agatgccccaccaccgccacctcactccgtctgcctcccacgaggagcacgagaccccaaacccctcgctaaccctcctccaatgcagctcgccgccctcgcctccgacgagcccccgccgccgccgccggagcaatccccccggcggatcgtggtcgcccacaggctccccctgaacgcgacgccggaccccggatcccccttcggcttcgccttctccctcagcgccgacgcccacgcgctccagctctcgcacggcctcggcctcgcccacgtcgtcttcgtcggcaccctccccgcggaggccgcccgcgcgctgcggcgctccgacgagctcgaccgccacctcctcgggtgcttctcctgcctcccggtgttcctcccgccgcgcgcccacgacgagttctacgccgggttctgcaagcactacctgtggccgcgcctccactacctgctcccgcacgcgccggcggccaacggctacctccacttcgacgccgggctgtaccgctcctacgcgtcggcgaacaggagcttcgccgcgcgcgtcgtcgaggtgctctccccggacgacggcgacctcgtgttcgtccacgactaccacctctggctcctcccttccttcctccgccgcggctgcccgcgctgccgcgtcgggtttttcctccactcgccgttcccctccgccgaggtgttccgatccatccccgtccgggaggatctcctccgcgccctcctcaacgccgatctcgtcggcttccacacctacgactacgcgcgtcacttcctctccgcgtgctctcgcctcctcggcctcgcctacacctcccggcacggccgcgtcggcatcaactaccatggcaggacggtgctgatcaagttcctctccgtcggcgtcgacatgggccttctccgcaccgccatggcttcgccggaggccgccgccaagttcagggagatcactgaggtggagtacaagggccgcgtactcatggtgggcgtggacgacgtcgatatcttcaagggcgtgaggctgaagctcctggccatggagagtttgctcgagacgtacccggcgttgcgcggcagggtggtgctcgtccagatccacaaccccacgcgctgcggcggccgcgacgtggagcgcgtccgcggcgagacggccaagatacaggcgcgcatcaacgcgcggttcggcggtccggggtaccagccggtcgtcgtcgtcgaccgcgccgtccccatggccgagaaggtggcgtactacgccgccgccgagtgctgcgtcgtcagcgccgtccgcgacgggctcaaccgcatcccgtacttctacacggtgtgccgggaggagggccccgtcgacgcgaagggcgccgccggcggccagcccggcacagcgccatcgttctctccgagttcgtcgggtgctcgccgtcgctgagcggcgcgatccgcgtgaacccctggaacatcgaggccatggcggaggccatgcacggcgcgctcaccatgaacgtcgccgagaagcaggcgagg

SEQ ID NO: 20383 - DNA, 581 bp, Oryza sativa
cccgatcgtgtgtatataaccgcctcgccccgcccccaccgtctcctcgctgtgagccgccggccgcctgcgcacttgagctccacttcctctcgcgggaggcgtcagccgagagccacagccaacagcaatgggggccggatgggaggagtacaagccgtgcgcggcgatggtggcggcgcagtgcatctacgcggcgctggcgctctgggccaaggccgtgttcaccgggggcatgagcaccatggtcttcgtcgtctaccgccaggccatcgccaccgtcttcctcgtccccatagccatcattgccaacaggtaacccatcaaccaatttatatttcctttttgtttttcagaacctcaatctagaagaagatgtgtataatgaatctgaaacatcacttcttaggttggttttttcgactgagggagtacatctctcgagctgtcaaacttgacagtttcatttgtacgttcattcattaattcatgcatggtgtctgaaatgatctgcagaaggaagaagaaggagacgaggctaggaatgacgggcttctccttgatcttcgtggcttctcttt

SEQ ID NO: 20384 - DNA, 1146 bp, Oryza sativa
tgccagaggttggtttcagtagaattgtttggacattctgatcattgcaacgaggtctcgtcagatatgtcgttgtttcttctcccctttgctacatctgcatcctgcattgtcagtaacgttcacttaaaatcttcagattgccatgaacatagctgttcagacgcgcagcaggcaatgctgacagtaacatctgcatctgcttctccttaaaatattgaacaggaatatggtcttggaaaggtcaaaggtatggtaaaacaacatatttcgtcaaacacatcaggcaatgatatggtaaaacaacaggtaatctaaacataggttaagcaaaacgaaacaaaattgacaggcaaaagcaacctctgacgcacagctcatcactgtcccaagtccaacaaatctttgatttctaaagatttctccggtgcaaattgcacgtttattctgatctttctcactgtttctggtaattgctaagcagtttaagctaccattttcgcagcaagcaaggtagcttcttccccgatcgatggatgcagcaatcaatcttactcacaccggaggagggacttgatatcgaaatccgccggccgccggggagccgccgcggcgcggagccgggacgacggcgacgagaaggccaggccatggagcatgtcgacgacctcctccttgtcgttgaggtagtagctcgccatgctcggcttgttccccaccgtgcacgcaaacacctgcgccgccgcaaggagcgcggtggtggtggtggtggaagacaaagcaccgccgttcttgccgccgccgcagaggctcgcgagagccccgaacatgtcctcgtcggagcggtcgtccccgacgcacaggacgaaccccagcgcgccaccgcggcgcgccgccatggccgacacgatgcactccgccgcgacgcccttgctcacgccctgatcaagaacgtgattgatgatgaacgagcccgacggatcggatggaagatcaccggcattgccgtttggtgatcgttacgtacctgagggatcacctcgacgatcttgtaaccgctgcgcacggcgacgggctcgctggcgagcacggtggcgaggtggtcgaggagctccttggcctgcaatggcgccagcctcgggtcgg

SEQ ID NO: 20385 - DNA, 2281 bp, Oryza sativa
cagcaggaacggctgcaccgagaagggcgtcgacgcgaacgtccgcagcacgaacggcacgtgcagcgactgcatcacgtccaccacgtgcgccaggaacacgaactccggcacctcgtccacccttgcacacacccacaccacaccacaccgtccattcgtcagcttctctgcctcgccgcgggtggcgcgacacgggtctaattaaaatcgtcaagaaaaagagaaaccaagagcagattctgtacgtttttttttggccgtgccagccgccggcgatccgatacggtcggagtcgcggccggcgacagcggcatgcagcgtttaaaagcgagagacggttggatggcatgtcacggtcggggtcgctccgtcgctgtacgtaacgtgtgtagcggatagatcattacggcgaacaggacggtctactcctgtgggcacctgtcctctcaagacggatacatacactaatttggccctggtccaatcgtgcactaatcatcggcacgcatgcaaaaccttccgcgtacacatgcatcgttaattttccacaacaaacttgcttaattactaattcgagctttaacggcttgagtgattttacgataattaagaaggtattgtgagttaagagttatggaagatatcaaatttgcattaaaaatttgtatctccgaggaactgtaaaatttctctaacggcttgcggttgatctgagaaaacgcatgatgcatgcatggtgcctatcaacctaatctctcttgctttttttctgcaaagactaaaaattggttggattggaacgctccctaacggcaggtagctcgggtcgtccatgcgtcacgcaaaacgcaatcgaacagcagcagcatgtgaaatttaaggccggtgatatgcgcatatctcgtgcatatatgggccataattaaacacaatccaaacatctctctcgcgggcgatcttaattaaatttcgattcgatttgatttgattcatacctgcgctggttttcttctgcatctcccaggactgggcgtcgagggtgccaccgatgaggtcgaacagcggcatgaacaggcagaagttggcatcctccttggtgtgatggatcgtgtggtacctgcagggattcggaccagcagtcacacacacgcgcgtacgggagagaaccaatgatcaggaagcaaattaagccggtgtagttcagagatccgattaatgcgtgtgaaaaaatgcgaaaagggcatgcatccaacgcatttaatggtcgtctgaattgcgtacgcgattggatgaagacatcaaccatttgatagttcattcatgggatgaatggtgagcagtgaagtggttagggtggtcgctacccggcaagaattaattagagcagccgggaagcttaattaagctgcctgttcttagggagatagagtttggctcgtctgccggcttttgttgccttgcaagtacagcactacaggttgtttggtcgatcaggttcatcagaatcactgcatgtctctagttggaatatttgcagccagagccagtacatgttgttggtcggggggtttgtttccgttaattttgatgaagatttaaattttgggtcagaatttcgaaactgttttctgaatttgaaaaaggaattgaaatggagtgtacgtacgttggggtgtagataaggtatttgaggacggggagcgactggaagaggccgccggggaacacctcgacgttgcagtggcccatggcgcggaggttgtcgaaacccagcacgtaggcgaaggccagcgcgacggagccgtgccccgccgcgcacgccgccgccagcggcaccgccatgagcgcccccagcaccagctgctccagcggcgtcgcgaaccccgctgcgcatgcaccggcgatcaattgacggagttaattagcttcgatcgatcgccggcggcggatcggtactcgatctgtgggcggcgcgcgcgagatgcatgcttacctgtgaatggctggggcaccttggcggagtggtgttgcaagtggtagcaggagaagaggtggccgcggtggaacgccctgtgcgcggcgtagaacaggggctcggtggcggcgacgtggaggagcgcggcgacggcgaggcccctggcgtcccacagcgggaggtgccgcagcgacgggaacgcgtagaacgccgccgccgccatgtgcacctgcagtatcaagaagttgtccctgcagaagcaaaccccaacacacagattattcagctggctgatcgatcgag

SEQ ID NO: 20386 - DNA, 4496 bp, Oryza sativa
ccgtgttttggatcgtcttctcatggagtcaggacaaccttcttttccccacttttgtgtagtacgcgtacatactatcggatagtagcaattaagttcgcgtttggcgtggtgtggcggatcgatgggcgacggcgtaaccaattctggctggatagtagccacgcgtaaccaacgctagctagctagatagtagtagccacgacgtctgccgcgtgcagggttcgttcaatcacctagcgaggaaattatcctaaactgatatcagctcgtcatttacatgtcacataaatagttataaaaaatattaatttatgatatattattccacaaaaaagtaacctaaaattcaacttttacatatcaaacgaaattccaaatacccgatacgctcattcagagagcgaatatgtgatatataattcgaaattagtcttgcatgtatgtttcatcacgaaacgtgcgcgtatgcttctctccttaaacattgtcggctctttttattttttattttttgggcagccatcaatggagatagagagatcgatggagatggcgcattcaatttgcaatctttaagacaaggcattgcggcattgcctgacgacgagaaattggaaacaaattcagaaaattaattaatgtatttcacgtacaaatcacactatgcatgtataagtcaaaattcctacgttctaaacgtacttggtcagttcattccagcagtttgtaagtcctaaggattggattattactgtgcattatctgctccacatacacccctgtcgtcctcctgtcgccagagttcacaggttgaggaaggaatcatagttgagaaagcctgtaggtttttcttcgtcggcgttcctgtgccaggaggcaggcaaaaaagtaaactttgctaagctatagattaatgacgcaggttatatgggttaggccctcttcgtttcttctgaagcacaagattaaattttggatactcgtgacatgcttttcaaactgctaaacggtacgtctcgtgcgaaaactttatatatgaaagttgctctaaaatatcatactaattcatttttcaagtttataacaattaaaactctattaatcacatgttattaatacatcgttttacgtgaaacacttaatttttatcttcatcttcatcttcatctttaagaggtggtgtttgaatctcctgaagatgaagatgaagataaacatagaggagcgagggttgtatatctatagtagaaatatattcatgaatgaagtctggagtcatcatcgaattaacggtataagcagacggcaggccgaagcagagaatgagacgaaaacgaaaaaaaaaacacgatgtaacctagtacatatagttttttgatgcatcaatccacaaaagaaggtttagtgaggagtagccctaagtgcacttgccctttacattcttctctcagtttttcttttgttttgcttcttaggtcttctcgccttaactcgacggtctaatgtcggatgcatgtaacttctttcaatcttaataaaatttggtcggtgtttcttccgccgaaccggcaaaaaaaaaagaaaaccacaaaagaagatatccctaatttatcgggcgcattatccgttctcgttcatccatctaaattaaagttgtaaagcggattttctttaaaaataagaataagagttaagcacaggagcggagttacactgtggtccatggaccaccatagaaatctagcccaaggcccatcacccctatgcgttacttctagaaaaatatcaatggcaagttggcaactgttttgcttcgttttttcgctgcaacaagcaccgcgtcctttcgtttccatcgcaattgtcattcccaattttcgatcgcgcgagtgaatgagtcagcgacgacaactaaggcagtgaggcacgaacgtgtgacggcggcagccgcgggcaggcaggaagcgcgcagcgccgcagcagaccagcggcatccagcatggagcaagcagtcagcagcactcatcgccagcaggcatgcagcaccacagcacaacacggcagtaggttctcaacttctcatctccccctgcagcccttgcttctctctttctcctctaaaggccctaacagtaggaattttcctttaggttcaaacgttcaatctcatttcaattttaggatatccgattggagttgggatggtaaattgaaaccttgcaatcctgtataatcccattgtagatttgctgaaaaatgaagaggggtggagatattacatctcttttttagaaataagcaacttttagacttatttattttaagatattagtaagacctctttaattatttgatgagaatatggttgttaaattttatctctgtgtgtacgtcggcatgttacatccatagtgttaaaaataataagtttacatctatagtgttaaaaataataggttgagttggacaaccccaccttgaaaatatagtgttaaaaataataagttgagttggaccaccccaccttgaaaacctggctacgccactagttaagcagatatcctatttctttttgttgagctcacaaattaaaattaatgcagcatttgcatttcattaggagatgaaaaggagagggattaattagtgcatggtgcattgtgtccctactgtagcccgtggagccatggtgaaagctgcgccacgccattctcatcaagcgatggattcacacacgccgctgcagtagcgtgctattttttttaacgattcgtacgaagttctacttatagagaaggaaaaaaattacaagattataacctaagagggtcgtaaccaggaaaaaagaagaaaataccaccacccacacaccgacagcgccaacacacaacccgggagaaggctagcactggatcggccgccgctaagcgtgaccgaccgccataagactaataaaggagcacagacgagatcgccccctaagggatgccaaaacgacgtcttcaagaaaagaagcgacagaaaaaccattgccgccgtccgtcggggctcaaaggagccaagattgggctttcgcccggcaaccacccttgaagggtgagacagcacggcaacgccctcaagaggggcatcgttgtcgggccagctaatgccgggctgggttttcacccgccgctcaccacctgtgattcaacggctgacgcaccgatgctccatcaccactcaagctctgccgacatgagggacccctgcacaggcgtcccccgccggccagtcttcgtgcgccgaagaccgcgccacacccatcggcagctcctcctcacaccgaggtcgcctcctccatcgccggctgcgcctctcatgccaagccggcctcctccaccggacgcgcccctcgcaccaatccggcctccctccctcggccgtgcctttcgtgccaagccggcctccatctccgccgcccgcgcctctcgcgccgagctggcctccgatgccatcggctgcgcctctctgcgccaagccggtctccaacccctccttcaaacgatgccgcgccgatcagatgcagccgtctgccacgccctcggctagccgttcgaggccgccatgccagtcaccgccaccgcagccccagctaccgaaaggccctgccgcctcgccgtcgccatcctcacttcctccgccgcagccacgtccatggtcgccacggccattgccacaagccgtccgccgtcgcagcctgtagtcaccggcacccgctgtcgctgcccgcgaggccactgcatcctccgccaccgtcgccagctgccgccgcagtaggcaacgccgcgagcacagccgccaccgccaccacgggccatagccgcggctgcctcaaccgctgccgtcggccatcgccgtcgactgccgccgccgtcaccacgacggcacctcatccccgctgccggcttaggagccgacctcccgcgccacccagccgtgcctcgccgcctcgtgccgcctcatcaccgcagccggctcgagagctggcctcccgcgccggggaggccggattcggacgagggtggccggatctggccaggggacgccaaatctggtgacgccgcgtcgctgtcgtcacccttgccgacaccgtctctgcccgttgttctggtcgtctccgcctcgccgtcgacgctgccgctctccccgttgccgccaccactgggagctagcccttcgcccagctccgtcgaggccgttggcaccccagatccaggtggggtcgtgggctccaaaccgcgtcctcgggggaagaaaggaggccccgccgccgccgtccttgcggccacgcagtttccagcggcccgctcgggtggcggcgaggcgaagaagggaaggaggcggggtggtagtgctgcggtggtggcggtcgccacccgtgtcgcccctgccctagcagcgacacgggggcaagaatccttaattgcagacattatgcatagaaaagtttt

SEQ ID NO: 20387 - DNA, 775 bp, Oryza sativa
ttgcttcagggtttcgtgcaccgttcagcaccccgccttcctcggctaggccttctgttgtgccccccacaggtacttaaaaaaacaacattacttcgacaatcaatttacatacattttatgtcttagcttacaagggtcctgttgtcgatgtgtaggtttcgcccagttcgctataacgcaggccgcccacttctcccaggctgcagggtcagcgtctcaggtagctgtgtcgacctcgcactcagcgcagttctggcagtacaccgggacttcgtcacaggcagccggcacgtcgagtcagggtccaccactggaccatgctgggacctcgtcggaccgcttgctgccttgcaccttgctcttcgacatcactgacttcgacttcgcttcaggctcgacagaggacgtcattggcccctcacagctgggaggcgcaccgccggtgcagacgcaggaccaggcgcaggccactcctccgcgggacactcgtgctacccgtgctgtgccaccggatcgtttcacctactcccaggaccacgtgcgagcacaggcccggaggaccaagcgtggtcgcggcgcggggcagggccagtagagcagtcttctctttgtttacttgcttcactttccagtactgtatgcttgtgtaatgactacgttgttgttatatgtgcacgatacctttcggcgcatgcacgatacctttcggcgcatgcatgactactttctgccgcaccgatgcagcctcctttattcgcgtggggctgcagga

SEQ ID NO: 20388 - DNA, 2969 bp, Oryza sativa
acataaaatggcatccaatggttggacatgaaggatacggggcatagccgcatagggatacatatgccatctcaaattctgaaatgtacaggttgatgagctcattcgtgcacatcgaagaacgaaaaaaaactatagattagagttacgacttacgacttatgagtagaggcctcgtagtaatcctatgttacaaaaggatgaaaagctacgaacataatgtgcacaaatgatggcaagttcgcagccccaaaccccaaacggacaaaccaaggaaaccaaaggattcaggattcaggaaaccccaaccccgctgcagattcagtttccacgcgagagagagaggccccagctaaccacacgcaactgcttggcgggagagcgagaggggagggggtccgaaccggaggggagcgccgcggctgcagggaagcgtcggggaggcggagcccagccggggcccggggccaccgccatctcgtcggcgcggtggccgcggtggttgagcggtggcggcggggcgtcgacgagcggagaactcggcgtcggaggtggggagttgcaaatgggccgggccttcgcgtgcacatccgagacttgaaaatctctcggccttaaaagacagcccatgtgagccaaatgctaattggtacggcgcgtacgctgccaaaagcccaaagcccatacggagtacgtgtgtttctttcttttcttttctttttttcttttttagcgcagccacgtttcctttttatttttttccttttttcatctcaacttttgaaaactttcaactgaaatttgaaactttcaattcagttttgaaaactttcaacttaaaatttgaaaactttcagctcgaaatttgaaatttttgaagtcaaattttgaaaactttcaactttccatctcaacttttaaaaacttttaactaaaatttaaaactttcaactcagatttgaaaactttcaacttctcatctcaacttttaaacactttcaactcaaatttgaaaactttcaactcaaaatacaaaaacttctaactcggatttgaaaattttcaaatcgatatttttggaaaactttcaaatcgtattttgaaaatttacaaaatcaattgtttttatttttaattgggaaattactgtagcattctcactaatctaccctataattcaccaactacactcttacaaacctcattcatcaaatccgatggtcaagaatgatcgaatccaatggttcgagatcgtcgtggaccctctcccttccgcacgcgcttggcacccacacctgctgcattcctcctctccccttccctcacgtgtgtcccctaatcacgccgagaaccccgtctctgccctcctctctctcgcactcacccagctccgccgatgctgcaccctcacgccgccgacgctccgccatcgcgacgccgcctcgccacccgcgacgccgcctcgcccctcatgccaaccgccgccgaccggcgccgccaccagcatcgccgattctccatcgcgccctatcgtggcctgcatcgccgatctaccccgaccggtgccgccgcccgcatcacccatctactccgtgcctccacgtcaacctccatcgcctccccgggctcgagaccgtcgccatcatcgggaagaccaatggcgccaacctcttcgcctgggatgaccgccggggcctccttgctgtcggctgctggaagcgcctgaccatcttccgccttgacaatgagaattcagctccgcattgcctattctttctcggttgtgatttgagtgtttatggctatggtttgactgttacatcatttgggtttcggtggaaattgagatggcctgttggtagtgctcaatttggagaatgggaagtatgatacgggggattatctaattaggttgaaatagatattcagtggaaattaaatcaaacactggaagagttgcttccaatcctcactgttctgttgttcttcttgataatagctgcttctagattcttgcctgatgcttgcttggttgggttttgtaaaggattaatgcctggttgtcgtgcattgtatccggcaggagtgccccaggtcagagctacttgttagtagaataattgaattcttcatgctgataattttcaggtgcttttagccacctgtagcaaatgttgactgcatgataaaaaaaactaaactttgtttacttgtgaattgttgcattacggtgatctacaaaaatctaccttttcattttatgtttgaactagcggtgtcgattttggttaaactttgacacctgaaggatcttagcttgaagataaatgtgcatctgctgttttagatgcacttggttctgtttagggaagattaactgtgattctttagttactgattattagtctttacagtctagcgtgtgaaaccgtgaatgccacttctgcgtctcattcacttgtgttcaggttttagcaaacataattcagattggtctgtttggcatagcatatgaatgattattgaagctaccagtagttgaataatactttgaccataagtagcacctcgaatattttatatgcaggattatcagtacttgtttgtgtttgttgcaccgtcttttatttttgtagccattgtctcatgatgaagcaagatcattatttgcgtttgttgcaccgtatgtcaatgaagccaaggagaccaagagcagtagttctctacctcaaaaggtagctgaatctgaaatagaattttgccttttcatttatgttatatattttcctttctgtattgagcttggagatctcaacatgatttaggatttatacatgttgattggtgaatgttagcacttatatacatgttctatttttttttcttaaagataattgcttttttttgtatttcgttgtttcctaagatgtaccaacatttcttaaagacgatttcctcacggacttgct

SEQ ID NO: 20389 - DNA, 617 bp, Oryza sativa
gcataaacaaaatatatcttaccaaaattgtagtaaccagttaactcatcatcaggcaggaaagagttaacgtcagagaacggggcaccatggccaagatatccggaaccatagtctgcgtgggaggagccacggccatggcgttcttcaaaggcccaaagcttctgaactacacgcttggtgacctgaacatgctcctccactcgccggcgatcagcaagtgggttctcggcgcgctctgcctcgtcgtcagcagctcatgctggtcactccggctcatactgcaggtaatttcttttacaagtgaatggcatttcgtagccagctagcttgatctgttcttcattcacaacttcgacttgatcgatattttttttccttttttctggttacgatctttcaggattgtaatcttatattttttttctgctctatcaataaacttcgcatcgtctcgtgcgagtcattaaaaaaaaaccttcgacttgatcattttctaatattttgatttttcaggtgccaatctgcaaattttatgtggatcctctgtctctgtcggcatggacctgcttcttctcgacgctgcaatgcgcagcgctcgccgtcttcctggtccc

SEQ ID NO: 20390 - DNA, 769 bp, Oryza sativa
atggcgccattgctacgggacaccgacaccttcaagttgccattgccgccgggcatgtcggcccctcgcgcgacgccgttgccgaacgcgtccctgagagcgaccgacacggacgccttcgatccggcgacgcacgcgccggagtaggtccaggaggccagcgacgccgacgggtgcacgccggcggcggcgaccgcgaactcgagcgtcgactcggcgacgccgaaccgctcctcgccgacgagcacgacgaagtcgccggcgcgcagcggcacgaacgtgatgttccaggcggccggctcgccggcgtggtgcgccgcgacgtcggcgatgtaggtgctgttgccccgcctgccgttcaccgtcgccgtgaacgacagcgaccgccgcgcctcgtccccgggcgggaggtcgagcggcgtgatcttgatcaccgcggtgtcgccggcgacgaacgacgacctgtagtcgagccaactgaacgcgaacgacggcggcatcggctgctgcgcccgcgccatcgacgcgcgccgtgctgctgcgacgacgcagaggaggagaagccagagaggaggcaaggacgagcgcggcgagcccatggcggccggcgttcttggccggtgtggaaggacgtggagggctgcagggtggatgaactccgacgacggtgttactgatcgcaagtttctgcaactacatccccttacaaagaagttttggcaactgcaaggcggcaatcggcctgcaagtttttgcaagggctgcagga

SEQ ID NO: 20391 - DNA, 1784 bp, Oryza sativa
tttttgtagttaaattccattgaaatcaattggtattgttgtatggctaatactgtccatcacaactgttgtcttgttacatttatcagttgaagctacatgtgaccaaattctttgtagaaaaatagctgtatgatagatgtcagtgcagattttgcctttatctccgtgctgcctcatgttcttaatattctccctgctcttacaggtatttgatttgtttgacacaaaacacaatggaattttaggatttgatgaatttgctcgtgcactctcagtatttcatccaagtgctccacttgatgagaagattgactgtgagttcagacgtactgtagctagatattttactcctcatctatgcagttctaaattatgtattgtcacaataatggcttggagcttatttgcaaaagtatttattgtagacttaaagttgatagtctgacttctatgctgtcctccaggttttctcttgtttacttatcttttctcaacaaaaaattctgaagaagctatgcaatttttgcagtttcattccagttatatgatctcaagcaacaaggctatattgagagacaagaggtattgatgccaaattactcattgcacagtgctccttcaagctagcatgttggcttgtctatatggctcacacacttcgattaattcaacattttcttttattgtttctgatacatgaaatcgtggttttattcatgtaactattctgtacttgatggtctatatttgttgttttgttatggcatactgcagaaagaaatgtcattttttcattaatactgtcagatcactgtcgttgaattttacaagattttaaatcacgtagtagcagcaatagcttaatcatgtgcgtttaggtgagttaggttttgattccaatgaattgcactgggctttgttgctgagagatgatgactatatctgccaatctttaaatagctgatatgccattatcaaagctaaatattttaaatagttttgttgtggatgtcattcttttgggtaggatatttccttttacttcatctatagtttataaaattgatttatcaggttaagcagatggttgttgctacacttgctgagtctggaatgaatctttctgatgaaattatagagagcataatcgataaggtatgttacggtttccatttatattttgttgtgtttggttataccctgtattggatggtatttttttagttggtattttgtggtaatcagtaattctcagcctgcttatataggtcagacttttgtatagcctagccttatcatactacatatatactgtatttactttgcaaatgaaaaactgcatcggtatgtttccttattatataagatgttggtaaaaaaaacattgaacttcttggtgaaacatagtaagaaatgtgccaatttgtaacaataagatgacacgtactaaaagaactataaatgtgtaatattatcatagtattttatgtataaatttactcttcattttcatccaaattatatattaatatattatagacaataatgttcgcacaaattattgtggtttaattagatgtgttctggatggcactatttttaaactgatagaagtaatactgattttgtgctattacttttttttaatagatagatatttagatgacatatcctcaataggcttggcataagatatggtcagtttatcttgtttctttttaattgtaacttccaatgctaaactattttttcttatttgtagacatttgaggaggcagaca

SEQ ID NO: 20392 - DNA, 1385 bp, Oryza sativa
agtaaatagatacctgatcacttgaacttgagctttgatggtaagaacatcatcaacaacaaagccttcatgtaatttggttagctccataaattttttccatccccaatcatgctctttcttccaaaaccggtgcagtgtatctgaaatattaatttctttaaatttcacattaagaattcaagtgaaattacaagaaaatcaaatagtgtaccaaactcaccagaatacttggatttcttagggtctctattaattacagctatggtaaactgtgcaaagtgactccatcctgaaacataagcaagccatgcaaaggattacgtttctgccgtcaaaaaataaaagcttatcactgctggaggcatctacctgggagcagcttatcatggttggctacacaaagaaagagtgacaagtgattgcaaacatcacatccttgtgggtaaatcaagatgtacctgaaaaatcaaccaatagatctcaaaattgtggtgcacaagtaaatcttaagcctgtacgatctcaaaatgtggtgcatccgcctatcaattagtaaacatgtaccaatgaagggaaaaaaccattaataaaaaatgttaccacctattgaacagaaaccaatagaaacagaatagataaatatatcatcccttaattctgtgtaattgcgtatgtaaatgaaataataaggtaaaatagcatccagaagacagaatagataaaagaaaaatgcaatgtactacagaccctagaaagtgttctaaaagtcggcgctaggcgccgcctaggcacccattaggcgctaggagccaggtagctgccgcaattagacattaggtggtgttttattgctattttagtgtgatatagtctagtttttatgtaatatgctggctaatttcttaggtttggctaattggtctgacctgggtgccccctaggagccgcctaggcagggcctaggcaccaaataggcgctaggctccacccagccactgactagcgccttcttgaaccatgccatagaacaaatagcgcagttttatatagaaaacaactatatcttaagacaaaaaaaactaattacatgacacatatcaaaatatttaggtataaaatatctgtatttcttgtgatctgtcacgttttataatacaatatcttttctctatagcactacaagctcaaatggtcatgtcagggaccaagtacggcttaatgaactggtatgaagttgctagtgggtagttagagagtgcctctaaaagggcgcaaggaaaatgtgatatcttatgcactcatttttcaacaacttatttgtacaaaggttgtgcttagtattgtgaatggtctaccctaagtactacaaccactaattcgtt

SEQ ID NO: 20393 - DNA, 2081 bp, Oryza sativa
tcttgttaatttgggaaaaattatcaatcctccaagtgaattttccataaagctcagaaggccttggccctaataaaagaaaatgaaaacaacaaggactgaagcacaaatatgaggaaatcagtaaatattagaaggttcaattatcacaaacattaatccagtagaatcctcaaacaggtaatgcattaattatatcacttctcaacaccgtagttcccaaagctggattttgactaggaggtctaggcgggagggtgccatcaagtgccaaagcatctgccttttattagacttactagttgaactagctgtcatgagatgttgtatagccattgaattttatttaaaaactgctgtaaaattatcgagaggttattgtaacagggtaatatagaaacaccttgctaataaatatgcatttgttgtagcacatagaagcgacgtaatgcagaaccctatttacaattatggaatgtgatggagtgttggcgggtcggaggaacccccccccccccaacacacacacacacacacacaaaaaaaaaatcagaagcatgggaagatatttgattcctatggctgtacatactagataactgaaaagaacaatatttttcatggttcttccacaatgatacattaggtatttaggccggctgggcaataaccactagtatggaaagatcttaaaggtaatgcattaagcagaaacaggaaataggaaagcgaattaaagaacgaaccacaatcatcatcatcactgtccgagtaagctggagaagttgatggtgttccattctcaacttgctcgctcgatctccattctgctaaagattccccagaatgactttgctgatcgcttggcaactcttcagttgacgaggatctaccatcccctgtatagtcctcaatcaaagtaccagccatgaatcaatcttcagggaaatgcagctcagctatccgcctcaccctttttgcttctataatagtgaaccaaaagccatcaaagttcagcttcaacgtgcgctgacaccacaaaatgagaaatcaacagaggtagacctaaacctaaccctcgggaacacaacagctaacagcgagcaggtgctatgcttcactagtttgccagtaaaacctaatacatcacatatcaagcaactgcaagcgactaatgtatacggaacccgaagtaagacattgtggagcacaaaggaacagagctgacatgagatcgatagtgtcctaaggtgctatcatataaaaaactacaattctgataccatataaaacttataattctgatatcatgtagaaactattataattccgaaacaccctagtcattagggcgccgctactgtcatataaaaccacctctaattccaacccaacgatctactttcggccgcgagaagagtaaaacctaagcagcattaaatcatctacgtcgaagttacccatttctgttctgttctttcaccctaggccctatatgcaacaactaatagaaattacagcgcgggcaagcaacgagcaaccatcccgatccaatcaaacaacgcccgccacgcaaggatcgcccctcgtccaatccaacgcctccccgggaaatgaacgccacaccgagagagagagaaaatgatagattacgcggcgcaggagacagatcgggacctcacggtcgggcaatgcctcacctcgccgggagcccccccacgaatcgcgccgccggggcacctcctctccccgcgtcgtccggatctgacctcgccaacccccctccgcccgttccaatcggggagagacctcctccctctcgctcgcccgcccacctcaccgcgcgggagatcgtcacctcctcgtcctcctcggcgtcacgcggcggcggcggcggcggtggccggggcggaggaggagatagggggggaatgggaagagatggaggggaagcgagcagcgtggtgcgtgcgccctagtcgagtcgaggagggtgtgaggatttttggcttctcctctctctctctcacacactttttttttcctgtcttttttttttgtttgagttgaataatcggatc

SEQ ID NO: 20394 - DNA, 2819 bp, Oryza sativa
taatctatctattattaaaatgatgttttttcatgttgcagtttcaatgcattctggctaggaatggatccaagtgtgcagaaatatatgacaagggaaaagactgacactgtattgaaagttctagtgaaacatttttttatagagaaggaagttacatcaaccttagtaatggactcactatatagcggactaaaggctcttgaataccagaccaagaataaaaagggggtgcccaagctagcagagactgtccagatggatattcgaagcactcctatggtgcttgttgatcaggacatgtttgtcttggccgatgatgtgatacttttgcttgaaagagctgcattagacactcttccgcatcaacctttgcctacaaaggatgataaaagctcacagaaccgcacgaaggtatgcatgatatcagcaaccctgtacagctagtttattaatatttcttattatggacaatcaatagatataagactgaaatttatttttcatatccaacttagaattaatagcaaattccttcatggttcacgctggtctcaattatttgcactcattaaattattaagaattccttcatcatactggtctcaaagatgtcttagtagctgtagtcttaaatgaggtatggactagaaaaagaaaaggttctctttactacttttggcttgatgagattttattttatgctactgtaataagtcaagtaaattgtgccttatgtggttgcaggatggcagctcaggtgatgatttcaacaaagattcaattgaacgtgatgataaacgacttgtagagcttggctggaagacactggaattttttgccttggcccatatattcaggtaagagatttgtttaatgtgtccatccagtattagttttttttttgctccataaacgttcaattacagacagtttgttaagaagttgatttctagcccttgatggtacagttgacatgctttatttctgttacttgaggctttagtgcataaatgcaagatgctatttcctagttggcatttgtggcaagacatgtcacttctgttatcagactcttttttaatctatatcttgatctgaattagttcttccttcggttgtcttgtattctcaccttataagtcttgtatcagccgaatagaagtggcataccaggaggcagtggctttgaagcgccaagaggagctcattcgtgaagaggaagctgctgggcttgcagaaattgaacttaaggcaaaacgtagtgctgctgagaaggaaaaacgcatcagaaaaaagcaggtttgtttctctttcttgtgcaatcttgctaattcatgctgcctatcaatttttttttcttgtgctaaatttgatgtaaactactttctgccacggtttaccctggccttgtgtggtcgttattttgtgtgtgaaatgggattatcaaagattgtattgttgtaaacattacaatagtattattggctgcatatgacataatgagcactattgtcttccactttgcctaggctaaacagaagaaaaacagtcggaaaaataataaagggaaaaatgagaaggttgatataaaggaaatagtaatagagagcagcagcccaccggatgataggatcctggatgatctctcaagtcaagcagaagaaataacatcaaatgcggacaaccctgaagaagtgtctgatatctctgataacagagatgatagttctgagttgcttcataacgaccttgaagacagtgaatccagtcctgttaattgggaaacagatgcttcagaaactcaagctactgtgcctgaaggtggtgaaatgaaaatgaacatgcaggaaagaggacttctttcctggatgatagctcatctacttgttcatctgattcagttccttcagttatcctgaatactggaggtgcctggacaaatgtcaaatcctcatcaaataggtatactttgatttttagcatgttcccacttctgtcaattggtatttatggcactgtattttgtgactcagaggaaacaacaggaggaataacaaggatcatgatgcacgaagtgggcttggacatggtgggttgaattcagtgccaaatggtattgccggatctagcagtagtacttctgttaactcaaaagaccaccaacatgaggtatgccatctatcttaaatgtcttacatagtgacttctgtgcattcattgggaaatgcgccataaagcagctgctatagaagaatggtcttttcaattgtacttatttctccatcaatgtattaagcatcgcaattgattgagtaataaacatataaaattactatttcaggatgacagagttgtatcacagaagaagcaaaatgcacatcggcagactgatgtcatgagtccgtccaagttaagaatgacagagtcttctgtcagccctattaagaagcaacacatcttttcgcagcagccaaaatcttcattagaaagcgccaataacttgagttcccgtgcaagtgaagcttcaggtgctgtgactgctagttcagtaatgggtgtcactaccactccaactgctcagttagtttcaaataaaggacctctgacaattcaagcaacccataatgagaggtcagttccagttgcacgacatccgcaggtgcctacggtctccaaatctgaagctcagaagcagacttccctggtaagcagtggtacagcaacccaggcaattacagtatcgaggcccttgagtgctccacaagtccctgcagcaaaacaaacagcacctgtggcttcagcagttcaaactgtac

SEQ ID NO: 20395 - DNA, 10217 bp, Oryza sativa
ctatcaccagagcacctgattgggaatgacagatcatcgttgcgacaagggttgacgtttggaactgtcaagcctgagacactcaaccagtggagagaagagagctctcagcaggcaagcagcagcagcagtagcagcagcaatgatcatggggcagtaagctcaagcaatggaggtgagtttgagaagttttatttgtttggaaagccacggagcaagcaactgtcagaaatttctgccagatctactccatttcaaccacaaggcctggtcagtgatgagtttccgcacctagacataatcaatgacttgctaaatgacgaacagtgtgaaaggcgaacattaaaggttcttcagcggagccaacaggcatttgctcgacaatactcgatgcccaataattccagcacacctgattatggcatgtttgctcaatctgatccatacctgtttgatcaacctgagcaatactatgacgaggaaatcccaaggttctataattctttgaacggtacttctcgggggctaagggagaggagttattcgcattttgatctgccttcatactccaacggccagtttgatgatatgatgatgaaccagtggccatacggccaaacagacctctccttgccaaattttggggcagatatgaatggttacccatatcagtcaagtgattatccgaattccgcaaatgggttaagcaggtacccaccctatcgacctgccaatgggcattgagcacctctaatgattagtgattgcaattcacaataatgtgttgtaatctcatgctgttttcttctgagctgagtgtaattgtaatccttccctatagttttataaagaacggctcctcagttccttattcaatagctatatttctttgctttctacattgttttttacccgtggtaaagaatctaaaatcagtcgtatacatgcatacaatctgggttagcctttcttcctttctatccatgtcctggagtcgatggcatatggtgaacacctcaatcgcaggcagactaatttgagcctttctttttcttcctatagttgcggtttagtttgtaattccaatctggatttcatggtctgcaaaagcatttgttcatggccagataaatttgttcacagtagaaaagtttagcaaaatttaaaatactaaattattttttattgaatctgcattcaatatattttaataatatatttgttttgtgttgaaaatgatattatatttttctataagcttggtcgaatttaaaataagtttgacttaaaaaaagttaaaacaacgtataatatgaaacataatatgaacagagagaatttcttttctagttaaactttgttaagtttgaccaagtatatagaaaaatttaggaacatttaaaatccaaattagtttcactaaatataacatagcaaaaattttaataatatgattgttttgtgttgaaaatactaatatagttttatataaatttagtcaaactagtttgattaggaaaaaagtcaaatgacttatataatataaaatggaagaagtattttaataccttttatccatccattaatattattttcctataaataagggacactttgtttattttatccctacaactaaagttgtcttgggatgggatgctaagagtggatttgttttaggagagaggaagtagctacgagctttcgtagttttaccgaaatatcagtaatatattttttttcattaaaccaaatgaaactattcatccattgacattgccaacatttctatagggtcagtttggacaatgaaacaaaccaaaacatgccttcttactcatgtgccctccaaatagacgcgattggactttaattgccgtcagggattttaattccgaaaaaaacaaaacaaaataaaaagagtttatcacttttccaaaaaaaccaaaaaaaggcaagaactgaaatgaccaaaatgcccccttacctcaacatacttaacattctcaaatatgctccacctatctgtggacacaaatatatcttgtgtgacaccagagggattataaatctcaactaagcaattttttttaaaaaaagtttctttttcttataataaaaaagggtgacaactgaaatgaccagaatgcccctccgtcctaccccacaatctgttctgtttcttctctccttccctcacctctactctcctcctcttcctcccccatctctctccaaatctctctccgatctgtagccgaccaccgccgccgcggccgccggccttctccccgccgccgccgccgccacctcgccctcatcgctgcgcgctcccatccccaccgccccagcgagcagctccggaggggcgcggcgcagacgcccctcccctctcccccgagcatcccatcccatcccctcccgaccgtgccctagccttctccccccatcgcgcttgcccgcacgggcggcgagcacggctaggttttggagtgggggcgacgccgacgccgacgccgacgcggcccgcggtctagttcttccttccatcggcgtccatccatctcgtctcgcatcgaattgaaggtattcatctttttcacctctcgtattggggattcatccgggcttgggaattgggttgtatacttctacccttccgtttgattcatccgggcttgggaattgggttttgcccggattactttgatttggtagtactgacataatttttttttaattttcaagagggatttgggggttcagctgaaccccctccatgccgcgcgacgctaggtcagtcactggttgccaggagatactcggagcagccgtgaattgctgatggccaaccacgacttggttctcggccatggcgaggaccccgagctggcgctggggcagaatcaccatgactttgggcaggaccacgggctagggctcggccacagccatgagctcggcctcggccacgcgcacgaacatgatctcgtcctcgggcagtcgcacgagcacgagcacgagcacgaccatgatctgggtctcgggaaccaccacgacagccagctggtcctcgcgcatgatcaccacggccacaccagtgagctcgcgttggggcatggccatgatgaggacccgcattccttggatggtcaggaccatgatgggcttgccatgacggagaatcacgtgctgacgctcacagatgcgcatcagcttgacgtcgaccagaatatggatcagctttctcttgagcaagcccacgagctcgctcttcagccagcccatgacttctcgcacggccctcttgcggttgcccctgttgttcagtcgcggaagatggtcgtcagctccgagtttcagcttgtggtggggcaggaattccctgatgtcatgagctgccgcagggccatccgcaacaccgccatcgcctgccactttgagatacagacggtgaagtctgacaagacgcgcttcactgcgaagtgctctgctgacggctgcccgtggcgcatccatgctgcaaagctccctggcgtgcccactttctccatccgaactatccatgacaaccatagttgtgtgggaataaaccatctaggccaccagcaggcatctgttcaatgggttgcaaatactgttgaggagaggctacgtgagaacccacactgcaagcccaaggaaattttggaagaaatccacaagtcacacgggatcacattatcctataagcaagcatggagagggaaggagcggatcatggcagcagttcgggggtccttcgaagaagggtatcggctcctgcctgagtactgtaggcaagtggaaagaacaaatccaggaagcatagctcgtgtctatggcaatccagatgacaactgctttcggcgactcttcatatcattccatgcatcaatatatggttttgtgaatgcatgccgtccgctcattgggcttgacagaaccattctcaaaaacaagtatctcggcaccttgtttcttgccacaggtttcgatggtgatggtgccctgtttcctcttgcatttggtgtggttgatgaggaatctgatgagaattggatatggtttctgtctgagctgcatgaattgctggagaagaacacagagaatatgccaaggctcactatattgtctgatagacgcaagggaataatcgatggagttgacttcaacttcccaactgcattccatgggcattgtatgcgcagtctcagtgaaactttccgaaaggagttcaataactcagtgcttgtcaaccttctctgggaggctgccaatgcactgactgtgatagaatttgaaaccaagttgctagagatagaagacacgtccccagaagctgtttgttggataagacgcctacctcctcggctttgggccacagcttactttgaggggacacgatatggtcacctgacagcaaatatcacagaatcactgaattcttggatactggatgcctctgggcttcctataattcagatgatggagtgtatccgacgccagctaatgacatggttcaacgaacggcgtgaagcaagtatgcagtggacaactatcctcgtgcctgcagcggagcgacgggtgcaagaagcaattgagcgtgcacggggctaccaagttgcccgagccaatgaggctgaatttgaggtcatctcgcctcacgagggaactaacattgtggacatccgcaacaggtgttgtttgtgccgtgggtggcagctctatggtgtgccttgtgctcatggtgtggcagcgctgctttcctgcagacagaatgtccaccgttatacagagagctgcttcaccgttgcgacataccgcaagacatactcacagacgatccatcctatcccggacaaaaccctttggaacgagacgtctgatcaaggccaagaagaagagaacaaggtggatgtgatcatcaacccgccaaaatccttgaggcctcccgggaggcctaggaagaagagaatccgtgcagaggaccgtgggcgaatcaagagggttgtacactgcagccgctgcaaccaaacaggccatttcagaactacatgtgctgctcccatatgaagaagccaatgtcggagttctgaagtagctgcagttttcctgtgaaaagttagaagttagagtctactccaccattcaaacttcctctttgcagatgggcacctttggttatactagatactgcttttggtttaggtgtaatttaataatgttgtgacaatactatgtgttcaaatcatatgccatggtggacctgcatgtcggcctcagctcattggatcagaccaaatcatatgagctggtgttgagtgaaaagtaattagcttaacctgctgcaaagtgaaattattttgttaaacctagtgcaaagtgcatgcaattttattgaaatatcatgtgctcaaacatgatgagtaccgcaccaaatatgtgatactcttgatgttacatcgcaagtatgactcatcgattaacctgttgtttatgtaatacctgttcactctgtacctttctgcactttcctttttcctgtagctgtggattgctgtaattgtcttgctctttcctgtagctgtgattgctgtgtactgctgatctgtctatctgtcttcctttttcatgtagctgtgattgctgtgatgctgcattttgccttgctcttgcctgtagctgtggttcctgtgcgatgctgcatttgcattgcttcatgtaattgtgattgcagcataatgctgtattggcattggctattttgttcatgaagtaacactcttattcgaagaaataatttcacaaggattttcctgggaacagtacaactctttcaagaatattatatatatatatagccttccaaacatccagatgtacttccaaacaccaggtagatgaaacattcgaagagcttcaaaaatttctacatatacatggttgatatacatttttgcggtttacaacatacacgttctgtgcaacaaaagaatcagctcatcatttacatgctacagaaattaccagtacagaactaacaaaagaaaaatcatgtgctcggtgttagctgagcttcagctacatgcggtttctgactctctaaacctgggaactgaccaatatcatgaccttcaacctggctcaagttctcatgcaaaccaattgcaaactcctctggttgttcaccactgcttgcaaagtagtcagcgatctgcattgtaaaattaggaacaagaaatcaccatttaaacgaaagaattcatatatagaatcgagttcataattaatttgttcactgctagattcgagatgtgctatagattgcagaaacaaagagcatatgaaggcaatatatttacatggtttgcaagagacattccgcttaacacagccgcttctatgcttgaacctgttagccagtcaccacagatgcctgctctcccttggggatcaaatatgcatgggactcctggagtgttcattggtagagctgcacccctgtgtttcaggcatttgaattcataatatgattgtgtttacacatgatgaaatggtaaacagatacaagaggctcaaggcatgcgttgttgtaccacaattgtactctcgtgtaaaatggttgctgaagagatcctcttgatagccctaaagcaagctctacacctctaagcatgtcttccttcaccttttccgccgtgatctttggaatgttttcctgtcatcagtgataaaatacattctaaagtattcaacagtacaaaaaaagggggcaaaaaggccttgaaaactctatcttgacatgtattcttttaattaatgtaacaatgcgtagttccatgcaactgatgatataacaaaagcgaaatccaaaataactttcagcaaataatccacctgcggaactttgtttctttttccataagcagcagtgctgaaaaatgtccagcactcgggtctgccagtctgcaaggggaaaagtttctgagtattgttggccatccaagagagagaatcaacatctttcacaaatgctccttcaaatgttccataagaatcagtttgtggaattggtagaggatcttgaaatgccgcgaggagcgcccagacagaacttagctgtaatctctgagcatagagggtataaaactcagtaagaacgaacttgtaagaagcggatatatgcctcatgagttcaaagtttgttccggcagtaaaccttcatttgtcttgtcagcagtggtagacctgatgtagagagcagacgattggcacatttccctgattagcgagtagaaaagtgaccggaaatatgatttagtccgaaagaaaagttagatatatgatatgcttcttgctaaaaaaagttaaaaaatacaagacaatgacatatgcagcgaaaaaaatgcatatggtcaggggcgaatccacgttagtccaacacgatgcacaggacaggttgaatttttcgttttcatttgtgatagccgatgtacatgcattgggacaccacctagccggacacccagagcccaagctagtcagcctgcaagcaacaaaataacaactttgtatgtctttttagtttttacgggatattgtagttggatacttatattttgctataaacattgtaagtaacattgataatcgttaaatacaacgctgctttttttattattattttgagcattgtatagatttggttgtgatatattatgtagtgtgctatgtatggacactgggtaattttttgttctggatttgcccctccacaataatcactttcttgtgcaatctatgatatctttatggcagttgcagtaaactgatactattactttcttcatctttcctagactttaccagcccaactagagaggccgcaaaaatgaagctctaatttaaaccacagtccatggagaaaagagcttgaaagagaaacaccactgggaaaaaacttgcactgaccattatgtgctatcacaattgcatcatattgaccatgtggcttctcattctcaaacaagcgccacaggccattgaacggctcaagcttgcttatccaacacggccggacaacttcaattaggtcactctgcaaaggttgaaatactactcagcaatggaatgagcagaccagaaaatgacatcaataaaagaaagttcggcatctgaatgattcggtcacacttcatactacacacttacatagctcgaactccaacaaccaaaatcacattttatcagattaatatgggaaaattttgggaaataccatcgcaaagatatgtgagttgtaaaatagtaccatcgtacgtgagaatgacatgacacgcggagcatgtcaatgacacatatgatggtatttttcagctctgcgacttttgcgatggtatcaagcggcccgagcaatattcagttctagcatctaacagtgggatagtatgatcctgcaacagtttggtactttggtgatctatgttccaagaaagatttgcaatgtgatgtcagaattgggtatacctcaggcagaatcgcatctgcaagcggccgcatcccgtcgacgccgatgtaccgcggcggcgaggaggaaggcataggcctgaaatggccgccggcgtcgagctcaccgatcaagcctccccactcgcggaccaagcccttgtccatccactcgtcgaccaccctcttgaacctctcgtcgctcgcggtgaagaactgcgccgcgtggtcgaacaccagctgctgctgctgctgctggtcgccggcggcggcgatagctctcgtcgccatcctccctcctagcccgtgcatcccctgcagtagtagcggcgagaaaggtgagtacgggatgcggagaaggtaggtgagtgagtgaggtgtgggggttaggtggaccgtgtcgaagacgacggcgcggacgccgcgggcggcgagggaggcggcgcaggcgaggccggatgcgccgccgcctacgacggcgacggatgggtcggggggaacaggcgtggagaacaccacctgctcctggtggaagctcttcttgatggcggactgccgcgagaacccgggcttgccgcgccgccgccgcggggccgggggcggcctcgccgtgcgcgcgccgctgctgctacctcctcctcctcctccggaagaggaggatgcggacgcggcgaagcgggacgccgccagcacggcggtagagcgtgggcagcgtggcgccgggaggaggagaggcggcggcgtcggcggcatcgcggtaggtgttcgacgaaatgcggggggaatggagcctggagcgggtaacccgaccgttatctgtttacgggttggatttcttttatatttttatattcctattttaactgttatttttctctgagagcacccgcaatggtaaagtaaggtgctatctataaaatatgtacatctcagcaatagactagattaatagtataccacctcaatagtatatctatacataggtatctatagctctctaatccattgcctcgtttttctctatagactatctccaggttagtagatagctttgctctctctctcttcatttaatctcttccaagtaggaaaatatgctgacatggatctctcgtagagagcctatagataaccattgtgggtgctctaatacgatagagaaaaacattactactctctcccttccattgtcagtgcagttgtgggtttccgtgtccaacatttaaccattcatcttatttaaaaaatttataaaaaaataaataaaataagttacacataaagtactattcatttttatcatttaatagcaataaaaaatactaattataagattgacggtcaaacattggacacagaaactcacagctgtacttaaaatgagacgaaaagagtatttataaaaaagtaattttaaaagaagacggattcagaatgtggtaggaaatgcgaatttatcactgggcttatttgagacaaacggatccaagaaaattgagggtagggcttatttggtttagtgccctaccaaaatattggtagtgccaaaacttaggcatatttgaaactaccaatattttggtagggtagcattttaagtgagtgggtttgaattgataccaattgaaagccaaatctcatgttatggtcaagcaggttctagaattatgccaaattaaccatgggcacta

SEQ ID NO: 20396 - DNA, 10095 bp, Oryza sativa
atggaatgaagatcatacccattggtgatattctgcagaacaaagaagcagttgtacgtgttagttggtaaacatgttaccccacaaaaagaacataattagacacaaagcaaataacatgtttcagagattgccagccagggtatttggtttgtaggtggaaaaccctgttggggcctatagtacttgacctggccatgaagagtgaatcatgataagctctgctaatcatcagcttatattcgaggttcaactgttttgcagcaaattccattgcgctgatgactgatttgtcagatagagcaggtggatcctgatttatgatcttgaactctgataatagcacgccacggttctttgatatctcaattgcggattggtgaaccttctcaatgacattattcctcctcttctcatcaatgtctctcacatctgtacaaaagataatgagaagttcttagccggcagtcagaacacgataattctttttatctgaaaacagtctcctaccaatttccacatgcgatttacttgggatgctattgattgctcctggatgtagctgcagaatacctgaagaagaataattcattatggaaaaacattatcgctgcaaatatatctttgaccattttcttgaaattctgcttgaccacctactagcttcataaatatatttcatgattaaaacttaactactccctctgtttcaggttataagacgttttgactttagtcaaagtcaaactgttttaagtttgaccaactttgtaaaaaaagtagtaacattttcaacccaagacaaatttattatgaaaatatattcaattattgatttgatgaaactaatttagtattataaatattactatatttgtctataaacttagtcaaacttgaaacagtttaactttgaccaatgtcaaaacatcttataacctgaaacggaggtagtaacatattctagttgagcatctaggctacgatgatgcaaaacattagaaaatctttcttattgtttcataattctaaataaatactaaaatgatttcctattttggagttgttaactatcatggctaagtacaacaacattctatattggtgcatttcatcagatattcagacactttttatagtataagcagaagatatccaagaatggaggatgtagaacagaattgatctaaatttgaaaagcaggtcaagtttgatattcacttggttgctatacaaattggtaaaggcacatgtatgtcctaatttactatggagtattaaaacatcacagtcatgaaagaatgatatattcaacagaaaataaaatcaatttcatcaagcataccaactgtcccaacagtatcaattgatcctgattccaaaacgtgtttctcaactgctaatgccaactcagctgccgccagtccagcatcatttctgtaaaaagtttctttacccatgtaaatatgtggtggggacctttcaaaataatgtaaaccacatggatgaagaatgaatggaaatgctaaccttgcaggcatgagcactgctccagcatggcccccattcccttcaaactccaccttaatacttgcaggagcagcaatagcagtgacaacgccaattttgatacctgttgtaagaacacacatgagtataagaagaacaattttccataaacttattaattaactcacaatccaaccttctttttccaaaatggggccctgttcaatgtgcaattctacaaaagcaaaatagtcgtctttcttcaaaaacacattatgtagctcctcaggatgcatcttgtagccagcagagtctgcagcatcaaaaaatgacacattctgattgtcaactgtttctttgagggatcgagccagttcttcactccctgccattaggcggctgcacattttccagaagtgaaaagataataaccaacaaaacataattgtggcacaattagtccaagctaagcttcaagttagtgcgagtgaggctcaaccttcccaagcagctaattccaaatcttgtaggctcctccgatgtaaacataataacctccaaagatctttttggctggaaaccagacctgtatgatacaaacaagagtttgtttcatcacaaaagagcaaccaacctagcatatcaaagcttcagctgtttcctcaaatgtgtggcaatacagttaaaacatgcttgttgcaagatggaaaatataactatgcttaatacttatatggcctggaattgtgacatcaaaaggtggagaattagtcgtcttcttaaaatcagtatacatattcaagctgtatagtgaaactgtgaatgtctaatccccatgtgagtgttgcatacttgggtacactgtatgatgcactgagtcaaactaagttccattggtagttcatcatgatatttgatgaaagagaatgcatataacatgggcaacacaagcaaaactaaattctttgagaaatggtaagatacttttaggtagtatttacaccttttcagcattctaattgcctcaagagcacccaggacaccaaccaccccatcatatttgcctgagaatgggattgcgtcaacatgagaaccagttgcaaccgctcctagtcctgcctcagaaccctccctgcagaagtatgcaatgttacagtgatcagaaaaattccactacaatctgttccttttatacatagccatagaaacaccaaaatataatgagagatatgcttcagatatgctgttccttccaatatgccatcccatttgctagaattgctttgccatagataactacttgtaaaaccagatacatcaaataaacatggttccagaaccatccaataccaactcaccagcgcccaaaaatgttgccaacagcgtcttcacgaatggacaggccaagctgattcattattccctttatatacctataaacatttaagtacaaattcagcaaccatcatagaacagagatgcatattatcattgacaaatagcagagaaacaaatttgccatctgaaatgttatcatcgaatcagaaacatcaaattgctatcgggaagcagtttgacctattaattcaatgttcatgagatcaactcctatcgggctgggcgtcaaattaagcacgttttggttcgaagtaagcttggttcatcccatcggagtcttatcaaggtgaaaaataaactaagccatttctgcaactagttgctgaccaagcacagaagcactgtaatgagttcaaatccatgggaaatcacctcctcccacgaatcatgagagtagaacaaaaaaaaaaaaaagaaagaaaatcgcactgggcgtgagaacgggaaaaccttcgagcttgcacgtccttgtcgctgtacagaacgcgggtcaccgacggcaccggcgagtcggagaacgaagccagctcatcaatctgcgacgaggatcatcacacacacaaacgagaaaccatttcgtcactcggaatcgcgccacgggttttgcctgccgcaggcggtggaatcgcgtgcgtacgtacgtacctggcgctggagcccatcggagtcgacgtagaacggggaggagccgccgctgccgccaccgccatcgccgcggtagtcggacgcggggaatccggcgaactcctccatcgtccgccgcgccgccgccgcgtcgtcgtcgtgccccaccaccgcgccagcagctccgccgagcaggacgaggaggacggcggcgcccgcgagggcagcgaggaagcgcgcggcggcgctcgtcgccatggctgggtggaggcgaaggcgaggaggttggagacgacgcgacggcagtggcggctgacgaggaagacgacgacacgagtcacgggagtgtggtgtttcttcggtggggcccgcggccgcgcacggtggggagtgaggcccacctggcagcggtgggccggtatatggatgggctgggcccaggagtgggcgaacgtgaggcccatgggctggtgggagtagccaggttaaatcaaaccgaggaggcaaccaagccacacactctctctctctctttcctcccaaatccgcacggctcccgtgctctcctctcctctcctctcaaaaccctccacggcggcggcggcgggactccctctctggcgaggcctcgtcctcttcctccgtgaggtgagcgcgctttcgctcggcatctacttcccggtgaatccgtagctttggtggtgcgggcgggtctagcgtagctgcggcggagagctcgccgccgacccgcccggagattggttgcttgcgctgtaggcctcgttctcctgtgccgtgtggtactcgcgctgtagccgcgggaggtgtagcttggatgcgcccgctcgcgtcgtggtgggggcgcggctctgctctcgatttagggtttatggggctcgtggctgattttttcttttcactcgcttatgacgagtttgctgtggtgttaggggtttgtgcgttgcgctgagctttatctaggtggatccggagtagaaataacttgggggttttcgtgtagtccacagttagattggtgcaggaagcgggttgcccccatctggtattgttccgtgcgagctgtgcccctcgcaaagcattacgcgagccacctgttgctacaatttatgctgcacttctgcccgagaagcatctcaccttcagttttgtgttacttgacatggtctatgttgtgtgtttccagaaaatatggatgggaacatcgagaatcctgcggaggacatgagtgggattgccagtaatcttgataatgaggagcaggcgattcctctcagtgatgtgcctgagcagtacaaggaagatccagaaaatacatatgacgaagaaaccaaagactcaagctatgaagaatcagggatcccatacaatgaagatcaggtgaacataaatgatggaaatgtggggcatcagcatgaagaggaccaagctatcccctcagaagaagggcatgcctatggtggagaagctcagggagagcagcaggccaatgcagtaactgatgagaagaaatggccaggttggcctggagaaagtgtgttccgtatacttgttccagcccaaaaagtgggcgctgtcattggccgaaaaggggagtttatcaagaaaatgtgtgaggagtccagagctcgcataaaggtgcttgatggaccaccaggggtaccagatagagcagtaagttttttctctcttcttaagctggactagtttctactattgttgtttcagtcagtatgcgcagtagtgttgtaggctttgaatgcacggtacgcttgtttcagagaaccagtcaagtagatatttgtaatatatgggtgccatttttgtcctattttatagttgtattgaggaatgaatttagctaggaagcattgtagttacaggtggttacagcactatgcaatttcttgatcccccacaccatgtattatattcacattcaactgcgatggtctataaactgttgtattttcttttaccaatctatctgatagttggtgagcctgttgtctgcaagtaatggagttgaaaataaattgtgttttgacacaggagacagaaatgaaagaggaactagctggcatttttacattatataatatgatgccatttcaataatagtttcaaattaatgctgctctaacttgtgaccaagtgcttgagtaggcttgcttgcttttctttactccctgagaaggggatgcagttttattagaagtttaagaacatcttggttagtgactatggtgctgtaatgctcctaataagtactgtgttgttatcattactaagtcaagtggtaggtataatattttgcaacatgtgatcatctaggacgttgtagtgggttaaatgtataattactaataaaagatagtgctgtaactacaaccttcctgtatagaatggctatatggttgtttcaattggtgaaatctatctcagctttgaaacctcagtttgtagggaaacaaagatgactatagatttttgcatatattaagtaattttgacacaaacaaatattctttgtagaaaaaaggttatgactgaatatcagatcggaacactgattatggccaatcggtgaactgtatgtacaagggcaagagaaaattctaacccatctttcaaatttgagtttggatgctaatgttaataggttttggactgtacatggatcaagacatcaagtagttaatgcatatattataactatagatgctctttgcctctatctcagtaaatattctgaatgattatcagatgagaacaatgatttgttccattcaggagaatcatgtgtaaaggcaaataaaagaacatcaaatattgggccgtcatcccttgatgtacttcattgtataactattaaaaaatattcactctacttgtcttaaaagtttctccgcaactaaagaaattcaaactaatggattgaattatcaaaaaaatgaagaaactgacattcaagtacgaaacttaatagtgtcgtcgtgtcgatagcaataacaaactacctttgcaggttctcactgcagtgtaaggcctcaagtcgaattgtttatgtatcaaaaatagacgagccgtcatggttatcaaagttcagttttgtgctcctgtgctgcaaatactgttaagtcttttgattatcggatgaagatccctgtcaagaagcttcatatgttgtccggtaatttcatgacctgcttgattttttgaccaaacgggaatcagtttgtaaagttaataaaagattaaaataactaaaaaaaccttaaacctaatcggttcctaaataataaaagtgataactgcaagtgatacctttcaaatgtgaagtagtatcacatgcatcgatatttttggaattggttcatttgaagtagtgctcttaaatcactataatttatcaagagatgagtgagttatatacccaagtgaactgaaatgcaacagcacatttctatccctttcccggattataagattgcccccatttagaaaatgttagcgtccaacaatgggtcggaattttattacccatagacatcagttttgtgattagtgatgctaacttagatggataaacatgctaaccagaaaatgaggaatggagaacttgctggtcgtagtgtcacactcgttaaatgaagatagactactctatgaattcttgattttattacttaggcaaaaatagtttgtgttttgatggattttaatcaggattttattttaagttatgtggataaatatatcaacgataatgttttttggcaatatcttttaagagcattatcaaaaatattttgcgagaatttgtaaataatttgttcattatattccataactcagctcaacaacatcaaactagcactaattagtattagtatgcctaggatgagttgttgtatgataagaaggaagtggagagtatcctactatactttggcagtcgttgtcttggcaatgccatgctgaactgtttaatattttagtctttatggcagacattttttgggtgtgtatctgcaacgtttcaagtgaaggcaacccatgcataaatgaatgagttgcaaccccactaataatttcagaataaatataaccgtgcaatcacatctgtctaatgcggatcggacatatattccctgcccttgacccttttgttatcatgctagtaacattttttctgtgctttttgcacattgctgttattgactctccaatggttgctcatctgtatgtacctgcctgctgacataaataccattttctttcttaaaggtaatgatttcagcaaaagatgaaccagatgcaccattacctcctgctgttgatggattgcttagagttcacaagcggataacagatggtttagatggtgaatctgatcaacctcaacgtgctgctggtactgtagggccaacacggctactggtgccagcttctcaagctggcagcctgattggcaagcaaggagcaaccattaaatccatacaggatgcttctaagtgtgttctccgaattcttggtgagcttttacatttttttctcccataacgtacattatttctagtatattctatgttttgttttattctgtttcaaaactggagtactttttaaattaaacagtgatagatctactaaggctctttctttttttcatatcttatatgattattctcttaatgaattaggaaatatgcatttttaggcatacgttgtatatactcaatggatgtttttataacccattctctcaaggacgaatattttgcacttcatccaataatgatttagccacatacaaatctattcatggttttaatgttctgcgcttagcagactatataggatcgactattttcctttttatgtattaaaaaaatacattaatgcatgcatgtctgaggcaaaggccatcctttgaggactcaagcatgctggacatatgccatatagcattataattcccctttgattgttgggcttgttattctagcttgttcctgactttaccactgtttggtttgctgggtgatgtttggtcacttggttgtttgtctttcaatttttattaggctcctataactaccgcaactagtttcacaagaattcatgcacgacatattttatagagcatttaacattcagtttcaatagtttaacatttccttacatcttttacagaaagtgtaccacctgttgcattaagtgacgaccgagttgttgagatacaaggtgaacctctagatgtccacaaagcagtggaactgattgcaagtcatttaagaaaatttcttgttgaccgcagtgtgctccctttgttcgaaatgcaggtaagttcatttcttttatgcagtatattacatactcttacttttgcatgagtggtcgataatcataagttgctttccttgacagatgaaagtgcacaatgcgcacagagagcaacctatgccacctcctcagacgtggggtcctcctccaccgtggggtcatccatcaaacgttcctcctggtggcccaggttatggtggtaatccacagttcatgcctcctcggcctcaagaccactattatcctcctcctgatgtacctcctgtcgaaaagcaaccacactatggaatttcttcatatggccgtgatgcacctcctactggtgctcctcctgcctcagggaatcaacacccaccacatggttcttctcaagttagttgctaaaaatttgaccactgtgaacataatgaactgtttatgcgcctgctataaagtttcttttactgagttttcccccatatatgttgtttttatttgacagataacacacagcatgcaagttcctctttcctacgctgatgccgtgattggggcagctggtgctagtatcagctacattcgcaggcatagtggtgcaacaataagtattcaggaaggtgttcctggagaaatgactgtggagatatcaggaagtgcttcacaagttcaaactgcccagcaactgatcaaggtattcttttttgtttcgtaaattgcgtcagcattatcactgttttcacagaacaacaaagaaaaaacattatcacactgtctatgacctgcatcttggctaattattataatatgctgatgatctatttgcgagtctgatgttcctgagtctacctcttgcattaattagatagaagtgctgcatagaagaaactcggtaactcattggattgtattattagtaggataaaccactacatacgcagctcttttttcatcaattgttacaaaatgtgtatggagagatctactcggtattataccgaagtggtggggggaaatcctctgttcatatcttcatattgataatcaggctatcctcattttaatgatggtcactggttaatcaaaatcattgaacttaaaaacttaccgatacccagctcagacaaagaaggctatctacagtcctgcactgattgttatttatatttttttagaaaaaaaatctcgtattaacagcagcatctcttgcagaatttcatg

SEQ ID NO: 20397 - DNA, 1938 bp, Oryza sativa
ccatgatgagggtatatgtaactccaataatctccaaatatgcatcaatcctcacaattgaggaatgatcaatatgggaaagaccctgtcattttcatatgattaagggtacttctcaggccatagctttcgacagcccgattggcagctcgaaaaccatctccgtatgcctcagatgaatccgtttcgatctgatgtttgatgaatgctccgagcttcttctcgaattcggtctttgcgcccttctttgatgtggttggagttgaagatgacgacgacgaagatgccactgaggtggctgatatgtcgatactagaaccaaagatgatctctgactcgagccacatgtgggaaagaacttggcatatgccttcttcaacctgaggactaagagaccgaaatcctagagagagagaaaaaaaagatgttactaacactgattggaaagggaacatggaggtggcatgaagtaatggaagtgcacatgattgtttgccagaacaatgagcagagtaaatgtacctttcagacgtagataagcatgcatcatttcatgggcgagaattgagccagtttgtaatctgcatgacaagcacgttataacgacagtgattagtggtatgttccgttttttcggactctgatgtaacatgagttgattatgaaagattctaacaaaaactttggtcagtactaaaggaaaaactaaaacttatacaatgtacctcggcaacccatataatatcaggattgcagtcacttcacatcgtctttccagcttatatggtgctgtgatcatatctataattctgtttcccggtccaattattggtcttcttaagatctggatgcattacattattcatcacatgcatattttttgtgtctgccagttatcaaatttatgcagtaacaaggcggtatttaactcaccgttctgacaatttgctcttcagaaagacatagtccccttgtttcaggaagatgatgcccctgagatgacagaaattgaaaaccttgtaagttcaaaatatactaacattctgcgcaaaaacataacaaaactctcatgttcatgccacttacatttttctcagtttctaaagcctcatttagagcctgtctctcaaccaagagtattggaacttgttgctccactttcatgttcagaccttcaaaaaattcctgaatgtccatatacagctgttgacactctggtgtatccattattgaagaattgagacattccaagcagagtttcctcccatcatctaatgtgatgtatttgatgtccatcggctgaatttcagaaggatgaaaagaaatgaattactagttcatccacaaatgtatactgaaattcataagtgccatataaatgtcacatagttaatcacatctgatcactagagaaaagaagtaattacataattaattgaaataaccactagtgacacaggagctacttgctagctgttaggcagtcctatgctgagccagatattgacacagaagttacttctttgcttttagaatgcttgagaagtttctgttgaattctacattgagccagcttttcaagaacctatcactaattgcaagctattgctgagaaatgaaataataagaatgggaatatgggaaccccagttacagcactatctgcatctatataaactggtgatgaaatgatcgcatagattcaaaacaaatttaaattgttattttccaaatggtagtcaaaactggctggtttctttccaggaacaagaagtgacaagctggggaaactggtctcattgaggatctagatccctgcactgacctccattctttcacaactgcaacacctaggagtgccatcatcttcatgggaaggacagtacttttgcatccagaatggatgtgctcggtattcgatcagcccattcctgttcg

SEQ ID NO: 20398 - DNA, 11829 bp, Oryza sativa
agctaagcatgcactcttatacaaatctctggtgcactttgcatgataactctaatctgacctcatgtccatcatcagattgaccaagacaatctcccaaagaatctacgataagctaaatgcactactcttccctatattttcaagatgaattttttgggggaacaccgaacacgcaaaaggtccgcttgtcttttcaagatgaacttctgtctgatcataaaacattaccttgcctgactgacataaggcctgacaaaagtccttctccaccatacttcaaatgccctctggagattagggcaattatcccctaacttcaagaatctcccaagccatgccagtaacatggaccgctgatcttccaagggaagtgtcaggattgtctgcccgatcccttcctcgacgagcttcctatcgaatgaccggcagctgcattgtaaccatgagtagtcatcaatgagtggttgcagccagacttgcaagaggagaagacgggtgttcttggatggaagcatctctcctcttccaattccgacaaaaagccttgctgtgatacagctaacagtgtgacgagaggcaaccggcaattttccatgtaattctgcaatcttgctttggtttgcccatagagccacaaaatcatcgcagatgcgctggttaaccaatatctcaaccaaccagaggagattatctgtctccagagttatttgccgtgtaagttcaacagaaaattcttgtcccgtcgcttctgaaaacagtagtcgaagtctgtctaagcaaccttggcatgaactgtacaataattctgaactgatgtctgatgatccatctgtgcaatggttgctgtctttcagaagattcagaacaagggctttcatttcccgacgcgccctgtcatcagtgctcttcaacaccatctccattataagagctaatgtatcagttggtgattttagattgtcagaagtaattcttttcagcagaggactaactccataagccttgctctgaagatgccgtatcgaggacacaacattgtcttcttcctcaccaacccaaggaacagcttccaaataatccaagcatgacttgacacatgcgtggaaaccaagcgactcggcaacctacaaaatttcccccattttaaaaacgatcaatatgacaaaaaggagtgcttaagatcactacaaaaaaaaacaaatttcaccctcaaatactactattcatcagaaggaaaacacataaccaaagcaatgatcagataatcagattgatgtgtttatgttctatttctcgcataatcgaagtctcaaaatttttagtaagatcgcgaagaacattttgcacaatgtctgaaacaagaacacacacagagagagttcactgcaatgtggaattcagatcatctgcaaatattaccttcatgatgcgaagaacacgcgagacattctgcttgagcagcttgtgcttggcctcgtcgcagtacatgagcccgacggtttccacatagatctcagcgtcgtcgcagtcatggatctccaggcacgagccatggccatggccaccggagccggaggaggaggaggaggaggagagcttctcggcgaagaaggcgctgctccggcggagcacgtccccgtgcacgctcatcctcaccgcgatcccttccttgccgtacagcaccaccgtcacgtcgctcgtctccggctgcccgaaccccacgcagatcttgtgcctctccgcctccgcctccgccgccgccggctgcggcggcggctcgtcgggagcgtcgccggcgaccggctcgctcaggaccgagggggccctcgacggcggcgcggatggggtcgtcgtcttgtgctgctgcggcggcggcgtcggcggcggaggcttgtggttgccgccgccgccgtggtggtgggggttgttcttgaggctcttgtggagcgccgccggcgacgggcagcaccagaatccctccggcgtgacggcgatcggcacggcccgcatcctcgccgaggcatccaccctcttcgccctcgtctcctccatctcacatccgattcttcacacgcacctcgaagatttttcttctcctgaaaagaaaattttctgcgcgagatcaagaacacaaatctgacaaaggaagaatattactccgaacgccaactgcattgcatggacgcgaaattgggagaacgaaaaaggtttgaaaggaccaacaaaaatccggggttttcgcatccagaaaattaaaagaacagaaaagatctctactactaattgggaagaacaacacaacagcaaaatggcagctcgaaataatacagattactgataacacaacacaagaagcaagatttcacctcgaaaaaccaccaccaccgcaacaacacaaagaagaagaagagctccaagaagcaatccttgtgtcctagtacgaatcaaggagatgaactgatgaagtgaacgaacgaagtataaattgcttgctttcagctcacagcagctactcgtagctaccacatcgggtacattccggtacacgctgccctagcagagcagcagagtggtagtactaccactagtggttaaccgaatccaatgccttgtccttactgttgtgtgttaaccgagagcaagcaggcgtgggtttttgtgtcctttgctgcaaggacactcacacccgtccccattttcactccaccttcacactgcagcttcactgttccagatggatcatggatggccaaggccaactcatgtttctttctttgcttctccttcagaattcagaattcagattgattcttggcatggtttactttcccaagaatggtgaattttagtggtaaacttagtactagcagacaagtaaggtttaggttggagtataatactaaaattttgtttggaagttgggcaaagacaaatgacactggattatttggagtgcaggaacatctttcttgagatgtgaatagaaaaaaaacagcatggattgctgtactgcactcttttgttagtcccaaaaaccaatcatgtgtgaaaagaaatgggagatggcaggaaaagatgtgggtggcatgcattatctatgacagttttttaagatacaaagatgagaggaaagtgcttgataattgtgtggtttgctttcacatcagatgagagtatgtgatgatgagattgagaggcccacagacacagtgagcaagaataaagtgtaaattgctagtactggattagtggttcaaaacaccagattgatgtccctcttaacatcagaccaggagattacacctcacaccaaccctctgcattatattgagtggatcataattcataccctcccacaagtttgcccccaatagaatttagtgtgccatttatggtgttgtttgtacacttgtactgcatcagatatctctttttattattggggaattatttgcggataatttttaaaaggtcttatttctccaaaaacttttctgcatcaatattgttcagaccacttgttcaaaagaacaagctatttgttaggttcataatatattagtatttaattcatccatgtaaagaaatccatcatctaccaacctttcaaccatatttcatcaaaagacctaaagaatttttttttctactatcattctcatgagcagagataaggagagagctgagatgacattactacaagctgggccatgcacaaggcaaggcatgggagtgactgactgacatgagtggcctgtaccagttggatctagattctgaacaaaccgcatcagggactgtgtagagctttggcttgttttcacatctccctttttcttttcttgctcttttttagataataaaattcctttccttgttcttgagaaaggcttgcttcttttcgcatcacacttgaattgcaggactatttttcccaagaaaacatgatgatggctcatctgattatttcaatcgagctgagttttttttttccagttcagaggaaaaatgcatagcatatggcctgttaaactagggcaatctgagagaaaggtacatttttttacagcaccctctgataggatcagaatctgtctcataatcactcatgaactggctcccaaattttccttttatactagttagaaatggaaaaaaactaaagttaatgataagttaatcataaatcagaagtagtggttactgttcttttaaaaagaagaacagaagtagaagtaagaatggcacacaaaagtaagagccgcgtgcaacactatcatcaaatccattgtcgtctagtccggttaggatatctggctttcacccagacgacccgggttcaaatcccggcaatggaattctttttcatgattttttcccctaaatatcacatttcacttgctatcattcttttgaaattgtgatagaatgaacaagttgtgcacttccgatccttttgaaattgcttcaccaaaacagctaccttatgtcatgggatttgtagaaatcttgtggagaacatgtttccggcatttcagtatgatgatgaattgcaaattaaaatatcatcgctatcaagcccatgtcctgatgagatgctcatcttacatttttgaagctttgctaatgagattcatgataagtcgcagaaatattatcgccaacctatagaagatgcaaaatggagtatataggtttcaatcttccaaacaagcaaagcataaaaccggtactgcgattttgtttactctccagcgttttcaacctgtcgatgagccaagtatgtacgtaccggagcatcacgtcgccggcagccgccgccgccgccgcctcgatctcgcgcggccatcgttccgctgccgcttgatgtcacggcgaagcggcggcgatctctccggcgagggattcggcgccgttgcaggtcctacgtcctcggggagggcgcgtgcgctgcggcggtggcggcggcgagggggtcgccggcggagaggcggagacggacggcgagcagacggcgccgcttggttttcctttttacccctcgtattgtttgatatttacgtttatgccctccaagaaatggaacgcgatggtagcgatcccgaaccgtccgatcaaaatcgtgcgttccagattcactagggaacaagagcagatatgccgtgttgatttcgtaaaacccctttgtgcatttctagaattctagctgagtaattaattcactttgatcatgtcaattgtcaaagttagagatggtcacttttgcatagcttctctgttcttgtatcattcttgcatgaaatgttttctctgaatttcctctctaatagtgtgtcatgcactgctactgtttctgattaactgatcctgaacttgaaaaccctttactatcattgagcatagtttttttccctaaatattatactgtaaatgtgttcttcactgagcacaaacttgcattgtgatgatggtgcatgttcctttcaaatgtttcaccggatgaactatcaaagatactgcaggctgatgcagataaattgtactcccaggctaagatgattaagatctctgctctgcctatctaagcctacaaggaacaaaattatggtggcaaatctgagcctcatgtacagggcagcttcttggttaaggactaaggagtaaagatgctgaagcctgaactagaagaaggttcctccactacatcaaccacaaaaaaaggttgggttttgatgcagctgcatgaatgcagtcattttgcagatgtatttcctagttctcctgtactcatagtaaggccctgtttagttcacaccaatcttctccccaactcccaactttccatcacatcacatcacatccaaaactttcctacacacataaacttccaacttttttttcaaactaccaacttttcccaaacttctctccaatttcaggaactaaacaaaaaagtacaaaattgaactacagtgattgagtattcagtgattgatttctcatggcaactcgttggagagtcgatgcagctcttactctgcatatctcagcgatggcatttcgatttcagttctgtcaactgcattcggtttgcaagcagctgtgcacaagacaagagccaatcaaactccaaaaaaaggtgaaactccaatcctgtactacaaatatgcagggaagaatcgatgcgaatttgctacatattccctgaaaaagaatcctcgcatccatctgaaaattcagcttattttcctgcattttcacatgttccatgggagtgaactgactgaattcaagctgtttgaatgcagtagagagatcaattgcgtgctatttttgggtaacaaccctgaattatactgtactaatcttaatctcttacacattacacccttccgggcttggatcgcaagcagattgcgatccacgtccacgccgtccgatcaacattgtgcggctccgatgcgattagatgacgtgtacacgggttaatgttattgcacgagttaaattctgccacgtgggctacgtacgtgtgtacacgtggtagttaatttacattttttttttacccccctccgccgcggcgcgaaggcggcggcggcggcgccggtcaccgcgcgatgagcgagccgatgacgccggcgatgagggcggtggggtcgccgagcacggcggagatgaccacctgcgccgcgaagccggcgatctcgcagcaccgcttcaccttccccttccttccccagtaggaccctcccctgctcgcgtggctgctcttcgccgcgccgcgtatcaccggcaccctgtacccgccgctccccgccaccgtcacgccgtcgtacacattgccgccgccggcgacgccgcccttgtggcggccgacgccgttccagctctcgacgagcatgtccatgacgcacgccacgtggaggctgtagctcttgcagctgctccggtacgtccagctccgcccccggtgcccgcaccggtggcacgccgccgtcgccttcgggtgcaggtacagcctcgcgcctccgccgccgccgccggaggcggccccggcggcggcgtcgaggacgtgtgggagcgtggcgcagcaggggtggaggtcgaagccgcaggcgcggcagtggtagacgaagccggcgacgtcgcggccgcaggcgttgcagtagcgcgtccccggcgcgccgggcgcccgcgcgaggaagacgaaggcgcagcgcgggtagaacgggtggcggagcggcggcggcggcggggacagcgggagcgcgcactggcggtggaggtcgtggtcgcagccggcgaacgggcagcggaagcgcgcgccgatgccgacctcgcggcacccgtcgcaccggaacggcgtgtcggcgtgctccagccgcagccggtggtgcgggtggctgaagtgcaccacctcgccgtacctcatcctcgccgccggcggcggcggcggcgggcgagttgccgagtttctcgaggtggtactattctgccactacgtgtacgcgtgagaatgtgaggaggaggtgaccagggggagatttatattgagttttggcgttgttgttactattaagcttggagaggaaggtgtcattggaatggaatagattctatctacttctctattggatttagatgtttgtctatttgtggtgttttaaacttgtagacctctttggaaatgagatgtttttttcttttttggaaacataatacagactctgaaaactgggctggcataacttgaaacttatgaaaccaccacacccctttgtgtacctccgaaaactgggctggcataccttgaaacttatgaagtcaccatagacatctcgttgttaacggatacatcacctaccattaaaaaaaattaacaataaacgcgagcacatgtgccaagtctagcacttgacctcgggtgggaaggttccaccatcataagcctaaccagttgaggtaggctcacttcacagaaaatgagggatttagatgaatttaatggaaaacgaatcgattttgctgaagtccctttgttagttactacatcaaaagaaaaaaaaacatatgtcaatttttttataagcaattaagtcaaaagcaaattttcccgcattagaaaggaagcaagtaaggataagaaatatactaaagacaatatgcatggtcaaatagataaaattactgggaaattttgtttgtcactgattggtgatctatagttctttttagtatctttgtttttgccattcagctctctcgcttacatgtagggtccaaactccaaactgttacaaatggtgaaatgagatgttgacacgagtcagtggcgaaaggcaaaaaaaaaaaagttccttctgtggtagtggagaaaataaatatgtgtcatgaaagattgtaaactaaagctgttatttttaataacagtttgaactgagaatattttggttcggattttggactgtttcatcaaaattcttgtatttcaacaaaaattaccacggaatttggagaatccatcaactagttcaacaagctcatagttctttacgccgagagtggtctgaacaaaaacttttcttgcttgatcatggcaatactctacgcttgtacagtctactctccaaatggctaactaggcctatggacaagttcatctgcaaccacaatttccagccacagcgactgtttgtcactgacaaagaaaaaaacacagggcatcttctcttttcagtgtgttggtgctggcatctgttcctcctcctcctgtcctccgacgtcaaattattccggttcttctcttaactgctaatccttcttaacaagttcagagaacatccaattctcaggtttagcttttctcctgggtgtttcttttctcttgtcttgatgatggctagtgtgtacaaggataagagcgcacaaattcttgattacgaatgagtataagattggaatgtctccaaaagcctgaaaagaaatatctcgtcacctgggatttgggtgctgcaagaatcacttgtgcagtcaggcaagaattttgctatggataaggggaaattatgctcagattattgccccgggatcggtactctaagttagaacctgagacatctttgttactctgaagaaacaatttttcctgacttgcaagtagtaacagccagcattgtctgaattgttggttttcttttctttcgctgtcgtgaaactgcgcaaaacaaagatttgcaatgacaggaagaaatgatgtaaaaaaaaaaactacaactaggagcaaattcagatttctgatgccagtttatagtgctggtgtagcaaggattcagtgttgatatacatgtgcaaattcagatttctcttttacacgcataaatattttacaggccagtgttgcagttcagaaatatactagagatcaaaacctgaacttttcaatctgaataaaatctgaaccgttctgtcagctttgctttgatcctttctcactgaaacagcgagcatctgatctttccctgaataaccgtcattctgaactttctgtcgaactgttcatgatgatatttggtttacaagattaagcaaggaatttggttctgagagtagaaccatcccttcatcaatcagcagcataacaaaaagagacgaaaaagagtaagcctatgtaataataatgcaaggaggtgaaattatggagcacaaagaacattgcaaagcagggttatatagctactacacctagtggcattgagactgaagctttatcctgagtctcattttcttctttatcaaaagacagaggccacttaccaaccagagaggcctttttcgtcaggaaccaagatgaacaagaatagtgttatgctgcaggcttccaaagtctgatctgatgagttcagtgcagcagctgcagcacaaaaatggttgcagattcacagggtaagtcagattacaggatgtattgcacatccagtgcttgatgcagatgaagcttgagagagctgagctgagaagtgtaggatgctctcattcttagcacatgacaatttgcaaagcatattcgactaggtggaattaatatggacataagaatatggctatactaggctactagctcatgagattgaataaaagtcagtgacaggttctctgaaggtcagatattttgagtgctgtcaaagcatataacattgcagtactacagattattgtttttttaggaaggaacattgtactcaagattattattcttgtcttaaaaaaggattattattgttcttctttacaccattttcacatgaaacagtgggctgtcttgggacagagcagcaatttgcctctttgttcctcatagtccagacacaattcagcagtcaactactccagtatgtagtactccatttctcagcagtctttgttcctcatagtcaagaacagatgtaattttcagagttttcactaaatttccaaggtgaattaatccatttcaaaacgagatactcctccaaatagaacactactaccgcataaaaagatttgtactggtacaatagtacgtatagttgattggtttgatacagccaaaaaaaaattcggttctgaatgaaaatcatgtgatatgatcagtttggtgtaaataccccctgttggtctctcttgtccaaaaatgaggaggagctttgcttgggaagtccaatgcaagaggagagtgcagttaatgcgctcgttggccgtttgtgcttgaaataataacacccttccaccaacccggtgagctcgcagctttccaccgcttcgcactcaacctcatgcagatgcagttcactctccatagctaggagtagctactagcctaccactccactagctgcttgagcttgagctgagcccgccattgccgcgcgccatgcgcccaccgagctgaggcacacgaggcggcgagaggcagggcggtgcaagaacgcgatgcgcgcgctccggccgccgccggcaccggctccggctgtgtcgccgtcgccggcgccatcgccgtatgctgcgatgtttgaagggggtggcattagctcgccgcctgctccgaacccggcgacgtcgccggtgccagggccggcgccagccccggtgccggggagtgtggcggagcgggagttcgcgggcggacggcggggcgcggcgtcgagcagcctgagcccgccgctcatcgcgatgctggcggtggtcggggcggcgctgctggtggtgctgtacgcgaggctggtgagccgggtgttcagggcggcgaggcggcggtggcggaggaggaggaggcggcggctgctcatgatcccgggctcccccgccgacgactcgttcgcgacgttcaccacctacgacaactactaccacaccttctcgccgtacggcctcgacgacgccgccatcaagtcgctgccgtcggcgcagtacctcaagtcgtcggcgatggcggcgcgcggcgggggcgggggaggcggagccgacaccgccgcgcgcgactgcgccgtgtgcctgctcgagttcgccgacggcgacgagctccgcgcgctgccgctctgcgcgcacgcgttccacgcggactgcatcgacgtctggctccgcgcgcacgcctcgtgcccgctctgccgcgccgccgtcgcgctcccgcccccggtcgcctccccgctccgcgccgcccgccgcgtgcgccccagcctcgacgacctcctcttcttccaccccgtcccgcaaccaccccacgccgccgccgacccctccgccgcgccggcggagatcaccccggcaagcccgccacacgtcggccgg

SEQ ID NO: 20399 - DNA, 2820 bp, Oryza sativa
atgttttttttaactcgatgacaagttcagggacctttggtgtactttttccttattgttaatcgaagaaagtttacagcccacgtatctgctatatatgggccgggcttagtactgagcccaaattagtcgtctagtcgtcggtgaattcaacaccccacgctagacggccgccatggccttctcctcctcgcctcctcggtgactccgcccgccgccgctggctgccggcgcagcgccaccctacaagtcaccgccccaccgcgagaggagggcgggcatggccttgccctgctcctatggctcccactgcgccgccctgcccttccccgccgtggtctccagggcggcctcctcgccgccaccgcgctcccgggggagaaggcccagcctaccacccgccggatgcttccacgccgcgccaagggacgccgctctggtgtccggctccgctgctggtggcgtgagcaggaggaggtttggtgccccgtgaatctcctagtatacctagtttctttcgaatgcctaatttattgctccaaatgggaaggaagaaaccgtgtcagtgtcgttgtttcgattgtattagttgatgatgtatttctggtttatgatttgatttaaccggtcttgctggtcattcggttgaattcatcagcacgaacaatccacaaatggctttgttttgctcaaagagttgttctgtacaaactttagaactctcaaagcttcactgttttttgggaagcagcaaactgaatttgaacctgatgtgtagtagaattgtggcattctactagaaaattgtgttgcctgcttgccactgattgttctgactatgtggttgtattcaacaggtgtgagttatttgacctccatcagcacatcgttccatttgcggaatcttgggcttggcagcagtccattgtgacaaggaggaaagggttggtaggcacggatgaagatcactccgacaccttaatcgcgctgcagcatccaccagtttatacgctaggcactgacagcaccgaggactacctccatttcgatgttaaagatgctccttttgaggttcaccgtattgaccgtggtggggaggtgacatatcatggtcctggacaggtatgtaccataatgtcagtgaagctcatattgttacatatcacgaatcgtggttcatttcttttacttgtgaataagctgtatggttctccattatcatctagacatctagttatagatagttaaaacttcaagtataggcctagctgtgcaatctggttaccagaatgtgatgaaatcttgattttcactaaggcagaagattgtggcttgttttgctacaatttatgatgtattctacctagttaaacttcatgtatatccctagctgtggttaatctggttatcaaaatatgtgataaaatcctggttttcccggaagattgtggcttcgattcctattggatactcaatctttgcatgaaattcgtttatagctaatatctgtgcttctgacagtcattttattgtctccttagcttgtaatgtacccgattatcaacttgcgatatcatcaaatggaccttcattggtactttagatcacttgaagaggtgatcattcgtgcccttcagtccgcattttccatcaaggcatctagggtagaaggtctaaccggtgtctgggttggtatggtactatccttttggaaattgtgatattattttgaattttctgtgagatataatgacgtgttactaatatatcccctctatttactttttaggagataagaaagttgcagcaataggaattcatgtctcacgatggatagcatatcatggtctagcactcaacgtaaccactgacttaacaccatttcaactcattgttccctgcggcataaaagatcgtggcgttgggagcatcaaagagatattgcaaatagcatctgatggaaaagagatagacgaaacagcattgatcgataaagcctacagaaccctgcttaaagagtttgctgaagttttccagctctctttatatcacaaccctaactgggatcttcaggaaagcaaaaattttagttaactgcagaatattttattggattcttgaaattcaacttgcattgaagtcagaaaccagtacaggtggatagagaggcaaacataattagatcaaagtgaagtctccttcactctaatatcaccaaaactgcagaactagtcatccatgtgcgcaagctcaaacttttgcttcacctgccaatcagataacgctatcagttttgaagatgatggtaatatgtaggagaggtgagaagttcagccaagccaattaaccttctgttaggagccatgtgggctgcaatatgggctggatcagctactttccaaagaagtccaagcaagcccaagaggcaaccatatataagtagcagtagcacttctaggaggggacgaacagattgattggccaaggcggcgaacggcggcggcggcgacctggaggctggctggcctctttgtcgatctctcctctatctcccttcttctctactagtctagaagctactagaaccttctagcccttgtatccttccatcttccacctcaaaaccactccactattgtaacagacttggttgttccctgtgttggatttggcactgctatttctgaaattacattgttgggtgggtctctaacaatctggtatcagagccaacaatccccactgagttcaccaagcaagctgccatggcaagtgaacataagttggatatgattttgaggcgaatggaagagtttgaac

SEQ ID NO: 20400 - DNA, 3739 bp, Oryza sativa
acattttttggttggaaacaagcagtacaagatgacgcccactatgtgttcgacagaatgcttcagccccaatgtcgagcccaatctcgctgttgatgtggttgttacgtgtgccaccacttctatgacctctgttgatctggtatctgctgaggacgcaatcggtgcaacctacatctacaatcctgtacagcccatggtaacgcccgccaagtgtttgacaaattgctccaaccccaataacatcccagacctcaccgtggcagcagtggttacgtgcacctccacttctctggcctccatggacctggaagttggtaaggacgtcgcctgcaccactgaaattgatggccctgactgtcacaaggagacgcacaccaaatgttcgatgttaggccttgatgtcaagggtggcgcagaccacgtcgggggcgtgttcctgacaatgtcaggtgtggccaagtctgttccaatatctatcgagtcaattgacatcttctcagcaaggttggtcagcgacctcaagcaggacataccaacacccaccgggtgtttgttgagaatccctcgatatgacagcaagacacagttcaataaaaagctaaggctggaggggattgaattgaagccatggccacctccaacctacagtggagtgattagcggactggagttccgaccaatgccctggccagcattcatctattgttggcttgaagaacatctacttgatccttggccaccaccaactgaatgggctgagttggaactgtggcccccaccacatgagaatgacatcctgcccttattgatcaatggcttcacccatatcctggtggatcgaaaagcaatttcaaaattctggaaagcgatttggagtgagttaggtgaagaatggtcattgtttgttcctaagctatatgagctgcacttgagtggtctccttcagcattcagtaagcatgatatcacaacagcttatgtcaaggaggatatggtccactaaggctaaaatgaagatgttgaatggttgggattctaaacagtacctgagcattatgcggcctattccaggattgtttgttaaacttatccaagatatatctccaaagagccatcatcaagcttatatagaagctcaagttgctaaaaaattcttggaaaactttggtgaagataaggtacactttttggctcaatcaattgctgtacctgacactcaccttggacaaggctgtattggctgttgttggttgtatggcccaaatgcaattagcacattccatttactaatagccatactgcatattgtgagaccactttacatggaaaatattttcactaggacttcacatgtagcaaagaaatgggctaaagacttgaaaggtgttgtgtttgattggaatacactgggtatagtggttcaagaggtcaattacattgaattgatctgtgaccgggattcgtatggttgtagtgttcagaagtgctatcctcagtctattctattcatgcacaatggttggtcttttggtggattgcttgattggaactctaaacaatacaagaacagtatgctaattgtgaacccattggaactcatgcaagtactgttagtgccattagtgtgggatccagatgctgagatgggtcagattggtagctacgctctacaaccagaaaattgtcaattaactacctgcatgagagcacattgcattaagccaagtgattatgagatcatcactgccaaagaaaaccatgctgctgatgctcctagactgcttattgttgtaatggaggatgaaggcaatacagtttggactttagaattttcagtcagtggagtggtacagaagaagcgtgatctttggttgtgtgcatttgctgttaacaaggacatgaaggttgttatgttcctgcagcaatatggttatgcaaacttagtaattgtcaatttattgagtgttccatgggatccaggcggctctcatttggcattagctattaaacaaggaactaggctttcactgtgggctattacaagcattggctggttgtgtttcctatggtcatattggctacattacaagagaaatagtaacaggggagatcaagtgggtgaagcttgcacagcttcgagtcatcggcttggggacaagccgaatttcaagggaaggagaatgttaggagccatgtgggctgcaatatgggctggatcagctactttccaagaagtccaagcaagcccaagaggcaaccatatataagtagcagcagcacttccaggaggggacgaacagattgattggccaaggcggcgaacggcggcggcggcgacctggaggctggctggcctctttgtcgatctctcctctatctcccttcttctctactagtctagaagctactagaaccttctagcccttgtatccttccatcttccacctcaaaaccactccactattgtaacagacttggctgttccctgtgttggatttggcactgctatttctgaaattacattgttgagtgggtctctaacaccttctttggggttcgaagtggatccatctgcctttgtgtcaacacccggccatggcttgcaagtacaatgtttccccttctcgataccgtcgtaaacggatgcgacatgtttaccacatccattccaggtgaacttgccacatttgctgcattccaccttgaagcacatcctgtgctcttcttcaggtgctcctttggtgcgtggtgggcagtggcaaatgttgggatgttcttttggataggttcctctggtcttcatggatttcagcattttatagcatcatatgctgttcttcttctgaaggaacaatgtacaaataccctatatatgctgttcaatgtagtctttgactctttggtgatggatacaatgtatggataatgtgtaaaatcttgcagttagtgaaactgtagatatttcctatgctgatgcttggtatgttgccaatttgcttcatgtgtaaacaagtctgggatgttgtgttcttgttgccaagcaagatcaaaccacattttcttgtggttgtatagatggttcaacaacgaagagaccaaagctgtaaaaactatcaacttgaaatttttgtttctgtgctagtccaactttagctatacagcaaacgttttttcaattcggcatatgaaatactttgccatgtcttagaactaggctaagtagcacacatttcgacacatcaaaaaaatgttaaattcacatcaaattcagattcctctttgaattacaagtcaaatcgagagctaagcaaatcgcggcatggagccgttggtcgacggcgagctctggtcgctgacccacacgtcctgcaccgacaccggcgacccgaccttcttcaccgcggcgtcgacgccgtcgaagccgacgccgacgtcgatcaccatgggcgggcggctgccggctccggtccgggctcccggcacggacgccggcgcggcgtccctgatccgggcgagctcggcggcgacctcgctcatggccggcctgacgtccttctggaacgccaggcaccggaacgcgagctcgctgacatggcggacggagcgcatcacccactcgtcggcgcggtcgacgagcgccggtcgacaatgtcgtcgacgcgccccttcccgatgcggtcgagagcgagcgacgcgaggttgacctccgccgcggggcgggcgaagtcgacgacctt

SEQ ID NO: 20401 - DNA, 13059 bp, Oryza sativa
gcggtggaggatgggcggccgcttgacggcaaggtaggcgatagcggcccccgtgtccgccgcgacgccgagccgcgcgcgccatgggagccccccaccggcgaggtggtgggcgagcgtgccgttggggacgaactcgtagacgaggatctgctcgccgcggtctaggcagcagccgagcaggcggacgaggcccgggtggctcagcgacgagatgagcttcacctcgttgaggagcaccgccacggcggcgtcgtcgtcgccgtcgtcgtgccgccgccgcatccgcttgatcgccaccagcgacggcgagctcgccggcagcttgccgacgtagaccgtgccgtaggcgcccgtgccgaggcggtgcgtgtgggagaaggagttggtggcgcgcgccacctcgtggtacgagtacaccggcacgccgctcgacgacgccgcctccgacagcagccgcttcgccgccagcctgtcgaagccggaccggccgccgccgccgccggatcgccggcaacgcgcgcagcagaggaagagcactccggccgccaccgttcccgccaagacacctgaaattaattaattaattaattaacccaagcaatcatgataattagttggtcaaagattaaatagtactctcctaattacacttccagtccactgtaattatgctactccgctcataatactcgttgttgttttagataaaggtaaagttaaactttaaaatatttgattataaattattttaaaaatattcgtcttttaaatatgttaactacatgtatagaaaagtatttaaaaagtactttactaaaaccatatatttcttaacacttttatatatattataataaaaaaataatggtcaaaatttgtttttttagaccgtgctcttatccaaaataataagtattattaaccgggggagtaattagttatttggtcaaagattaattagtcctacactcctaattacacttccagtctacttagttcactgtaattatgctaattaatttggattactgcgagctaaatttgaccttttccacgaggtacatcttatgaaattctcatgacaattatgcgcttaacccaagtgtaagtcaatcttctcatgcggcaaaaacaaatacgcagaattgttggatgcaaaagggggcgttttttttttttgctccaaagaatattcttgatttttttccttagagtttccaggtcaggagtcagcatgcatggcagccattccacgtaagttgtagaaataaaaatttacgacaaacttgacttgatcgcaacaatttgactctacgcagcgtcgtacacgatactgtattgtgacagattaacgttatacggagtaaactccaacatgtattaaaaagaacagtaaaactcaagcataaggcaaggagtaacatttttttttacctccaactatgataaggattttcttcgtagagctcttcttagctgcaaaaatggagagaaaaaaaaattggtcagaccttcatatttatttcagtttgcaaaatatgggcagaattggccatgctgaacatcataaattggatcaggtttttggtagcagttggttggttttctgttaagagcaaaattgacttgatttatgacaaaattgtctctccacgtgaggatagctcccaccaaaattgtctatgcattaagatgagaaaattcaacagataaattttccaaatacagaccactgaaccaaaagaaggtggaattcaatttgagtactgatgcttgaaaatttggtgtttttcttctaaaaataactaaattccggtcaaagagtttgatgaggctatttattgccgtaggcattgatcggtatcatcagatgcatcatgtcaaaatgtgacaaactaatatgctgatttatgcagacaattcttgttgttcaaaccaaagtcgccatctttgaaaatcgcacgcttacagctatacaaaatcggcagctatttctctcataaggctattttgaagcacaacaattttactgaactattaactcattacttaaaaattgcagcaaaattcctctgttcctaataaaaggctttagttggtctgaaactcatttcttcccttaccaaatcgatcggcttataattttataattataaaatgtgggagtatctcaaaatactgctacagttttgagtaaaaaactttcagatgtaactatgatataatttaatgtaactgcattataatcgtattataactatattgtaactacaatataatttatataaaacttacattaaaccacggtttagttagttagcactagtatcttaattacacgtgacatgcgtgaaaacttatttttaatattttttctcttcctgtacaaatctcgagaagatctgattgccacgaatctaaaatttcttttgacaagaaaaacatacgaaagttttctagcaaatctgaaaaatgcaatccacttttccaatgaaattccaaacagaccaaagcaaagcagagcccctagattgtctcgcccgtgattgaccgcaccgatgactttcatgaatggagctgacgtggagcgccgggaagtgggccccacccacctacgacggccgaaagctatagagaggactcaccgggaaagtggcatccttcgccggcggcgaacccgtcgccgtccatcccctccagacacctgcactggtgtccccacgccccgctcggggtccgcacgtcgtggcacgtcgcgttcgccgcgcacagcccgacgaggtcagcggcggcggcgctgtggttgctgcagttcccgttgacccaccaccccatctccgccacggcgatctccagcgtgaacaccccatcgttcgtcgtctcgccgtacacggatgtcagcaggttgtcgcatctaggctcctcgaccttgtcccactgcgcgaacaggcccacacccttcgccatgtccgcctccgtcgacatcgtcgggatgcacgtcaccggcgacgacgcggttccgttgccgccgccgccgccgccgcacttggctgtggtgagcatcgaggacatggcttcggcggggacgctgcagctgttgttcttcgcgttctgacagccgcggacgaacaggccggtgctcgacgacacgccgtagttggcgccggtgagccacagcctcgcgtcggagacggtgcggttgcaggaaggcaggagggagacgacgaaggtggaggcggtcgagttgaacgacttgccgacgacggcgtacgacaacggctccatggtcgtcgacgtgccgttggtcgggcggagcagcgccgccgtggagttgccctcgtcgcaggccagcaggatggggcagtcgccggagaagccgaaagggtaggggacatccaacccaccgcacttcctcctgcaccgctcatctccgccggtggcggcggcggcggggctggcggagagagctccataggggagaatcaagaggaattgcacgccgacgcagaggaggaggaggaggcggccgccggcgaggtgcatcttgagtttggctagctcggcaggcgagcgaaactaatatttcagccaccgggaaggaattggctggagcatatatgttgaaatgtttgaatggacctggggttgcggtggctaaagctttgattagtcaagcaaaacatggtcaatctagagagtacgtaattttaagaacgaccatatccttgtgagtactacacgagggaggggcaatatggaaggtaattccatgggcctagcttctacaccttccgttcaagaaaaaccccaaatttaatcctagctacgaaacttaacacacatgtactcacattcatagttaggattgattttttttaatgggatgggtggaatacctctttatcttgagaaaaaaaactaatggttaacttaaaacctctttgtcttgaaaaagaataatataactgttaacttaggatcatgagagtaaatataaaatagatcaaaataaaaatttaaggacatgtaaggatatgattaaggaggtaaagagaaactctaggaggcgcacaaggaactttgtcttattttttattttgtcttcactattttactataacaactactctctcatttttcacgcgcttacttccaaaactgctaaacgatattatttttaaaagaattataaaggaaagttgttctaaatatatattttcaagtctttaagctaatacttaattagagcctgtttggcacagcctggagctcatccaaacagtttcagctccactaaaaataggagcagagttggatggagctctcttacaaaatgaattagagatgtggagctgggtttaggcagctacataactccactatagatctaactcctgaagctaaatttagaagttggacctctaccaaacatgttaattactcattttcgccttttcggtgtagagggaataacatcccaaccttgaggtttgaactgatctttagacatctttatacagagactgggtcatggagtgcctaaggcttagggtcaaaagcccatgggccacaacacttctttccattttaggccgagctcttcacaaattgatggaggctggctcgagtcttaactttaagctaggtcgatttttaatgttaactcatttttttttggcaagttacttttctcgttcattaatagacgcgtacaaaacatgcagttaaattttgaaaccaaacaaaaattatagttcaatatatgaaaatagaattagtagttacttcctccgtttcatattataagattttctagtagatatttgtaaaaaaatatacacattaatattttaaatacttttctgaacacatgattaaaaacaaaatgatcaaatatgtagatgctgtactgtcgacatattaaagaacgagtaattgacctatgatgtagcagcctagcaggttgaattcaaatgcgagaagccatgctagaaaaattggtggtttctcccaaaaagaaataatggcaggtcaaagagtttgatgtggctatttattaattttttttgacgtgagatgtggctatttatcaccgtaggcatcagcatcatcagatgcatcgtgtcaaaagtatgactagttgacaatcatatttttttgcaaacaatttctgttgatcaaattaatcaaatcgccatttttgaaaatctcacacctatagctctaaaaatttgtcaggtattttcctcacagttctttttaaagtatttctctcacaaaaattttacggctccttgaacttattttaaaatttcttttccaaatcgatcaactaaatttaaccttaacgttttctataaaatgcactccactgtcactctgtcagctagctttaggtgcgaaattgtgaactagtacatgattagattagctcgcgcgtgattgaccgcagcaacgactttcgcgagtgctgctgacgtggaacgcgggggagtggggcccactcacctacaccgcttgaaagcttagagaggagatatatcaggagaggactcaccggcaaagtagcatccctcgccggcggcgaacccgtcgccgaccatcccgtgcaggcacttgcactgatgcccccacccgccggtcggtgtctgcacgttgaggcacgtcgcgttcggcgcgcaccgccaggcgaggtcgccgccgccgccgccgtgggtgcagttcccgttgacccaccaccccatctccgccaccgagaactccagagagaacaccccctcccgtgtgtcaccgtacacggacgtcagcaggttgtcgcagctaggttcctcgagcttcttccactccgcgaacaggcctactatccccgaccccgacgacgactctggctttgctgggtccggcgccggcgaggtcgacgtgacgcaagtcagcgccgacgcggttgtgttgccttcggcgccgcagctcgccgtggggaccatcctggacatggtttcggcggggatgctgcagttggtggcgttcgaggcgctgctgtttctatggcagtcgccgcggaggaacaggccggtgcgcgacgacacgccgtagttggcgccagagagccaccgcctcgcctcggagacggtgcggctgcaggacggcgggagggcgacgacgaacgtcgacctgctggcgttgaagttgctggcggtatacgagtacgacgaggtcgtcgtcgtggcgttgccgccgccgccgccgccagggaggatcaacgcggccgtggagttgccggcgtcgacgcaggccagcaggatggggcagctgccggagaatcccagagggtaggggacaaccaacccgccgcactgccgcctgcaccgctcgccgccgccgccgggggccgagagagccccatcgggaggaatcaagaacaggtgcacgcagaggaggaagacgaagccgccggcgaggcgcatctctagctactagactatacttgagaggtagcttagctaactcggcaagcgagcctaatgtttcagccactggggacgaacgattttggctggagctgttgcttcttgaatgggctgagtggtggtggactggtgggtgatccggtgatggactgatggtggctaagcttgattattagtcaggcaaaatcatggtcaaattggtcatggagtatcttgaaaatggccatcctttgttatgattttgtgctctcgttttacttttacttttttcctttagctagattgtttttgttgctgttttgactgctggtgatttatgttcatacgtaaatccgtgggtttgatcttactctctcctgttgaccttggggtcatgtcggtattagtaattctcattacttcaaccttctagacttttttcttgttagtttttcttatatttgatcaaacttataaaaaaaattagtaacacttacagcattagattagtctcattatatattttgataatatgtttaatttatgttaaaaatattattatatttttctataaactaaataaaaaagtttgattagaagatagttaaagcgacttatagtgtaaaatgaatagaatacattttccaagtgtgtttctaagtactcccttcatttcatattataagtcgttactctaagtttgattaaacttataaaaaatatagtagtatttttaacacaaaacaaacatattatcaaaatatatttgatgttaaattttatgaaactaatttcatatgtccccagcggcggcggcggcggcggctggggacggcacggatggcagcggcggtggcggctgggacggcgcggacggcggcggcggtcgcagctggggacggcgcggacgatggcggcggtcgtgcctggctccagcgcggacggcggcagcgatcattgctggctccagcgcggacggcgatggtggtcgtggctggttccagcgcggacgacggcggctgtcacggctggtgatgcgcgcggacggcggcggtggtcgcggctggctccagcacctctctcctgcgtgccgtcgctgttcacgagtgcccctgccgcagccttcttgctctagccagggggagagggagagatggggtgggagggggagtggtggggcccacgaatagctaggcagagagagtctccaagtttggccagtgagggatgagatttggccatccggatgtcttggctagtcggatggagagactgttggagggtatttttctcccatacttactaaattttagcttggccagccatttagccattctagttgctctttagatacggctaaatagagacggcaccaggcctaggatcaaaagcacatgggccgcgacactttttcttaatcatagtggaccaagctcttgacaaataaatgtagcgtagcccaaatcttgattttagtctatgtctatatctaccattaactaacttatctatctactatatattattttatttttttagataatatctattttttatagttcaccgactacagtcctacaaaccttattcatcaaatccgatgatctaaattcatggagtccaatggccggctctgatcgcccacgtctcccccttagactcccctccccgcacccatcctctcacgcagacgacaccgcctccaccctcctctatcttgcactcacccgccgccgctgcctttgccctcttctctctcgcactcacccgacatcatcgacgccctacccagcgtagatcgccatcgcgcgcccctccgtcgtcatcgcatccctcccacgccatccctctacggtgaacttcttccgttcattaatactccctagacttgtatatgacatgtagttaaatttgaaaataaataaaatggtttaatatacgaaaatagcattggtagctagagacttgtaaaaaaaccattaatattttaatgccttttctgaataggtgattaaaagcgaaatgaccaaatgtgttggatgttatactattgatgtactacctccgtcccaaattagtggttgctttcactttttttaacgtttaaatattcatattatttaaaaaattagtgtaaatataaaaaaagataagtcatacttaaagtattttgttataataaaaacaagttacaaacaaaataaataatattttcataatttttttaataaaacgaatgatcaaacattataaataaaaactcaaagctacaaaagcgagacggaggtattaaacaacgagtaatcaacggagtagtagcaggttgaattcaactttaagaagcgatgctaaattatcacagtaggcatcagcatcatcagatgcgtcttgtcaaccagcctcatcgtttggcttaaacggccaaagaataagccgttaatgttggcttttaagtcgctacgaataaatctacaaaagttttacttataaattaattttaattttctaataagccaaataagccattttgggtaaaacgggcaaccgatgggagccaaagtatgacaagctgacaggctgatttttgcaaacaatttctgttgttcaaattaatcaaatcgccatttttgaaaacctcacacttacagctctaaaaacttgtagtattaatttcactcaccgtttctttttaaaagtatttctctaataaagattttagggccttttggacttatttaggttgtgttcttttcccctcttttccaactcatttccctcgtttttcacgcgcacgtttttcaaactgctaaacggtgcatttgttataaaaattttctatatgaaagttgatttaaaaaatcatattaatctttaagtttttttaactaatacttaattaatcccaccataatcgtgcgcttcgtttttcgtgtcaggagaccttgcctccgaacacaggctaaagttctttccaaatcgatcaactatatttaacattaacgttttataaaattcactccactgtcagctagctctaggtgcgaaattgtgaactattgattagattagctcgcgcgtgattgaccgcagcaacgactttcgcgagtgctgctgacgtggcaggcgaggccgtgggccctattcacctacaacgcccgaaagcttagagagtggaggactcaccggaaaggttgcatccgtcgccggcggcgaacccgtcgccggtaaaccccggcaggcacttgcactggtggccccactcgcctcccggggtctgcacgtcgtggcacgtcgcgttcgccgcgcatcgcccggagaggtcgccggcggcggcggcgctgtgtttgcagctcccgttgacccaccatcccagctccgccacggcgagctccagcgcgaacaccccctccggcgtctccccgtagaaggcggacgtcagcaggttgtcgcaccggggctcctcgaccgtgtcccaccgggcgaacatgccgacgccgagcgcctcggccgtggagttgggcgggatcgaggcgatgcacgtcagggacgacgccgacgcggcctcgtccccgccggcgcactgcgccgtgcggagcatcttggacatgacctcggcggggacgctgcaggcggtggcgcccgtcgcgttgcggcagccgccgcggaggaacatgccggtgcgcgacgacacgccgtagttggcgccggagagccgccgcctcgccccggcgacggtgcggttgcatgccggcgggagggagacgacgaaggtggaggcggtccggttgaacgaggaggccacgacggtgtacgactccgccgccgtatccgcagcggcgttgtctgggaggatcagcgccgccgtcgagccgctctcgttgcaggccagcttgatggggcagctgccggagaagccgaatgggtaggggacggcatccaacccgccgcactgccgcctgcaccgctcgccgccggcggcagcagggctggcggagagagctccatcatcgggaatagtcaagaggaggaggaggaggaggaggccgccggcgaggcgcatctctagctgctagcctaatcgacaagacttgaggtagcttagctaactcggcaagcgagcgagcgagctagcttaatatttcagccactggggacgaagagcccccatcagttcacccgataaaccaaagcaaaaagtcaaaatttaaatttttaaatttaaattttaagttagttttaagatattttcaatataatttgttttaacattgacttttaagtcgctatagatacatatataaaattttacttataaattaatatttattttctaatagattgtttggacttattacaaaatatataggcagctcgaacgattttagctcgagctgttgctcgttgaatgggctgagtggtggtgggtgatggactgatggtgactagagcttgattggcaaaacatgttcaaattggtcatggagtatcttgaaaatgaccatgcatcctttgctatcgttttactttacttttttttttgttttagcttagattggttttgttgctattttgactgctgccgatttatgttcatacgtaaatccgtgggtttgatcttactctctccagttgaccttggggtcatgttggtattagtagttcattagaacaatatactagttgttttagtactgttggaatagaagaatattcccacgaaattcatgaatcaaagttcaaactatacttgaatgaaaagttttctcgcatttcaaacaggaccacacagaacaaatgatccttcatttttgtatctgagctgtcatctctcgtcgtctctgtcgcccaatcactactcatcccctagtatttcactatcgtttttattttattttatttttaccgtgacatgaacatcacgcaaccgtgttgaaatagagataaataagaacaaactaagcatgtcaattaaggtggtgtttggatccataggcttaactttagtctctgtatttacatactaatttagagtattaaatatagactatttacaaaactaattacatcaatgaaagctaatttgcgagacaatttttttaaacctaattaatctataattaaagaatatttactgtagcatcacataacctaatcatggattaattgggctcaatagattcgtctcgcgaattggtccaagattatagatggattttattaatagtctatgtttaatatttataattagtgtccaaatatccgatgtgatagtgacttaaaagttttagtcccatttaaactgggtctaactaaagtcacacaagattttaagttcatggacatacgtacgagaagagatagaaacgtagtaataacaaaacaaaaaaagaagagtcgagaatctccctacagtgatttccgattgatgccatcatatcaacaaggtcgtaagtctcattaaacatacttgataaagcaatcaatcaattaactacatacaagtggttatatttgcgtcattagagactaaagaatattatttcatatagaaaagatagggacctacgcacctactagcttgacactcttgctctcttagggggtgttcagatggggctaaaactttttagcccatgtcacatcggatgtttagacgctaatttggagtattaaatctagactagtaaaaaaaactaatttcataaataagagctaatccgcgagacgaattttttaagcctaattaatccataattatcaaaagtttactgtagcatcacattgtcaaaatcatggcgtaattagactcaaaagattcgtctcgcgaattagtccaaggttatagaatgggttttgtaattagtgtatgtttaatactctaaattagtgtcaaaatatccgatgtgacagggacttggagtaagtctctagaaaccaaagcccttatacttccactcaatttctcctttttcttttaccttcggtttgcctaagcctagaagttgacagacctagttgactatcaggaaacagcttgtggtaatttttttttaccttttttggtatcgatctcatctcaccatagctgctcaaacatcttgaaatagcttggttgccaaattatcctatagttcacaaattaaattgttttagaaaacatgttgttaattaaaacctccaaattattaattcgctaatataaaatatgatatgtcaaaatagcatggatcataaaacactttcatacaattatatcttttaataatttttgcaaattaaagatacgattaaaagagaaatgatcaaacatgttgtatacaatgtgatattggtatatgccaaataaaaaggaacggctagtgtccattttttttcaccagagtaccaatacggagtaccaaaaggagtattctgtatcagcttttggtacttactccagcatagtgtagtgcacaaagaaacgaactgaatggcgtttagcaatgattgatgtcccattcactctgttttcttttttattaaatcatcccagggatagctgggatatatagcttggttgtttgatgtggctgaaaaacattcggcatatctctgtccgtgatggcaccct

SEQ ID NO: 20402 - DNA, 4756 bp, Oryza sativa
tcattttttttttaccgtaggtaatgataaatatggtaattgccttccttttcaactgtatgtcgattggaacgtttgcctttcgataatgacatggttgtcctacaacgactcaatgattcaatgaactatagttactttagacgacatagaaaaaccaatcaaatttatgtttttgaattaatataatcccaagccgtcagattatcaaacagctgctagatgagacaaagtctatcagtactgtgggcttacgtacttgggtgtaactaactaaactaagccgattgatctggtacgacatgctgccatatcgatggttcagattttggttagaattaattagcttaattgcatcggcacggacccaatcattgcgacatttatgtaacacaagatttctctccgtggcgtgcatgtgtcgtcactctcaatgtgtgtccatgtgattgatgtgtacatgacgatcgatgagcaattaagcgttgatcttggaaggccatcaacttaaggacatgttattttcctcttaatggattaataattcaccggcacactttgtaaactctcaaacagtacatgattctttcttttttttaaaaaaaactttaaccttatagatgaatttgttaaaacattaatttaagtccactttgtaacttaattaattcatttatctcttcagataattagagattgagatatatttgatagtgcagtgacaataagtatacggttttaattctgaggtccgtccctccaaatttctttatttttaatcttcatacaattatcacaaatcatatatctgaataaaagaacaccacccttaaattataaatcaaggtgggcacagccacgccattgtcgtgttcccgatgaggttggcgtatatacgtcatcgggtttgatcggtcggttgcgattgcatcatgcgcagtgtgcgacgcgctaccttgcgtgacggctccgcgcgcctccctcgccgtacggcacgtatcgagatgaacacacgggtcacgcttcagagttcacacctactacgaatcagcacgtacgtacaagagcactgttcacatttcgttttgggtagcctagtgagatggatttcacgaatttcaaacgaagttcacgtaggccgcggtgaatctgcgggtgcgttcagttcacgctaaaattaaaaatttggttgaaattaaaacgatgtgataaaaaagttaagaagtttgaagaaatggtttataactaaacaaaacctcgaatgaaattcggtaaaagtaaccgagggggttgatttgggagaggttctcagaatttatttttgtacggaccgagtggtaggttatttataatggaatatgttgatcatatttggggtatgtttagttcatgctaaaattagaagtttgattgaaatgaaatgatgtgattgaaaagttggaaatttgtgtgtaggaaaattttgatgtgatggaaaagttagaagtttgaagaaaaagttgggaactaaaccaggccatgaatgggtgcctgtatttatacctaatcatccattcggtaataagtgacgtaccaataagtaacgagacgtcttcgatgacttcgtcaatcttaaggtatattggtttagtcttcgaatatgtttattgaatagagtgtacctacgtctgtgtattcatacgtgtaagtgaccacgtgtgtatacgagcgcccacatctataccgtgtatcggaaaaaaataaaattctagacgacaaaagttaacatctaactagtgcttcttacacagatacagatggatgctatagaaatctcacgtgatggaaccaacccatccgagtccaagtctcagaggggggtatttggatactccaaattagcgttcaaacatccaatatggtaggggctaaaaagttttagcctatctaaacagagcctcagagttaatacatatatttgcatctacgattaattattcttttagtggtacgtgatatacatatcgacaacgagacgttcgtgacaatttcgtcgatcttaatatatgtccgttcatttttcaataatgtttaaaaggtaggacatacgtgtatatgtttacaggggacgagtatacgcgcgttattaccgctggaaaaaatcaatcaattataaccaggggaagaaccacgtcaagtagtgatcgtggggttgtttcgtggcccatgaacccacctactacgggcggccgtgggcccactaagttcgagtgggccatgttgggcttattatgttgttccacacaacttccatgctcacccaaccacacggtccacaccaacccacgcccttggacgcacttgcaggaggaatgatcttgtgaatgtgagatctcttctagaactgacatagatatatgtgcaacacatatgaacacaaatataccgatctacactttggaaacctcgaattgaaacatatccaatttgactccctagaatatatgtagaatctcgcatcacttaaccgtaaaatcaggtataatatctccaaatgttaaaaccggtatgaagtgactcccttgataatattgactgtggttttcgctgacgtggcacattgaccctagtcaaaccagcaaacgatgcaatgaatgcaaaaacaaaaagttaaaatgcattgtcccgcatgtaagtgaggtacccttcctttctactggccctctttctccccacgagtggcaagccagacataagataggcatgcagcatcgcagttggaaaatggtggtggtggtggtgacctgtgagcgagaacgaagcggtggcggacaactcggctagcgcggagggttgaatgcgggctagattttttgcggtggtgccatgaggccatccacaatgggtacccctgggtcgtgcccttgctcactgcgtccgtccgctatccgcgcgccgtgccctagaggggaacacaacccccacgagggggacgtgtggctttggctcctccaatccccttttcctgaggaacggctcaaaggaccccgttgtggcgacctcgatgccccatcccccgcctcctccccctgcattttcccttcttgccccccctctcagctgggcgtggtgaggcggagccggcgtagactgcgcggcctcgtcgatgtggtggacggcgacgggcggcgagagagagaggcggcgcggccagatctagcccaccgacagccggatctggagagagaggcaggagcttggacgccgtcggccaccgcactgtgctcttgctcccgcgctcgcgcgctgtccagcctcccgccgtcggccacatcgcccctcgcgccgctcgcccgccgaccagctctccggcacgcgcggagacgggcagccgaagggcggcggagggagcaacgacgagagagagggaggaaggcggccctcctcatcgcctcgcggctgccggcaacgagagagaggcgagcatcgagagggagatagagaggcgggcggtggcggtggctggggagagagggagatggatgcagggctggggagggcgaggagggaggcggtggcggtggctggggagggcgaggagggaagcggcggcggcgagcagcgggggagagaggaggaaggtggcggtggcggcgaatgggcgacgagggcgagaataagccataagagagaagaagcgaggaagaaaagagaaggaaaaaagaataatgggctggagaaggggtatttggggatttttcatctggggctactttgggccaagacacccattgtgggctataatacccttaccgggttgcttcagattttaaggagctcatccagggatacctcccattgcgagccgagttttctacgagtgtcctcggttagtgaggacactctaggagtgtctcacattgtggatgtcctaaggagctcagcagtggcgggagatagacgtcgtcctcactgcccccacgccttgctgccatatagattccaaggagcttcggaggtccatcgctgtcacatctgcatgccagctccgaaggcttgagctcgactagggaggtagacccggcaacatcacgacccttcgccactaggcggacccaccattcagttgttgttgcaaccgatgagaagctgttggacttgtgtgggggcactaccgagcctgactctgactttgcctcaccgtcgccatcgcccttgaccatcccgagtggtggactcctcgtggtatcgaccccttcccctccccttgaccatccccgccggctgaactgcaccagtcagattcagccataaagcgctaatggtgagccgacaaggacgggatgaaggtagaaaaagcctctcctgcctggggaagcaacaccatttccacccggtcttcttcttggcgcagaggatgacgctagagaaggtgtcagggataaagttgacaatgaagatggccatcgcgtggataaagcttagaagacgccaccaccgtctgctattgccaaagccaccctgttgcacacgagaagacgatatgagagacggagggggtaaagagggaggaatgacatgtgggggccactttttaaaaattctttttataagtaggtgtttttcttgttgattgcaggatcaaatcaactggcacgttcatacatctgaagacgagctttgaacctgcactggagtcatacatctgaagacgagctttgaacctgcactggagttaagcagatctcccaggcctcgtgttttctgtcaacagtag

SEQ ID NO: 20403 - DNA, 17168 bp, Oryza sativa
tcctgcaccccctgtggttagtgcaactcaactgtatagaattatgtttgtactacagctaaatgtggttagtgcgacacaaccgtataggattatgtttatactacagcttgctgctatagataatgtaggttttcatgttttgtgctttggtagactggtagtcgtatacaatgtgagtctgtttgtggaaatgttgcagcataggcacctatctaacctgttccatagaaaggtatgaatgatgttgtgtgcaaagtgcatatgcatataacagcttcatgatggatggttgaatttaatgtgtttaaccttctgcctattctgttctgtccttagatgttgcatataatcttggtcatggctgatgtcccaatagagtactttctagcttggaatcatgcatgctcacaggtgcacgccacttatatatccatctgatgactgatgagctgcacagctgattgtttagtaagcagcacatgacaatatgacatcagaacctgtcgtctcacaaatctgaagattaatgtttagcttcttgcttctagtgagagattacttggtctgtggccttctgtcaagtgccttgtgcatgtatgcatagtgagatgactgactgatacatctgtgattctgtgtacatgttgatgatggatgtaggctgcgtcgacgctggaaatggacgggctgagtgtactgtgtgcacagaagacggcggacgtcgtcaagaagcgcaccgtggaggaggtcaaggcgctgctcggcatcgccgacgtcggcatgacgccggaggaggagctcaagctccagcacgacaacgatgccatcctctgcctccgttaactacccgatctgccgatcatcatcatcatcatcgctacttttgtcgctgaagcattttgattccatctcgcctactatatatgatgtactttgaggtggtattgggttctctacgtctagatactagatatacagttttagcttgatgcacactggtagtagcaattctgagagaagtttggagtaattctgagagaagttttgccaggtgctcctgtgaacagtactaattgagagaaactattatagtgtatcatattaccatcgaagaacatgagttaattggtcataaaatcattgtgcatttcgaatactagcaaggttatatatgtcttactccatatccattagcaaggttattccgtcccaaaataagtgcagttttgtattggttatgtttaacatttgatagttcatcttattcaaaaaaaattatgattaattttttattgttattagatgataaaacatgaatagtgattatttttttataaattttataaataagacggacggttaaacgttggatacggatattcatggctgcacttattttggaagggtggtagtagtaatcaaggtgataataatgactagtaattcttgtcgagagatactcaattccaatgtcatcacgccgttcgaaaatttaaattctataaaactactcaagtttcttcgtgcaaaattttttacaatgtttatgtgaaatgttattatcacaagacgataatcttgagaataccaaagtatgaagaacaaaaattgaatcggcaaatatccagtactaccattttctcctttatcaaaaattgaatcggcaaatatccagtactaccattttctccccaagatgccgttgggcccacgccctgacaggcaggggatcacgtggcgtagcgggagggtggtgtagggaacccgtcccgtggctgcaggtggggccaggtataatcctgggcccacctgtaagtgagaggagtctgtatcaatataaccttctcgtaccttcacctcttcaacattgcgccaccttttcacccacccacttcacccccttccgctccctctccctcttcctcctcggcgacggcgatggagggcgcggcggcggcggcgggggcgggggcgggggcggggttgcccatggtgaagttgcggggaggcgacggcgtggagttctcggtgcaggcccggcggctggcggagctcgcgccgcgacacgtatgggacctgcccgccatcgagtccggcgacatctacgacaccgtgcagctctaccgcaggaacgccgagcgcttcacgagccgcgccaccggcgggctgcttccccagggggtcctgaacgtgcagaccatcttcgcgcagagagtcaacgacctcgacaccctcggccacctcacaagggtaagcgcccctcgctcctctccctctcctctcctctcctctcctctccggcaatggaggcatcttgcaattattagggatgttttccggactgtgtggtttgcgttgcgattttgtgtgcacttcgtcttcaaccctctcctctctttctcccgttgatcggaaccttccgcggattcagcagccagcgtcgcatccggcgacgggttggggtggtcgggggattggggggtaggaggaggaggggcctatgctgttccccgggcttagagtgatggccggggaggtcgcggcttggcggtggaaggggtcgtcgacggcgacggcgagggaaaccgtgtaggcggcgggctgcgccggtggagacggggaaggcgcagttgcgcagctaatcgatcggcgaggggagggagagagagagagagagagagagagagagagagttcactgttctagaggtagaagatgcacagaacccgttggatcttagaaccaacggcccaaattttggctgagatcttgcgaagaaaacaaacaagtagcagcttaatttgttttgtaagatattagtattatgtaagatatagtgactaaagtacttccacttttgaaactttgtcctagatatgctatagtaggctgcctgatttctctgttcagacagatgtttatgtttctaatctgatttctctgtacaggctgcgattgttctcggcatggaagatctcaaggatgaatgctacaataggatgctgcaagatcatcagatgggaccacagcaagtgaagctgtttttgcagaatgtgctgggacacccgtgaacggttccgcaaatggcatttttcctagttatcattagcagatcatcaccctggtctatacctagctagtgaagtatatactgcctatgtttcaggataggttaagtcttaagtacatacatggctagaactctgttaagccgactgcgtgcctgcgtgcactttatcaggtctagatgtgagagctacttgagttgtttggtgctaaggccgattcgaattgctcttatcaattcagaattcacaagcttaccagctctaccatgctattctgctttacttctgtttggatacatacagctttggttttctgaggtgttggaaatgtctgataataggtgaggccttctataatcatgctatgtcttttgctgctgttgtagaaatatggtgcactgctgcataggaattatgcctgtttgcattgtcatttgccagtgattcaaaaatttgcttttatctcaatacgagaatgtgattgaagccctcttctggtagaggatgatcgtgtggatattttctttcctgttgtaaattggctggttattttgaatattttatttttttgatcgcctggtggatctctgctgcgatgatgtgggcgcgctgataatgaaaagtattaattatgtaacctgggaatcagaatttgtgttgctctttcattttgttgatctgcttgaaatggatgtattcgggattgtatgaacctctggcttttgctcatttcattaatgaaatgggagggctctgcccctctttcccaattttgctggatgaaatggatgtacagaaattatcctgatatcttgattccacatctgtatgtttcaattttgcttctcaaatcactgatgatctctttggtttctggtgatgtacgagacactactattctatggaagcagcagccgactgatggagcaattctggttggctgatcctggcaaagggacagtctcaggggatcaaataaaacctattttatgaaccgtcaaaatatttggctgcagtgagatggttattgaatgaaatggaacaagtctatactatgcttatgctgttgtattctactctgttgctccatgatgtgtattctattctgctgtctgagcaaacatgtcctgaactctcttacaatttttgtgtgcctgaccactgaataagaactgacaatagattgcattgtcacttttggaaccttaaattgaggaagaataataaatggatttttttattcattttgcttaacaaaaccatgagttgtctactatctagtgatgtgcaagtcttgtggaaaatgtgtttgtggcattacagtatgatatgaattgcagaaatcttatcgacaaaaatctcatctgctgatgagataattgagaatggagacacctgtcgatggcttttctgctgacgccaacttgccaagtccacggcgaagtgactgtgaggtggcgctcggtgagtcgtccgatcaacattgtgcgccgtagatttgctactaaccgattagttttattctgtatttccagaagaagctgcagatttttttttcttcctattcggaattggacccagaccgtccgatcactaacgtgcgcaccagattgacaaaaaaaaaaacagagaaaaactctctgtatgaatatccaaccccagcaatatcgaaatttgaaaccgcagagagagagagagaggaggacgaggaggcaccgaggcagcttgctccacacgcctccgccgtgactcgccggagaggaatggaagaggcccgcgcgagagtcgtcgcctccgccgtggcgagaatgaagccaccgcgggcgacggtgacgcatgccactccggccgccgtcctcgcgccgcccgtcggcgacgtcccgcacgccgggtggcgggggctacccgacgacgtcgtcgccagggtgctcgtccacctccccgtcgtcgacctgttccgcctcggctacctcttctccccgcgctggctcgacatctggcgcgccgagccgctgtatctccacgaccgccagttcgtgtctcctcggatcgccgcagccgacgtcgccgacgccatagccaacgttctcgagctccacgtaggcgacggcgtccagttcgtaggcgtataaggagagagcgggagcgacgacgacgacgacgacgatgacgacgacgacgacgacgacgacgatgaagacgacgacgacgacgacgacgacgacgacgacgacgacggagatggaggtggaggcaacgaggtagttggcgcggatggccacgacctgggcgtcgtcgtccacccatggagagaggatgacgacgatgatagcgatgatcatgacgggggccccgacgacgccgaagacgaggcagcagttcaagacgccggagtcgtcgacgattctggacccggggtcgccgtcgaactagaacacgaggcagcagatcaaggcggtggagtccgagtcgtcgacgattctgacggcgaaggcgccgccggccgctgccgcctccgattccctggaggcataggcgccgacgacggcgtcatcagcgacgacgacctctacggccacgacgacatcccagatggtggttacgagatcggccgcgtctacagcttccgagtggagaccacgcggtggcgcgccgaccagctccaccgctggtgcgccgcgctccagcgcggccgtgttcgtgaggtcaccctcaccaacctcaccatggaagggttccccgacctcccccagggcatcctcgattgcggcacaagcctcaagggactccacgtcttcttcttcaccgtggaggccgaccacatcgaccccctcgtcaacctccgcgtcctcggggtgtacggctgcagcggcatgatcacgcgagcactccgccccgaatcggaaatccgggtgctgacgatcgacttcaaccatctgggagacgtcgtcgtccagaccacgcgcctccggtctctgtggatgttcaacaacgtggtgcagggcacggtcatcgtgaacgacgccctccaattccgggacctgcacctgttaccaccgacgaggccatccaggatcttcatcggtgacgcgcccagcctgcgaagcatcggctctctcgatctcttcaacaccgtcttcgtgatcaagggcattgtgattcaggtatgatcaaatcgatcaaatcgaatcgtgtccgtgtgcactgcatctgcatgcaaatcgatcgatcaaattcagacccctgcatgctgctcatccgattaactcaaatccaaatccaaattggctaattaacaattctatactctgatcatgcgcaggctgggatggtgcagcgtcctccaaagatgcgttctgtcaggattctcggcttacgggtgaactacacagatatgggtcacagagtgccccgtgagatagagcagattctgaagtgtttcccatgcttagagaaactggagatcatggtaataaacaaccaatccaaacaatcaatcgtttcattgtcctgaaatttgctgttatttgctctgcatcagtattagactatgtctgaattctgatttctgattgggttgtgcgtgcgtgcctttgctgcagaattactatcaactgtctctgtagttcaatggtaatatataatatgtctgaattctgtttgaattgtgcgtgacttgcagaattatcatgtctgaattctgattgaggtgtgcgtgtgtgcctttgctgcagagagacgatgaggttacaccagaagaagggctcctcaaagctgatggtgaacacatctatcaagggaacaatttcttccgtgaccttggttgtttcagccatcacctgaggtggatatatcttacaactttccgagggggcaagtatgaacttgctctgggcaaagccatcctcgacgaagctcgagccgggacaattttcagaatggtacccccaccaggcagcaataccgacaacatagttaaccagctaaggcgggctatgcaacatttcagaatgaccactccaaatcatgctgtcagagatcgacatgtgtccgttcttctaagtttggatggaacttgaagaaggctactccagggtgttgttctgcgctgttgtactactgtcagagagattttaggctgggctcttttcttcagtttgtctagcttgtcaaatgagcgaattgtgaatgatgctctctttgagtctgcatttgaacaaatccaaatcttgatagcagtaaaagtagatacaatatcttgatgagatgagcatgctgtttgtgctttgcttttaccggaaaatttgatcaacataaaagtgaattatttttcttagatgctaaacaactgtagtctgtagtgtacatgtatatttgttgatcatgatgctagacaaaccggaaaattatttgactgcggctagatttttatacaactaagtgacatgcatatacttgggtgcaattgtacctggtgcaaaaagaacgttctggttctccactgacctgtcaagcttctacatgtgtatggattgggcctaaagttaggctctaaactatacatgtagatttgttgatcatggtgcgtattgatttgttatgcatgtgtcaatgtctgtctatgtcgttcattttctcctactgatgttttttttttaatatgcgagacgcacatttttgtattaagaggaataaatgtatttacagagtgggcctgaaaaataaaaagaatgcgacatggtacaggagaggggaaaagaaaagcataagcctaatctcctaaatgatttggcgacccaagaacaaacgaaggaactgtcatggttggtatggctgatctagccatccgtcagaggtccgcttcccccatcatagccctggctatctccatccaaggtccgctcttctggttgaagacccgattgttcctttccttccagattgtccacgctaccagtgtcgcctcctactgatgtgttgagagtttctgaaatataattacatgtatctatctgaacgaacatgtactgcgggctcttacaatttttgtataggctgtgatggtttaccttaccagaccaccattaatcttacaatttttgtaagattggcctggcacttacataatcatataatgtatgaacttaactgtcagaaatattataccactattaattgttttggagccttgaattgaggaaggaatatttgaacttttttctttttttttttgcttaattaacaatcaacataactactaactagtgttgtttaccgtcttgtgaattgtgatgtggaactgtcaaccgtgtaaagtcttgtggcacttcagtatacgagttgcagagaaatctcatctcccaatgagattgctcatgctgttgagaaactctgcatttcacttttctccagcgttggaggatcatgtcgacggcgagcgccacctcttgcgctgccgctgacggtgttcttcagccaccaagttcacgccgatcgaagcgccggtgttctctctccggtggctaatcttagtccgtccgatcaacattgtgcgccggagatttactaagaagcgatttttctccagaagaatgctttggcttttccgtatatacagaagaagccgcggatccactccaaaactggatacaaaccgtccgatcagtaacgtgcgtactagattgaccagaaaaatctaaagcgcaaactcctctctataaatatccaaccccgcggctacattcctagccgtagccgatagcgagatcaaaatttgaaaccgcggagaggcggcagcttgcgccatacgcctcctcctccgccgcgtggagaggccgtcgccgaccaccagccaagtcgccggagcgagcccggtggccggagaggatggaccacgagagcatcgtcgccagcgacctgtccatctaccctctgccgcccgggacgcgcaccctggccactccgcgcgtcgtcctcgcgccgcctcccgtcaccgtcgtcaaccagccgcacgccgactggcgggggctcccggacgccgccgtctcccgcgtcctcgaccgcctccccgtcgtcgacctgttccgcctcggctacctcttctccccgcgctggctccacatctggcgcgcccggccgctgtatctccacgaccgccagttcaccaccccaccgatccccgccgccaacgtcgccaacgcaatcaccaacgtcctccaccaccacgtcggcgagggcgtccagctcctacccgtacaaggtggcggcggcggagggggaggccaaggtgaaggagcgctcgtgggcggcggcgatgccgatgaggccgtgaccagcgacgacgagatctacgaagacgaaggcatcatccagaacgccggtcacgagatcggccgcgtgtactgcttgcgagtagagaccacgcggtggagcctcgatcacctcgtccgctggtgcgccgagctccagcgcggcggtgctcgtgtgctcatgctcgccaacctcgccataccagagcaccccgaacttcctcaagccatcctcaactgtggcgccagccacctgggactccacgtcttcttcttcaccgtggaagcctaccacatcgcggccctcgtcgagctccgcgccctcgggctgtacggctgcatcgagggccacggcatgatcgaccgagtcctccaccccgaatcaccgattcggaagctggcaatccacggcggcatggggcgaactttcgccgtcgccggcgccacgcgcctccggtctctggtcttgttcgacaaccaggtgggcacggtcgccgtggacggcgccgcccgattccggaatctctacatgagcgatacgaagccatccaggatccgcatcggtgccgcgcccaggttgcgaagaatcctctcccttgacatcttcaacaccgtcttggtgatccaaggcttagcgattcaggtatgataaaatcgatcgatcaacctgcctgctcatttggttgacaccaattctgaatctctgatcgtgcgcgtgcagattgggatgatggagccgcctccacagatccgttctgtcaggcatctctgcttacgggtgaactacacagagatggacgtcaggttgccccgcttgatggagcagatcctgaagagtttcccacgcgtaaaatcactggatatcatggtaatgctaatgaacagccaatcctatccaataaattgttgcataattctgaatttgctgcttattaattgctctgcactgatatgtctgaattctgaattcgctgtcaattcctctgtacaaaagtgtgtgcattttgattttttctgactgagttgtggtctgaattctgaatttgctgctaattagtgatatgcgtggattctgattattctgatcgagttgtggtctgaattctatatttgctgtcaatggctctgcactaatttgtactatgcgttttgattttctgattgagtcgtgttgtgccctattgcagagatgcgatgacgttacacaagcagaagggctcctccagtggaacgatgcacactatgacgggaacaatttcttcgatggccttgagagtttcaactatcacctgaggtggatatatcttgaagatttcagaggaggcaagtgtgaagttgctctgatgaaagccatgctcgacaaagctagtgtcctgagacagttaatgatacaatactcgacaagcagcgtcccccagctcaccctgaatcagctcgacttgtctctccagaatttcaagctgcacactctaaatggtgccatcagaggcaatcttgtgtcctttgttgcagccgatgcttccggaagttgcgtacgactagcagcgcaaggctaggtcaggtgttgttctgtctgtgctctgcttcggggagagagagagagagagagaattttagggtggctcttctcaatttcttcaggtgttgctagtcaaatgatgctataactgatattctgctaagtgagtgaatgatgctctgagcatcaatgcagtgaatgatgatgccctctctcagtctgaacaatatgttagtattgagcaaagtcaaatcttgatagcagtaaaaatgtacagtatcttagcatctctgcaatagggcacaacacaactcaatcagaaaattctaaaattctgattgagttgtggtctgaattctgaatttctgcagtaatgtgtgtggaactctacattctgcttttctgatttgagttgtggtgtgctgcattgcagagagacgatgaggttacagtagcagaagggctcctcaaagcgacggatgaacacatctataaagggaacaatttcttccatggccttagaggtttcagagggggcaagcgtgaacttgctcttatcaaagccatcctcgacgaagctcgagctgggacacggttaaggatggaatactcaacaagaagcaaccccgagctcaccatggatcagctcgatcaacttgtctctccggattttcgagctgctcactccaaatgatgccgtcagaaacgatcgtgtatcctttgttgcagctgataattctggaacttgcgtacgaccagcagcataaggttaggtgttgttctgtgctctgttttgtcgacatcgagagagagagagaattttagggtggttctgtgagcgtcaattttttctgtgagccttaccactgaacatggcctgacacttgcaattttttttgacatatgaactggcagaaatatatcgaaataggctgtgtttagtttaacgccaaaattggaagtttgaataaattggaacgatgtgacataaaagttagaagtttgtgtgtaggtaagttcgatgtgacggaaaagttagaagtttaaagaaaaaagttgaaatctaaatagggccatagacactttttggaacattaaattgaggagaagcaatctgcgcgggcctttgcccccattggaaatggattaggatggatcagctagcaagaactggcaagcagcgccacctcttacacgaaggtaccttcaaatcagacgtccgatcctcttaggccttgtttagatctaaaaaatatttggtcaaaaacattaaatcaaatgtttggacacatgcatggggcattaaatgtggaaaaaaaccaattgcacagtttgcatgtaaattgcaagacgaatcttctgagtctaattacgttatgatttgacaatgtgatgctacagtaaacatttgctaatgacggattaattaggcttaataaattcgtctcgcggtttacaggcggaatctgtaatttattttgttattaatctacgtttaatactttaaatgtgtatccgtataattcaaaaactttacacacaaagaactaaacacacccttaaaaaaatcggtcagacaaatgtttcagttgaccaccagtaaagcattaaattatacatgataaacaaatcaatcattgaaacatttgattttttttgcaacacagtgaagacacacgttgaaacatgttgctatcacatatgaaacattgagtattaacgaactgaaacatacatttttttcatcagaacataaacatgcgatatcatattgtgaagatttagttacaacaaatacaacggtgttattggattgtagattagaaaagtagtttaagataaaaattattttgaaggttgctaaatccacgcatgcatgcatggatagtgatgagagagagagagtagggcaagtagctaaataatttttgtgaaacatagtgaatacatactttaaaacatgtcgttatcacataggaaacattaagttttaactaggggtgggcatgtggtctaaccgaaaaattcggttcggttcctcggtctttcgaaaatctcggtcttccgaatcacaagaccgatcggtcttcaagaaaacttaggaccgagcacttcggtcttcggttagttcggttcggtctcggtcatagaccgaactaaccataacagtggtttaaacagcaaaaaaaaaataatcacaaaaaaaattattccatacaagatcaatgaatcgaagcaactcagatgaagaactacaatatgatgccgctagagcatgattcaggaaaaaaaagaagcaaatcaaagcaaatcgatcttgccatgacttggatcccgtcgatctccacaattccacctaaagctccagatcccgtcgatctcccaccgtcgctttcatccccgaccggcctcctcagccatctaggtctccggtgcagcagggtcaccggagggagcacgatctcttccgccatgacaggtgaaagggcggcgccgaggcggaggcgtcctggccggaggcagcgtcgacgcggtggaggctagaggcggagggcggaggcggggcggtggaggcggaggccaagcggcggtgagcgtgaacgcacgatggatggggaggaatgcggcgctgaggagggagtgaggggcgtgacgcgtgaggtaggcagtgggagatagggtgggattagggtttatgttactgggcttattgggcctcataggtctattaggtcacaattcggttatctcggttaattcggttaaccgagcctaatgaccgaaagacctgaaataaattcggtcttttgatggctgagaccgaactactaaccaaatttctcggtctcggtcttgatcttttcggttcggtttttcggttcggtctaattgtgcccacctctagttttaacggtctgaaacatatatttttattttatcaaaaatataattatgtgatatattattttaaatatttaattgcaacaaattcaatcgtacgattggatcataatcggataagtagtttaggaaaaaaatatttacagtaatgagaaaaaaagaaaaaaaaactagctactacttattttgcatgcatgcaacagtagcaaggagcccatatttttttttcattcagatggggctaccgaacaagatgattttagctcttacactgacgatgaagtaaggcctggtttagttaccccaaaatttttcccaagaacatttcatcgaatctttagacacatgcatacaacattaaatatagattaaaaaactaattgcatagtttgtggggaaatcgcgagacgaatcttttgagcctaattagttcatgattagccataagtgctacaataacccactgtcacgccccgaactagtcccgaccggaactagcccgtgacgctccaaattaacctgttaatcgataccagtcccaggaaacagtgctggtatcacagggagacagaatatcacagcaacagaggtctctttattatagagtagaagtacagtcatgttgggctgcggacagatcccgagctcacaactgcattacaaaaggaaagcggaagccaggacttggaccaatcatcacaggcgcgacttgggaactaggccgaaaccctaaaactcatcgtagccgacttgctcctggaagaactcctcgtcagcaggatccacttcatcttcttcagcaactgggggggattatttatatagagcaagggtgagtacgggagtactcagcaagccaggggaaataagtgtttaatgcaggcttcaaggaaaggctgttgttttcgtaattgattttgtttgaactcttttctaaaaagtctaagtgagtgcttctcaaacgacacggatgagacagtgcgtctcgtccggtcggagtatgtgcaatgtatcagtctttagatcttgaaacagggttggcacccggccaacagcttttcaaacggccacccgggccaacaacttttcaaacggccacccgggcctagctgatcccgtcagctgctgatttttcaaacatcgaacccagtttcacaacagcaatttcacaagcagtagtcagacaaaactacgctaggaattacctcacatccgcccatgaccgtgggcacggctgttcgaatagtttgttaacctctgcagagggggtacactttacccacacgacattactaacccggatcacccagcccgtggggatcagccacgtcgggagacctccaagctttcatgacaaggcatttcgaaagccgatacaggtttaccatatgccgacgagaggggtcccagaccaacaacaggttaggtcccagaccatactgtgccaggaagcccaggggtcctccccgacaccaccccggcgaatccacatgtctctcggcatcaaggctcccctgataagctagttactcagccaggggtgtcccattctacccatgtggtcgtacttgtcttatgtttggatgaaattccaaggaatcggtccttaagtgcgagagcgggaaaccgtacacccggtacgttccccggtccgcggttttggaaattcatttagttcgcaagcaccgacccaggtgtcgggttttccaagtcttttgtaaaactccagttttacccaagttgtttctcagattttaagtttgaaggcgaccgtcgatactcgcacagagtgcacgaatatcgaggtgcaactgggtttttacaaggggacatggtataacaattaacaaaggaaggatcaaatgcaacaaattaggtaggtctgccaatctgccttgcagacgggacaacagattaagtgtgatcctatcaatgcataatatttcgcaagcaatacaattaaatttcaaatataggctcaagatgttcaaaggtggcttgccttgctcgagatctggagcttgatcctcgaaatcctcgcactgcgggtcttcgggctccgaaactacacgcgaaacgggacaactcaacaaacggcgaaaataaagccctattaaagacctttaagcgtgccactatatagatctcgagatttgggaaattttagaagttgaacggagtcaaacggaattacggttgggaagatattgaatttctaagattattggatttttggtctaaaggaaaaggatttaattaaatcctttttgaaaaagaaaagaaaagaaagaacagagggatggaaattagacttttcctcgggcggctagggcgcggcccaaggtaaatggagcggctcggccgagcttaacgggccggccggcccaagacggcccaagcgcgcgcgcgcgggagggaggagagagagtccggtggaccgggctcaccacgcgcggtcccgggtgggacccgcttgtcagccgctcggctcaccgtgcggagggagtacgtggctcatgcgcgcgggcggggaaaggacgcggtgcacgcgcgcggtccgtggtggacgcaggtgcggcgggcccacgagcagcctcacggctcgcggtggaacgcgcgcacggggagggactgaccggggtcggctcgatccggtctaggctgagctggcgccgacgtggcgcctacatggcggccacgtgggctggcgggaggtagacgacgacccggccacgaatggacggcgggcggcggcggcgagcggcggagcgaaccacggcgatacgggcaaaagcgtgcacaccgggcggttgcacgtgacaaggggagacgagccaacggctcggattcgccggaggttgctcgacggcggcggcaaccggcggcgggagaagagggaaacggcgacgaggtcacgagaggtcgattcccggcggtaagagcatctatgcggcttcgggaactcgacgctagcgtcggattgggcggaactacgccgagcgaggccggcgacgagcgggtgctacggagctcgagcggcgacggcggcgaacacacggcgagcgacggcaacggtcggggcggcgccggctaactacggggaggctactcaagctactaccgaaagctagggggaggagatggagcgaggaggaagaacggagagagacatcaccgagaagaggaggggtgctgtgacgagaggccggcggcgcgggagtaatctctccggcctcgggccggggaagaggaaggagagggcgcggccgaagtccccttccgcgtcctcgaacgcaccggctctcccggcgcttggcgaaggacggcggaggcgagacagagcacgcaacggcggcaagggctgcagga

SEQ ID NO: 20404 - DNA, 4602 bp, Oryza sativa
acactggcgacaggcgcggcagacgctgacgacggcggcgaccgggcggtcggccactcggcgcgcgcgcgcgggaaacaacgggcggcgtccgcgcgggcgcgcgcacgcgaacacggcgcgcgggaagcgtctttgcgagcagggagctcgcgcgaggggaggggcgctcggcgcgggcgactcccgcgcacgcgcgcgcggcgcgcgggcggggcggaggggggagcggggagagaggcgctcggggcgactctcgcacgcgcgagcagcgtgcgggcggggaagagagagagagagagagagcgggagagcgcccggggggagagggagagatgggccggggaagaggggaagatgggccgagcgagattcggcccatcgacctcgggggaggcaaaatagacttttgaggaggaatttgattgaaaggatttggattcggaattgaactcgacgatagatcggggattgagatcttgagatggcacggacactagacaacaagcaaagaaacaaatttcgcaattagggtttttaagagataattttcccgctaggcgccacgacggaacgggcgctacacccacatatgctaatggcggattaattaggctcaaaagattcgtctcgcgatttccagacgagttatgaaattagttttttttatttgtgtccgaaaactcctttcgacatacggtcaaacatccgatgtgacaccaaaaaattttcaattcgcaacctaaacaagcactaactgatctctctctagtgaggggtgcgacgtcggtgaggaagaggacaaagtgcgaagagggttaatcttagttgttcggcaacgggacattgtgtgaaagtttgttttgttttccgtgtgcacgcttcccgaactataaaatgtattttttgaaaacaaattatgtgaaagttactttaaaaaatcatattaatttatttttaaagtttaaaataatttatactcaattaatcatgcgctaatagctactgtgtatcttttcttctcttttcctctcctctcgagctcacctattattggtccattctagaagcaggagcctatctgctccggagttggatccgagccgcccgatcagtaacgtgcgcagcagattgaccagaaaactagaagaaaaactctataaatatccaaggcccggtactttcctagccagctggcagcctccaacccgaaagcgatatcaaaatttgaaaccgcgcagaggcggcagcttgctccacacgcctccgccgtgtcgagatttccgactcgccggagaggaacaatggaagaggaccgccggagaagcgccgccttcgtcatgtccggcttcaagtcctcgccgacggaggccaccgagtccaccccgcgcgccttgctcgcgcctccctccaccaaccggcacgccgactggcggcggctcccggacgccgccgtcgcccgcgtcctcgaccgcctcaccgtcctcgacctcttccgcctcggctacctcttctccccgcgctggctccacatctggcgcctcctcccgctgtatctccacgaccgccagttcaccactcccccgatccccgccggcaacgtcgcccaagcaatcaccaacgtcctcgagctccacgttggcaacggcgtccaattcgtacccaaacaaagcggcggcggcggcggcggacatggaggcaacgaggtagctgcccctgatggtggaggcggcggtggcggacatggaggcgccgacgacagcagcagcgacgaggagagcggcctctgcgacgacgtcatcgcccacgacgccgccatgctaaacggcggcttcgagatcggccgcgtgttctgcttccgggtagagaccacgcggtggagcctcgagcagctcaaccgctggtgcgccgccctccatcgcggccgtgctcgtgtcatcgtcgtcgccaacctccacctaccagggtaccccagatttcctcaagccctcctcgactgcaccagcctcctggagctccacctcttcttcttcaccgtggaagcctaccgcatcgacaggctcctcgtcctcgggctgtacagctgcgcctggggcctcggcatgatcgaccgagcaatccaccgcgaatcggagattcgggagctggcaatcgacggcgtcgaggggtcaaccttccgcctcgccgacacgcgcctccagactctgcgcatgtacgaaaaccaggtgggcacggtcgccgtcgacaacgccacccgattacggaagctgcacatgcaccatacgtggccatccaggatcagcatcaatggcgcgcccaggttgcgaaagatcgtctctcttgacctcttcaccaccgtcttggagatccaaggcatagtgattaaggtatatttgcaaatcgatcgatcaacctgcccgcttgcccaaccaatttgattaacaccaattctgaatctctgatcatgcgtgcgcaggctgggatggtggagcagcctccagagatccgttctgtcaggtatctcggcttacgggtgaactacacaacgatggtcgacatgttgccccgccagatagagcagatcctgaggagtttcccacgcgtaaaatcactgaaaatcctggtaatgccaatgaacggccaatcttatccaatcaattgttgcataattctgaatttgctgcttattaattgctctgcactgatatgtctgaattctgatttttcttgctgagtcgtggtctgaattctgaattcgctatcaattcctctgcacaaaagtgtgtgcattttggttttctgcctgagttgtggtctgcattcttaatttgctgctaattagtgatatgtcttgattctgattaaatttgctgtcaattgctctgcactaacttgtactatgcgttttgattttctgatttgagttgtgttgtgctctattgcagagatgcgatgacgttacacaagcagaagggctcctccagtggaacgatgcacactatgacgggaacaatttcttcgatggccttgagtgtttcaactatcacctgaggtggatatatcttacaggtttcagagggggcaagtgtgaagttgctctgatgaaagccatgctcgacaaagctagtgtcctgacacagttaaggatggaatactcgacaggaagcctcccccagctcaccctgaatcagctcaacttgtctctccggaatttcaagctgcacactccaaatggtgccgtcagaggcgatcttgtgtcctttgttgcagctgatgcttccggaagttgcgtacgactagcagtgtaaggctaggtcaggtgttgttctgtctgtgctctacttcgagagagatttaggctggagatggattctaatagctcgagtggatgtccacccgtttattgcatgtcaattagatgattacgaaaaatttttaaaaaaattaacaagatagatcaatatgtaatatatcactccacaaacatgtaagttcaaattcaacttctacaaattataacaaaaaataacaaatttaattgtaaatatacatatagtaatttaagttttgattgttatttttgttacaacttgtagaagttgaattttaacttgcatatttatggattgatatattacatgttgatctatcttgttcatattttttcaatttttttcataaccatttagatgacatgcaataaacgggtggacgtccactcgagctgttaaaacagttttccatttaggctagcacttcaatatcttcagtttgtctagctgtcaaatgatgctaactgctgttctgctaagtgagtgaataaagggtagtggtggtttttaagaacttttatcatttcgcacagtgttattatttgaactagaataaggggaagtgatgattttgaagaactgatatcatttcgcacagcattactatttgaattagaacatatgttttcatatagagggtagttgttggttggaacaatttatgagtgctttaatatatactccatagttcacgatatttacgaaatgtgtcagctgggaatatggtactgacaattggggaatcatgtagccttcattccccaaatagtttattagaatggtctgtctacctcttgcatatttccatacatgctgttgcatattttgtcaggtcacaagatagcaccatacccatctttacttaatcctaaagaattactcatttttgtgaattctcttggtttgcatgttgaagtgtacacaaatgagataagcatcatgcactttctttgtggacaaagaagtggaaattctttgcttgaaattattattgatgctcactgcctacatatgagaagcttcattagagtgcctacaaatgcagtatatatgtgcagtcgcaacaattttgtgtgttaagtcagcctaccaccaattctgaagacaccacttatcatgcttaaactctgactcaactgggcatgatcatcttccatataggttagatatctgaatcttgatcagatctgtgttaacaatgctatgagcatcaatgatgcattgatgctaagtgaatgatgatgccctctctgagtctgaacaatatgct

SEQ ID NO: 20405 - DNA, 6611 bp, Oryza sativa
cagtatcttcttcctgagctccggtcatcgccacggcgtcatctcacctcctcgccgatcagtcagtcaccctccggccgacggacaccggccggcgatgtcgaagaagagatagatcaatggagaattggaaatgagaaaacacacactggcaaatggatggcttcttcgttgtcccggccgcatatcctttcctatggctttctttagttagtgtgccaaaaattttattaaatatacggacacacatttcaagtattaaacatagactaataataaaataaattctagattccgcctgtaaattgcaagacgaatttattaagcctaattaattcgtcattagcaaatgtttactatagcattacattgtcaaatcattgcgtaattaggctcaaaagatttgtctcgcaatttacagtcggattgtgcaattattttttttcgtacacatttgatgcttcatatatgtatccaaacatttgatgtgacggaaaagttataagttagaagaaaaaagttggaatctaaacacggcctacgtaggcccaacagaaaattgaatctcgtatatctggttcttgggcctatattatccatcagtccatcacagttgttgaatcattcttgggctgttaggctaattgcctagtagaaataaaacattaatacctttctcaatgactcgatcacagtaaatcctaggcgaaatttggtatggtccactcttctaaaagatgtcttttcgagatatgttacctgctacctctgtcacaaaatatagctacatttttactacactcttatttggaccaaacacaatcattcaattttgtttcatcttacttctgtgcttgtattttagaacggagaaaataccttattaaacttaaatactactagacccaaatcctcgttacttttagatttttttaaaaaaagtttcctttttattagcattatccttttcatttaatttttcctcgcttcctgttctctctgcccattggaaatggatcaaactggtttatatcaattcgatcagctaagcgagaactggcgaaacaggtggactgaatgacatgcgggcccatcagttcttttatttgactgggatgccacgtaagtaacaggtggataggatgcaaattgaacagtttataaagttgacgagtaaatggtgttcaataaatcaataatataaaaaaataacactttctccccatataaattccatctagcgtaaggaggagatagggaataatcaaatcagcacggaacgtgcaggcataacttcaacttaaaagtcaaattatatgcatggatattcaattcagtccataatgtgattaatcaaataattcaatgtgtgtagtacattgactatgcgttggacgcttaaattcattgcaactaatccaatgtttatagaaaatcaatacctaatataacccatttttgttgatttattttcaaaaatataatttcaattattcttcttctttcttttttccattagcattccaacttttcgaaaaccttcatgatattttgaaagtagaggtcatagcaacttttttacgagtcgggcacacacgcgcacacacattcacgtggttaggaactaatactccaatatggagtatctctaaagatacccctaatctgtgttcttctctcaacttttccaaacctctcgtctctcaactttttcaaacctatcatctcttattttccatacgtatgtttcccaaactactaaactgcgtgtttttttaaaaaatttctatagtaaaattgcttttaaaaaaatattaattcattttaaaagttttttttaactaacgcttaattagttatgctctaattctttgcttagttttctgtgtcaagaggcctcaaaactcagctctaaagtctaatattttttagttgatcctttttttaacaaaaaagaaattaaaaatgcattttgagtttcctcccccttttaatttgcatttgcatatttttttctaaaaattaatttatgcctcccacatatttggactagtggcgagtagacaaaccattttgctgtttgtttacacgtcaaactcgtcgtcggcctccccctcaccaccttccgattcccctttctcccattcgcacggcttcttcgtcttcttctcttccctcctctcgcccaccccccctcgcagatctcgccgcgctctcctcctcctcctcctcctcctcctccgccgccgtctccgcgaagtcgttcccgccgccgccgccgcgggcaccgcccacgcgctccgttccggcaggcggcgcgcgctcgctcgctcgctcttggtgtctctggagaagaagcggagagagagagagagagagaggtggagaggagggagggggtttgctggggtagtctctagaggctccccctgctgccgccatcgccgtcgacggctcctcctcccctcccccggtggagatccggggtggtgttcctcggtaagcgggattggttttggttccggattcgcctcgcggtgggggctatccgtttggtggggcgcggcgggatggatcccgtcgtaatccgctcgcgagggtagagctgttcgtcgtcgctaatgcggggggtttcgcgttgtttgcagggttcacgcataggaggtggcggctgcgcgcgcagaggctcgggggcgagggcggcggcgcgggcgagatgaaggggtcggccatcccggcggtcgcgatcatgccctcgccgctcttcctctggcggttcaaggtatcgtggccttcttcagctcaactcatggtacactgatacggcgaggcgatggatttagcgccgatttggttgcaagtgccagttgtctcctttgcttaattttacctgcttggggttatcgcagcgcgacattgctatgtagttgtaaaataatcaatcatgttatgtgtttgtcctggagtatagtttggtcaataccttgcaactgcggtaaagggtatcacaggaatcacggaggaattacttacctttgctcaaagctaatcgcagagatgactactactcatagttgggaaacattattggattgaggagaagtgatcttacttcatagggtctagtcttttccagatatttgtcctacacattaatatttccctccttcctgctactgatgcataaaccccattttatctgtaccattaattgtaataaaaggaaatcgagaatcatgatttatccttttcttctaaatgaaaactgaagaagagtaaaactcatctcatgtcttattcttggcttcactgggatgtgcttttatccttgacggaccaagataatagtgttgacttcccttgaaatatatggcaggaaatagcattaatcttggcatgcataatgaaatggtctttcaggaatgccaattttcacttatgttttcttctacagcttaactttgaactgcatctgagaggcatgatagaaactacacattagtgcagtgtacaattctttactcccgtgttattatgtaactgaatataaggagtatttagtacaaaagttatcctaagctcttgattctgcatttacgtgcatcaattttacttctctaatcactgataaacccatccatttttcaggttgtattgtttctcctatggggtttatgctgttgcaaggtattctcgctttgatctaaccatatcttttttcttgatatgatctgaatctcttgttgtagttctaattcacatattattttggtgttacagataggttgggactctgttatgagaatgagtgctgatctgcgagacttatttctttacgaagctttcttatactacaatccgcttcttcttgtggtaagtttcttttgtgaagtatgtatgacaatctcaagggccattactgtagaaaagacagcaaatgaaggcacttcctgatcgttttgtacttgtggttcatgtttttgttgtaggctctgatgatttggttatggggagtaaacctgtgggtctttgcacaatcatcagtgaattacgcaagggtgtttgatcttgcacaaacacatttatcgcatcgagaaatatggagggtatgcttatctgattctcctggttgcactttctgtttatgagcttaacttgatttggattttcataagttttctccctttcaaaatgcatctgctctgacatagtttgctatgtacaaatttgtatgtctggcatacagttgctgtcatgacaatgaaagggttcaaagtttgtctatgccatgcccatgtttgggaaaagtttgcaatattttatttaattgtcaacccatcaggatttattgtgctagatgcattttacatttgctgcttcatattcatatgtgcacttttctctggtgttgtgttattacttgattttgtcatatttttggctaatgcaatcttcatctttttatttcattaacagtgtgctacttggcttactttgattgttcccacgagtatgacagcttacctatatttgtactcacatggagaagtgtcccttgctgcatctcaaccagtgtaatatctaacccattaattagttcatttcatgccttgttcctcttgtgtgcttgagctcatgattttttttttgtgtacttaatgtttggttatattgttggtagtgcttaccaatagtcaatttgtgtgtaagagtatcgcgttcccaaagctctcaaaaggaacactgcacctttctttagcatcaactgttactgtacttgtgctttgattttccttagtcaaataagtggaaagtctcatctagtacaataagactttttatgcaagacaaacaaattttatgagtgatggatggtttaattattagaatgaacctaaaggtttgtacgcactgtttcttttttacttgtcatttacgtcatcggcatggtcactaatacacgtatttaaccattcttttactaaccatatgtactgatgagtgatgacattctcagtgacaagtcctagtacttctgtatgtacttgaagttttttttttaccctgtatatacttgaagtttgtctgcatatgttttaaaacaaaaccaatttaagaacactaggtgtagggtatattgccttcttgtttgttcaccatgttgaagatgaaactatcatgcagtgttgtcatgtattgtatcatgccgtgccaattccagggtggtggaactaacatatctttctgcctattttcaggttcttttatatgctatccttcttatagtcctcttatctccttttgatatgttttacctgtcgtcacgcttttactttctgaggacagtgtggcgtataatgcttccattgcaagtaagttgtacaatttgttagtaaggggtgtggtagtttttgtttttagctgtgcaacatgcactatgctactgcctgttgtgactaagcatatgccttttatgtccttgctgtggagccagcaattagatcagactaacttttttgatggtttccttcccccctgttctgcaggcaattacattccccgacttctttttggctgatatttttacatccatgtcaaaggtatggagcaatttatttaaaattgttggttgtggattgttttgtgtacattatttctgtatagagaatatagggaaagacttactgtctaatactatatgattctctgtttggcctctaggatttaatgtgtacaatgttctctacaaattaaaaaagcactacatgacatgctatattttagtttgtagagaactgtttcttgcttgtatttggcctgagttagcattcagatacttggtattttaccattttgcctaattgttgcatttcttcacaggtcttctcagacttggaacgttcagtttgtcgcatggtcaatcggcaggttaatttcttatacttactttttttgtggggaatttcttatacttgctgttgtgctatgtgcattatgtcctcaatggtctctaagtgactgtcaaacgacatgccattggcttatattgacagttgtaaattattggtataactcatctcgttcctgtataatgtgttcattattatgatattctacaggttgcaacgaccgcttggcttgaagcagattcaatttgtggcagccattctgtagctattcctctagttcttgtgttcccttatttgtgtcgactcttccaatgccttcgacaatacaaagatacaaaggagaagacttgtcttcttaatggtatttactgattgttacttgttgcaattatggcttgctttaaaaaaatgatctagaacgcattcgtcccatgtttgctaccagttcctctaaccaacaaacatttgtctcaaatccagcactcaagtactcgacagcggttccggtgattttcctttcagctctcaagtatcatgtattccctgacaagtgggttagcttttatcgacccctctggcttatgtccagtgttataaattcgctgtattccttttactgggatataaagcgagattgggatttgaggtgtgctatcttcacatgatctttgttttagagcttcagcatgtgttttcacatct

SEQ ID NO: 20406 - DNA, 13028 bp, Oryza sativa
aacaatagcgatttagccggtatatatgtcttttgtaattgaatgctgttgtgttccctctctctttttttttaaaaaaaaaaacagaattcaagtggcgcagcccaacaaaggaaggccacaaacacagaacctcctccgatgggccgcccgctcccgccaatgcaacgccgcatctgctccccagttacccgcccaatgccaccgccgtcgcggtctcacggatgcggccgcatatcgtgcgtccccccaccaccgccgcgtcgctgtcttcacgtcgctacgtcgatcagtcagcgacggcacacgggcgcctcggcgcgactccgaagaagcgggcggcgatcatcacggggatggcgcgcgcgcctcgcgggtgagaggctgagagcggcgtcggcgccatcgaccgcttcgacgcctcaaccgtcggcaccggctccaatgtggcaaaggcctaaggtggacatcacgcaaactcggctgatcacgcgccaacgtacaatgctgctaacttctcctaaaagctttattaccatagtctggtactctgttttggcttatcaacccgcaggcaaacttaaattttagaaattaaatccagatttttattttaggtttttttttcatcagaatctatttttagtctttagtcttttaaactgttaaaattttgtccataaattaattttaattgttattaaattgtattagtagtttcgatccccgctggagtaaaaggcgaaaaacgatttaagtgattcgttttttgtccttgggaaaaagaaaactaattcttaacctctttcatatgctcatgtattgtcgaggtactgtaaaaggaaaactcataaaatcccatttgatgagagatgatggaatagctactgcccccatttatcttctactgcatccggtttagaacgttatgcagcatacgaatgtaagatcattgaagagatatttcctttttgtaacgaaattctgttgagccaatatttcagttgctagatacatgtctgttgccagtcaatgaaagcagcatagggcattgccttggcacacagcatgcggtttagaagccattgcaaaattgcaatcatcaaagcgacaaccaccggatgggtgcatctaaccataaaacagttcgtaagtatacaactccaaaagaaagcgtggcatcgatacccactcggtctgtcccttttgtgctcaggagcttgagaagacgaaccacatccttctcgactgtgtgttcgctcaacaggcctgactccgtgtgctgtcgccttttggttggactgccctctctccatcccgtggcagctggctccaggactgatggccatcttctagggcatgcttacctgagcatctccgtgctggcttcgactccctggtcctcctggtcccttggcagctgtggacggaacggaactccggggtttttgactctgcactcttttcggtctcagtgattctagagtccatctcaagagtcatatatggtcgttagctggcattgctacttttggggttttcttgggagggtagtgtggttgcccccttcctgctaattggagttgcgtagtctcttccttttccgcggtttttgtttttgttttttctccttcccttggcataagttaatatgactgattgcggtgtgtataaaacactcttttcttcaaatatattgacgtgcaatcttttgcgcgttcgcgaaaaaactccaaaaggaggttagcaattgctatatattagtaatagtaccaaagagtacatgtgctttcttgctaactatgatcacataaaagaaaactttaatttccactaataatgtaggtaattcacctagcaaaagagatactccctccattttcaattggccatcatataaattttcgaggctatttccaaataatcatcagaaataattcccgaataatcatcatattagtacatattctctaagtctttttattatctaagagtaaatggatgttggtgcatgcatccatacacacaatatgcaatgttttgatttattattggattgaaaatagtggagatagtgcatgcatcgagttcgttaccgaagtaaatatagtacgaaaaagttattgggttttcttgatctctatgtactcatgtaatatgataattaattgaagaaacgcctaaggattttccggctagctctacaaggtggtgggctagacgatcttggttcgaagccccaccccttctaattatttgatatgacaacctgagtttgaagcctcaccccttctaattatctgatattagattctttcctaatattcgtgtatttttttaaataaattgggaatggagggataaaccttaactattctactacccaatgattaatgcatacaagatacaaaatgtaacctcttctaactcagtaactgccacccaaacagacaacagccagttggatcccatgctctcttttcgaaagaagctactatattgtcccattcgctcaaccacatggcaaattgagtttcctgatgtttggccggccaatcacctgtgccatttgtttgctgttgtcttccaaatcattggcctaactctactacctcgtgcctcagaaaagatgctgatgctgctaaccaccaaaaggttcagactgagggtatttccattttgtcagtggttcgaacagacaatcagagaaagcaatacaagtacagtatgaaagttgtacctcgtgggtataaaacagaaaggccttccgttacaacagaagattagtgatccatcctacctctagaaagcagatttctagaagataacaaacaatacaactgtatcatgtagatctctgccacacacaagcgaaaatgatgaactgcgcaaagtgtcatgaaaaaaaaaatcagctcaagatagtgccacttgcgatatggagcaaactgcagaatcgttgggtctcgatcgaagcgtgcgtgtgagttgtgactgcggtggtggctgtggtggctggacacgtttggtcttcgatgtagacttgctgcaaatgatgggctcgtagatgatacccggttattagtggttgctggtatgactgtacatgtatggcttctttccaacagaatatcattagccattacggtggaaaatgacccaaggacggatctgcccattagacagggtgagtcgaccgacacagctacgacccgtgtcgtcccacatccctaagatctcctacctccttatagtatttattggccatcaaaattaggtataataaggtgtgagcgtctaacaaattagtccgtcttttcacaactcacgcacgtcacaaacaataaccaaggcagttatgagattgagctataaatacgatatgtgttgtgttcggttcgtcttatcgactaaatatctccgttctccgccctttattttaaagttgcgtccgtcaatctcaaaaggtagctagctgcatgtcccccaaaggccccaaataatagccacagctaaatgcttatctcaagcacagtactcaaagtgctctagtccaattttccggagtcaaacttgtaatgttattgttatctgcttttctgagaaaagaaaacaactttttaacattatcgctagttaggttagtggttgtcttagagctaaggttaggagaatatatgcctttatccctagccaggctagccatattctttccagtccagctgaggatctgcatacaaaatgaccttactatataatacaaacagatcacgggtctaaagtttaaatcaggaatgatcaaattaatgaatacatctctttctcacctgcacctgctgcacagttcattctttatacatgtcttcggttgcacacatacaacaaagcttcacttccaagcttaaattcgacatgtgctacatgcatacgaacgaacttttagttagtcagtgcttcactttcttcttatatataaaacgtcggcaacgaccaaccgttcggaaaaaaaaaagttagtcagtgcttggtaaaaaggacgtatatacatagtataagaatcgcgtttttggacaaaggatctcatcttagtcatctctaaaagatcgccggtttcacgctggatcgatcggccggcggctagcgcaccattgcaggctaaggcggcagtgcgtgcgtgatgatgcggacgacggccggtctccactttcgcctccacgtatggacggtagctggcgcccactatttgggtcgtcgtcgtcgtcgtcgacgtcgtcgacgacgaccgcggccggccggattcggacgccggttgtggccacaaggccgccggcataaggaagacaggaatgttctgcgtcgtgttgcttgcgcctctgcctgcgtgactcacgggcttcgctggctgccatgttaatcagtactctagctaatgctatctttatatcccaacctaaaatttttcatgtcatattgaatgtttaacacccatataaagtattaaatataggctaaaaaataactaagattacgactaatttacgagacgaatctttaaagcttaattgctccatgatttaacaatgtggtgctacagcaaacatttgctaataacggattaattaggcttaataaatacgtctcgtggtttaccgacggattctataattagtttttttattagtgcccgaacacctcatacgacaccctatataatatccgatgtgacacgctaaaatttatacacatagatctaaacaccccctaagatctacagactgattgatgaagcttcccgctggttttacctcacaccgagagctgtctttttgtcagatcgactcacatgtatttttgtcaggctaagtgactgataaagaaccgttcagttttctagttaggccgtgtttagttcattgtcaattttttttacgtatacggacacacatttaaagtattaaaaatagactaataacaaaataaattacagattccgtctgtaaactgcgagacgaatcttttgaacctaattaatccaccattagcacatgtgggtactgtagcgcttataactaattatgacgtaattaggctcaaaagattcatctcgcgatttacagtcggactgtgtaattagtttttcttttttgtctacatttgatgctccatatatgtgtccaaacatttgatatgacgaaaagttaaaagtttgaagaaaagttggaatgtaacacagccttagaagttgtttctttaatggaaagtgtaattcaccaaatcgaaattctctatagtaccgatcattgatatgtaggtccgaggatctatggagcccacgtgtcagtcaataataccgcagaggatatgtatttctacgtgctttactagtttgtactccactagtttggacttcaaagtttcacgtgtgattcaacaattttgcgtaagctagtggataatagatatattcatgttggtttagaattcgatgggaaacattttagaaggcttcgggtgcagaggccggatttaatccatcttttttcttttaaaaaaaggacaatagatatattcagaaattaattagaggattggaattaagccatgttagaatttgatgtgactgcggattgtgacgcagtttggattggatcaagcaaattttaagcatccaggtgtacagactagaactgttaagtccaccccctatcaatgttcaagtactgctcgagtctcgaccgtgcccgccacaaggctgttgcgactttggtttcggtgaagtcgtcgctgaacgatgtaccttctttttccccaatgtcttaataatactccgtattcgattggtatggtggtgccgatccgacgtcgaaaaagtactgtttgactgctttcgattaaatttatttgacgttggggtactggattcgaaattgatattggtgtccaccaaattcagaagtacatgtatatgacatatgctcaatttacgcggagtgatcattaggaggatatgtataatgtttcctcaattctcgttatataatgtccgccctcacccccacggtgcacgcgtctgcatgcccactccccgcttccgctcttccgccacttcctccgctgccacggcgttcgccccaaccgcttcaccttccttctcctgctcacttccatgtcctccctcggtgacctgaggcctagatgacggaggaggctgatgggagaggcgagatggacgggatctggactttctggtggagttgttgagatcgacgggatctatggccagactgatttgcttgatttgatttttttgggatttgatctggtggatttttttccatgaatcatgctctacttgctacttgttggtggcatcatcatattttagtccttcatcctagttgctttttcattgatcttgtacggagtacttaatttttttttttgcaattattttttgtgttgagttcgtttatcgccgaatcgaatcaaactaaccaaagaccgaagtgctcggtcttgagttttcttgaagactgatcggtcttgtgatcctaaagactgaatttttcaaaagaccgatgaaccaaaccgaattttcggttagaccgaatgcgcacccctactcgtctcattgaggaggaggaagcatggagggagaggtaaatggagcagaggggaagccaacgtcttgctacggaagaaatgggtagggggctatacggtcattcgtcgaggagtacgaggtggcatgatgccacgcaacagagggaagtgacgaatctattgctccatccgtcccaaaatataagtattttggactttgacactgtctctaagatgctattttgaccaacaatatctataaaagtaagatatttaaaataaaaaagagttgcatattatgatagtttgtttaataataaatctagtaacatcaattttacacgattgatctttttttttatttttttctattaatagttaaaaagttaaaaatatttaacttgtcagttgtcactatgctaaaaatgattatatttcgagatggatggagtacgagttaaggtgttcgctacttctatttatcatggttgtttgccaaataacaacccccacaataaggacttggcaaggtgcttccctaattatcatgtgtatatatatcaagagattttgcaatcatgtgtatattatggtgggcacgagtagccgagtatgttttatattgagcacatgtccattatgctctcatattatattggttgtcaaaggttgccacgttaaaacttagacattcaacaatttgttacctcaaacatgtttggttggtaaccacaatggtgacataccgcacttggcttctagccaaatgctgtcacatttatggccaataatttgttggccacattttatacggcatatgccacacttatagcaaagtgaagcgtgacaaacatagttatcaaccaaagatcagacgtctggtattatccatcacatttctttcgattaaacaatatgtgcatagtaaataggactaaaatttacttcatttgttccaaaaatattcaaatcctagggacatgtgtctagattcatccctaaaatttaagtttttttttacagagacattacaccatttcattggggcagagaaacatgtcattatcatatactcctttcatcctataaaaacagatataatacggaatgtgatatatttagtaatacgaatttagacactactaaaatattacattgtattctacgtttgttttttaattagacgggtggagtatactttattgttaggcttagcgcctatttaattggcaaaaaaaaaagtttgcccgtgcatataacatcggatatacggacacacattaaacgtagtctaataacaaaacaaattacaaattctgacaggaagctgcgagacaaatttattaagcctaattaatctatcattagcaaaatatttactgtagcaccatattgtcgaatcataacgcaattaggattaaaagattcgtctcgtaattttctgttgaactatgtaattgatttcttttttatttctatatttaatactctatatacatgtgtcaaacattcgatgtgataattttgtttcggaactaaacaacccctagttgctgcatgatctgcgtatcttgtttgaatggggaatcgtgccaccaatttcctacctgtcatttgaatatcgaatttataatccagcacgcgtcctataaataccggacatggcagccaccgtctccactgagctcgagctcgaccaaagccgctctcccatcgtaaccaccggatagaacagtgcccccgccatgaggacgagcacgagcaacgccgcgctgctcttgctggtggcagcagcgcaatgcctcgcgctgctctccgtcgccgccgcggcgaagccgcgcacgcgccagggcgactacctcgaccggctccgcggctcgccgtcgtcgtgggcgtcgctggccgaggatcgtggcgcgccggcgccgtcgccatcgccgtccggtgggcggcacgcggcgccagcggcggcggcggttgggagcaaggaggcggaccgcgtggcggggctgccggggcagccggccggcgtgggcttcgcgcagtacgccgggtacgtgacggtggacgcggcggcggggcgcgcgctgttctactacctcgccgaggccgacggcggcgccgccgcgtcgtccaaggcgcccctcctcctctggctcaacggcggccccggctgctcgtcgctcgggtacggcgccatggaggagctcggcccgttccgcgtcaagagcgacggcgtgtcgctctaccgcaatccctactcctggaacaacggtaagcaccgcctcgccgccgcggcgcgcacgacgtcgccatgtcaactcagaattcagagcaactactaacaccacagcatcattcgatccatggcgtggcgcgcagtggcgaacgtgatgttcctggagagcccgatcggcgtggggttctcgtactcgaacacgacggcggactacagccggatgggggacaacagcacggcggaggacgcgtacaagttcctcgtcaactggatggagcgcttcccggagtacaagggccgcgacttctacctcgccggcgagagctacgccggccactacgtcccccagctcgcccacgccatcctccgccactcctccgccgccgccggcggcaagccctcctcctcgccgatcaacctcaaaggcatcatggtacacacatatactactacactacatatagtacaacgaattcggatctaatcttatccggttttgttatactatgaaatatctcattccattgtagattagggtgtgtttaattagttctacgttaaaatggaaagttgactaaagttaaaagtttgaataaaaaagttagaagtttatatatgtagaaaagttttgatgtgatggaaaagttaaaagtttaaaaaaaaattaggaactaaacaaaggcttactatattgtaagacagagttagtacctctgttttaaaatataataatataagtatacttgaacaaacacgcagaaatgcttagcttttagaaagatccatacgagagaattcaagtactgaaacatcaactagcttgacaaaaaaaacaccaaaagtgtttaattaatttaatgcacttgacgggtacactgatgactatactgtgcgtgtcgcaatcaatcaaagattgggaacgcggtgatcaacgactggacggacacaaaggggatgtacgacttcttctggacgcacgcgctcatctccgacgaggccaacgacggcatcaccaagcactgcaacttcaccgacggcgccgacgccaacagcctctgcgacgacgccaccagcctcgccgacgactgcctccaggacatcgacatctacaacatctacgcccccaactgccagtcgcccggccttgtcgtctcgccgccggtcaccccctcggtaagtcagtcggtcaccgtcttcttgaccaacactcactgacgtttcagaattcgacgcgtctctgatgacgtttcaaagatgaggccgggttttcggacctcatcttttcgttttttcctatgcttatcaaccgaaatttaaatttttaacattaaatttaaaacttattttagtttttttttcatcggagtatattttcagcctatgtatttagataactaagaacacatatataaaagttttattcataaatagtttttcatttgcaaataagccaaacgataggaccgttcatctgcgtaacacctatatcatcggttaaagaaaatcaacttataaaaatgaatctagatatacgtttgttcagaattgtctctataagttgtttcttagactgaatgaatattcgacgttatgcggtggtgacggttactgggacagtgagatgaaactaaggaattgagtggctaattgctagggctaatcaggaaggttaacttgtggtgtacgtgacgtgtgcgcagattgagagctttgatccgtgcacggattactatgtggaggcctacctcaacaaccctgatgtgcaaaaggcgctgcacgcaaacatcaccaggcttgatcacccgtggtccgcttgcaggtaaacccaacaatcacccataaagaaagtatcaaaccagtattaattaagcaggcaaattcatgcataagcagataattatggctccctgttttgaccaaaatatacaggtcttcaaatattcaaatgtgcagattaattaagcagacttctgtatgcatgaagggcctgtttttgtttgttgcctaaattgcctcatcaatatttttgtaatttcaatactgtctattatctatttggactgaagccgttttagcaggcctaaatggtaggcaacatcattagttaacctcagcttcaatcaaacacaactttgtcttgccaaaatttggcattggcaaaaattggtaaggtcaattttagccccaaaccaaaccagctggaaaagagaaaattgagctcatttttctctagtagctcatcagctgaatcacagctaaatggaccagtatttactactactatgttagcatcattagagcttacaatgctttggtcagggacaacgatttcatcagtgttttttttcatgatttggccagtagtacaatgtatcaagcatcacagtgaaaccaaccgatcacaccaacttggacagatgattaggccatcaacatgacatccattattggagacacttttggtgtttcatcaatcatccaccaactgttaaaccaacctgattagtgatttgctttgctgcacaacctggaggcaatcattcatagttatgaaccctagcttgctcacattatacgaaaatcacaccacactaagctcactatttcaggttaggcgtgcactgaattatgaactgaacacagaattaattagtctcttctgtctatcatgttttattttgtctatcatgttttattccattcgtcctggatttttgtctgcaacaatatgataaactgactggtaggtgtagcacaagaaagtaggcaatacaaaaggttgctgaaaacttgcagcaattccatttcacatgaacgggcaaacttccatgagttggcatagcgtgctccaaattcgtaaaatcttgtttgaattaacaaatgacaaatgcaaggaatgcatggtgctagtttaattttgacttcatgcatactccatatcactatatgcaagatcttatctaaaacatgagagatcttataatctattctcagaacaaaaaccaggaaccttataatgcaccagcttttatagtttctttctccatgtttattcgatgcacatgacgaattgcatctagaaccacacgctgttggtttccttttttttttatatgctggtatgctctgaaactatgcgtggatgtactgggacttcaacatttttttttctttttgctcatatcagaagtctatgattgatcaccttactctttgcccatgccgcatgaattgattggcccatgtgcccatccatcgatttgattgcgtagaactttggcataatttacaaaaaagaaaatatttgatccgttttgcagtggagtcttgagacgctgggtcgacagcgcttcaacggttctgcccattatcaaggagctcctgaagaacaacatcagagtctgggtgtacaggtatgttcagcaactttcagacaatcaatcaatagataccctgatcaattatctgaaaaaatagatgctctaatccaagaaggaaatgaactagtagtattttgttgccagttttggtatatatatgcttaattcagtgtcactgatattgcagtggagacactgatgggagagtacctgtcacttccagcagatactctgtcaaccagctcaaccttccagttgctgctaaatggagaccatggtttagcaacactcaggtacttagttcctgcacttaaaactcttccttcccttcacctgttatctgaaaaaacaaagtaggaaccacttcacagaaatctgaattcatcagaaaacaaactctcgcaggccagtatggaagtaaattctacccaaattcgaactttagaagctcataccatgaatactagtttttgttaggatttagaaattgtattgatctgtttcaatcttgtgaaattcagggtgttggagacgttggtggatacattgtgcagtacaaggggaacctcagccttgtaaccgtgagaggagcaggccatgaagtccccagctaccagccacagcgagcgcttgtgcttgtccagtatttccttgaaggcaaaacgctacctgattgcgaaaaatgtggagaggcttagttataaaaaaaaaacttaacttatgtttacaaatataagtagtataatgtgccatgaccacaagttgcattattcccattgttgtccccattctagatagtgcaagaa

SEQ ID NO: 20407 - DNA, 2648 bp, Oryza sativa
aaaggcccgctttgcatctttggatggccacaatggtggcaacatcacatcatttgatcttgtacaaattataacaatttacaaacgttgtaagatgaatcagtgtaaagttcattctgctgtatcttgtgtgtctacgtagtgtatagttggggagcttgtccctgttgatccttgcaactttttgcagacatagatatagtgagagtcagggtcctctggaacaaagccatccggtagtacaccactctctgtcattggaacaggatctaagacagaccttttcgtcttgcccttgaacccgggtctggctgcaaaacattaaaaatgctgatcataaagggaacctaaaagtacaggagaatagaagttatcaatcaggattcatcacaaatacttccactaaaatggagtgttcatgaaaaagaaagaattataaggcttccactaagcaatgcatcagaacacgtaaattgcaaacatggtctgaacatattgtcagataacatttccacgtgcaaaagaaaaaggataaaatattgtatttttacgtacgcagaatgtatagtacaattttccaattgcatcctgattggttcagatgaggtaccctcaccgatggatcaccataagttatctaacagtttaaatgcaaaacttgatcagataaatcaatattagggaagggcagattaaaaaccacattctgaacaaacttttcaaagtgcctaccagcataaagattcctcctggtttaagaagcctgcaatcaaatggttgagctggtgagtctgcagcagcactattgaaatctatggcgtatcttggtgcagatgagactgtgaatatagcttagtggggtaagcaagacattaaaaacctttctacttctagaaccatctgagctgcgctgagaggagcacccacaccacactatggaagtagcaagatcacaatgttgaagaagtaccagaataaggaaaaggaacaatgaataatgtagcctacttaccatcaatgagtccaaagtacctagaagaaatgcacaaaaatgaacaagtggcattacatgtatgcttcaataattgctagaacaccattttaagaactcatacctttatcaatggcacaatcaaatgattcatcagaaaatatactcatgtccctagcatccatttgcatgtctaagtgtcataaggagaccaatggatggtaaatttcagtggaggtggagaaagaaacaaaatggaaaagcaatttaggatacactgcagctgtggaatattgaagtgtttctttctcataatctcaattacaaccgaagaaatgtcaatgttcattatctccgtatagccatcatcaaccatatcctctgacataactgcgaatggcagaacatggagaaaacattttgaattaacacaggtggtattagaggggggaagtgggaagcaataattggtgttccgaaggttagctttactctaccctgaaaaacctaactcaacagcaacacccaaacaccaatgtgtgcccgcaaaaggaaaagacataattgtactaaaaatgtcacaataggacacactaaatttcctctgttcctctttatttcccctactgtccatattccaaaaagacattgaatttgtaaaaatagtgcaaataaacaaatgcgctgccatccagctatggtcccaagatgccttgtaccataacgcagcagcagtaagccaatagcaactttaagctatcgcaggataaaaagtccctagtaaagcagacttatttttgcatatgtagtctatcactctagcaagcgtctgaaaaacaataattttcaggacaacctcctgcccaattaggccatcataaattcacaagaactgcatgctcgtgtcagttgcgtgttatcaatagcaagaacttgtaccttcagaaacagcctaattatagtaatatatcagagcaaaagggcactaatgccactatgtatgagaatggcgccatctgattgccataatggcacagatagaatagactagtagaggcttttagacaagaaaagggtctcttaagacaaaatcaccattcttgacaaggagctttccacaaaactattgccgaaacagcgatttctatcctaataacagtaacagtcactgcctatgcaagtagtaactgcccaagaaaaatcactatccatcaatcgccccccccatttcacaatttgcttaattcacttgatactactatactacgcgcgtagttgaaaaacaaacgtgaaaaatcacaaacgaacaacacacacaagcaaaagataaatttaactttctttctttggaacaaggaaaggaattgaaaacacgagagcggagccgaaagccgcaatctctatggaaagggaggagatggaggaggagggaggtggcgtacgagcggagccgcagccgatcatgaggacgcgggattccggcggggcgaagcggcggacgaaggggcggagcgcggcgtagcgctggtaccagtcgtacggcgcgccgccctcctccacgtagcgggcgtcccagtactccgccttcccgtagctcagcgccctcccgcctccccctcccccgccttctcctcctccgccgccgccgacgccggcg

SEQ ID NO: 20408 - DNA, 1996 bp, Oryza sativa
cctgttcaggcctgtgaaggttgtgcaggatgtacagtgaagcggacgacaggaagatgcagaccgagtagctcagcaggtccaaccccgttgttatcttcaccattttgctcctctcgaacatcttcaccagaaggatcatgacgatgacatgccctactttggttttcagttcgtccagggaggtaatcttcatccactttggtctttcctgaaacaagaagaaaacgaacgatcagttttctgaacctgccacgattgcagaattgcagagatgataactactgttctcaaggcagatgtagggagtgtctatgtttgtgcaaactatggttatatttgattatctggtttgtctgaattttcagtagtgaagttttggttgttttgcaattaaacagttcaatggatagctcacaaaataaaattttcagtccacaaacaaaggagtgatatggttagcaagtacaggttcatcagtaaaaggctaaaacgtgaaggttgttttggcatgcgaagatgattggctagttcttattcagttcctgtacattgtttcccttctgctataatataaaaccagcagttgctgggttcttttttttttttttaaaaaaaaagatgattagctacctttaaagcaaacatcccaaataaggatgatccctgcagagctctgtcagactcagaaggaacatcagtagaagtattgctgatgaacagcccgtacaagcccatcccaaagatcagcatgactgttccagcgagataaacatctgcagagagcagtaaaacacagcagttaatgtaaggttcaatcattctacacaccaatttactgcaccttgcatgcttgcagcctctagagttgataaagactttatcgtatattatgaagcctagagagtaacctaccattctttttgtttttttaaacaaatgagtaacttaccattctactaccaaccacctaggaatatcagaaatttaaggtgtgatggttacagttggtcaccaaaagcttttataacgaacgaactttcattggttgagacgtcacgaagcatgatcgatgaagattaaggtttttaaaataacgaggtggtattgattgagttttaattattacaaacttgaaaaatagattaatatgatattttagagtaactttcatataaaaagttttcgcgcaaaacacaccgtttaatagtttgaaaagcgtgacatgaaaattttaatcttcatctaactcttcttggagaaaagaacggcaccatagagttaaattcgaatcattgtgagttgtgacagatactacctttctttgtgccagctgactgaataaacctttttcagtagctcttacaagacagaattctcaaagagtttaggtagtgacatatttatacttaaaccactttggatcaaacagcaagcagaatgggcatctcaccaatggcttcgacaactttgaggaccatctgccctgtatggacgcctttgagacagcccgaccaatacacgctgtaagcctcttttatgtaaacacaaccctaatcacgagtagacagaagctagatgatcagagccagaaaaatattgacatggatgttctctagtgttctaccctgcaagaaagatattcttgttcttgatacagataattcttgccctgattggaaagaatcaggtgttggagacgaaatggatatgatcacttacattgaggaagcagaggagggatccggccagtgatccggcaaccgcgagaagagccaggaatctgaaatcgaagatcacctgcgtgcgtcacgatggacagaaattttagcctgatttgcaataccaagcatggtaaatcgacgcagatcttggaaagaaccaagcagataccctctcgacggtggtctcgacggcggtggacttggtggtgggaggaggaggaggagccatggcgccgttggccccgccgacgagcccgtagcctcgcggcttg

SEQ ID NO: 20409 - DNA, 4714 bp, Oryza sativa
ttctccaaacagtgtagtttgttacctagattctaagaatctgtacttgtagaattcagaaaatgaactgaatccagatgctgaaaaacccagcttctccagatttataaaagctggctaccaaacagcagattctcagaattttaagctcctcaagcagtactattgtatcgattggtttggagtttgtggagggatctatagatttgaaaaatactgccctaaaatcaccaaatcgaatatgccttctgatttgtcatttggattaaacccagattggttttctcactatgatcctagccaatatgctgtattattttcagttttttgttacagattttcggccccatcgtttcacttttgggtggaataagccaaaagatatatttgcaaacgaaaaataatttgtgaaaaaaacttttatgtacgtattcttaatgatctaaaagcaaaggctgaaaaataaacttcgatgaaaaaatctcaaaatcaactccaaatttaagtctgaaaatttaaattttggctgataagcgtaagcataagcataaacgaaaagataaggctgtttaggagttctttacactgatttgtccttgcaatccgtttaagcccagcatcagggcttgcctagcaacagttctagtgctacaaaatacaagcactgaggcaatgagttcttcctatatggcatgtgctataaaaaatactactgagtagaaggcaacatgtccggcgctgcaatcatgtactactcgtgttctgggcgatgaaggttgtgcaggatgtacagggaagccgacgacaagaagatgcagaccgcgtagctgagcaggtccattcccgtggtgatgtgcaccatcttgctcctctcgaacatcttcaccaggagaatcatcacgatgatgtggcccagcttcgttttgagctcatcgagagagctgattctcatccacctcggtctctcctgcagcaacaagaagtgaatggttcagcggctttcagtttcatgacatgtgagcatcagaagttatcaggaaaaaaaaaagtgcagagatggtgagtgcagatttcgacttctcgagtcagttagtttaatcttgaagtttcttctgaatttaatggctgataccttcaaagcaaacatgccaaacaaggatgatcccttgagagcacgatcagatgcaggtacatcaggaaaatcgttgctgatgaacagcccatacagacccatcccaaaaatcagcatgactgttccagcaagatacacatctggccacaaagcagcagttaagttaaagcacattttgcaggtccccctcttccaaaattgataagaggttcgtataattgttagtgttagatttaggtagatatcaagctaaacaatagaggcatctaaacaatattgtgtcagagttcagatgatatcaagcagaactttaattgctcaccgatagcctcgacgagcctgaggaccatctgccctgtatggacacctctaacacagcttgtccagtagacatggtatgcttctttaatgtacacacaaccctgattataagcaaatgacagatgattcaatctgtaatttcagctccaccatttcgtatacaaaaatttgcttgcacagtcacaaggctttacactgaggaagcagaggagggagccggcgacggcgaggagagccaggaaacggaaatcgaatatcagctgcggccaaaaggcaaaacgaaacatcatatcagacgacggcagctgcgtgcacaggaccaacaaaaccatactttcgcgcgtgtgcgtgtgtgtgtacgtacatatgtaccttctcaacggtggactcgaccgcggggccaatgcctccgccgccaccgccgtcccctccggcgaacgcgcgctccagcgacatggcggcggctgccgagccatcggagcccagcggcgattcgcccgtagtagtggccgtattaaccgacgaggcagcgcacgcgactgccacgagccggggcctacgacacggaagcgcggcgcggccaccgcccgtctccgcgcgccgggacaacgctggagcgagccaaccgtgcaccaccgcgagagcagccatcagctcgaatgctgctggtttgcctgccacgagtggagtacggaaacggacgtggtggtgtgacgcgtcggtgtctcccccacccggtgcttttcatcgccctctcgatcatccggccatgcgtgcgggtgcggatggttggtttctcgcgtgcgatcgaaagggagtgcaggaaagacctggaacgggtcggcaaatccccaatacggcatgcaggcccgcgggcctgcgcacgcgaggacgcgcgagtcacgatcccgctgacatggacgtatacagtgagtattgtagggggcaaccggtctctggctcgtatcagatggcctaatcagtaaaagaaaaaaatcaaattttaaattttcaagcttaatgttgaccttgattttgagatattttaacgcaatttcttttttaacattggcttttaagtcaaaaaaaaacatatttataaaagtttcacctacaaattcatttatatttcctaataagtcgttttggcttattaggaaataagccaaacgattgggacctcggtgtctcggaccctcggtgacggtgaggggccgtttgggcccttttcaccggtggtgaactggcgatgatcatcagaaacgggcagtaggtcgttcagtatccagcacacacggtggcatcaggcatgagttgaagtggtagaacaagtaaacatctgggctctggccatctggggagctatcaacagcagctccagcacgtgatggaatgcatacgggtaactggctgtaagcctgtaacggcgacacggcatgcatggctttggggcggtgctgattgctgtcgctgaaggaagaaatggggtgactcgattactcgagggatcttgaggtgcagtttcgtgctgaaaactggtattgcacatgcgccattcatcccatgaagagagctcttgtacatttgatgccgcaatcctgatatgaaaaatccagtaatgcataccatcatatatatgatatgaagttcaatgaaaagccacgtgttatgcaatcattagctgtcaactgaaagttatctttcaaatgaaacaacacatcatgtgagaacaaaaagctcaatacttaaggtgcataaagtatgctcaactgaaaactagaactactcgtgtaatcgatcaatcaactcttccatcctccgaagaactcatgtacataacggtgccacaagcttgctacataatccctgtgatgcataccttaacatgaagttcaatcaggaatatattgtagcattatttttttttgagaatttattgtagcattacatatatgctaaaactgcctactgattgaagttccaagtccttcaaatgaaacagtacgatcatttgtagacataaagtaaaaaaagtttaggtgtatgatcccataatccaattatgctatctagtttgcagtttcgcgaaaagttcctaagtgaaaatactcattccaagtgttgtatgctgactaggtttgcaaagcacacagaaatagttaccttctttctttctctgcggaggagaagaaactggccatcactgttttcagcttcccaccagacaaaggcaatgttggcacagcggcatacctgaatgttttcaactccatctattccgtcctccaagatctgaagaaggatggctacaatgttgagggtcttccagacacagctgacagctgaggccctcatcgaggaggttattcatgataaggaggcccaattcaacagtcccaacctcaatgttgcctatcgcatgaatgtgcgggagtaccagtcactcacttcctatgcctccttgctggaggagaactggggcaagccacctgggaaccttatttctgatggtgaaaaacctacttgtctatgggaaacagtatggcaatgtattcattggagttcagcccacttttggctatgaaggagatccaatgcggcttttgttctcaaaatctgctagccctcaccatggctttgcagcataccacacctttgttgagaagatcttccaggctgatgctgtcactttggtacccatgggtctcttgagttcatgccagggaagcaagttgggatgagtgatgcatgctatcctgacagtctcattggcaacatccccaatatctactgctatgcagcaaacaacccatcagaagcaactgttggcaagcgtagaagctatgcaaacaccataagctacctgacaccaccagctgaaaatgttggtctctacaaagggctcaagcagctttcagagctcatctcttcttaccaatctctcaaggacacaggacgtggtccacagattgtgagctcaatcattagcactgcaaaacagttaatcttgacaaggatgttccctttgcccgaggaacgtatggagcttccaccaaatgagcgtgaccttattgttggaaaggtgtatgccaagatcatggaaatagaatcacgcctcctgccatgcggtttgcatgtgataggtgagccaccaagtgccattgaggctgtggccaccctggtgaacatagcttcccttgattgcccagaggatgaaatatactcactgcccaacatacttgctcagacagtgggcaggaa

SEQ ID NO: 20410 - DNA, 4431 bp, Oryza sativa
cctgcagccctttggtttatcagaaccatgggtacaacacttgtccaagaccaagttcatcagggcagacagagagaagttgagaaccttgtttacattcttgggagaatgcttgaagctaattgtggcagataatgagctgggaagcttgaaacttgccctcgagggaagctatgttgaacctggccctggtggtgatccaatccataacctgaaggttctcccaacagggaagagcatccatgctcttgaccctcagacaatgccaactatagctgccatgaagagcgccaaaattgttgtagaccgtctgctggagtggcaaaaggttgataatggtggcaagtatcctgagacaattgcacttgtcttgtggggcaccgataacatcaagaccaatggtgagtcattggcccaggtgctgtggatgattggtgtgcgctcggttgctgacacatttggccgtgtcaaccgtgtggaacctgtcagccttgaggagcttggacgtcccaggattgacgttgttgtcaattgctcaggtgtcttcagagatcttttcatcaaccaggtatgaattctgccccagccttacatatgtagaattttgtgcacatgcaaggaaaaatcatagctgaactaatgtacttctggaacacactgatgcagacgaatctactggaccgggcagtgaagatggttgccgaactggatgagccagaagagatgaactacgtgcgtaagcatgcacaggagcaggcacaggaacttggtgtttcattaagagaggcgacaacaagggtattctcaaatgcatcaggctcttactcatcgaatgtgaacttggcagtggagaatgcatcatggactgatgagaagcagctccaggacatgtacctgagtcgaaagtcttttgcatttgatagtgatgctccaggggcaggcatgcgagagcaacgcaagacatttgagcttgctctagcaacagcagatgccacattccagaacctagactcatcagagatttcactcacagatgtgagccactactttgactcagacccgacaaagctggtgcaaggactgcgcaaggatgagcgggcaccttcctcatacatagcagatacaaccacagcaaatgcacaggtgaggacattgtcagagacagtgcgccttgatgcaaggacaaagctactgaaccctaagtggtacaaggggatgatgaaaagtggctacgagggagttagagagattgagaagcggctgacaaaaactgttgtatggagtgcaaaatctggacaggttgtcaactgggtttatgaggaggcaaatgccacatttattgaagatgaggctatgaggaagaggctcatggacactaaccccaattcattcaggaagctagttcagacctgcctagaagccagtggtagaggctaatgggaaacatcagaggaaaacttggaaaagctcagggagctctactctgaggttgaagacaagattgaaggaattgaccggtaaatttgtttgatcaatcagatcctgcattcaaaaaaggaggagaaatccttctgtctcactgaattgagagttgagacttgtacaatttatgtaatttataaaaagttgtaacatgacatacacgaggatacagtgtttaacaaagagggtgcctgtgaatgaaaaatggagcatgggtagaagttctttctttggaatatgttacttattgtcacttaatcacttgttcatttgcagactagtatttgatacctactaggaatataaagcaggtggttgtgaacacagaatatcagtaactattttaagaaaactacactagagtattacgatccttcactccatactttacatatgtacgacaactgtacaaaaacaggaatttagccaacacgaaatagtgtgctaatgtggccaatgtgactacagtagcaagttaaaaatgagaacaccttagtaatttaattgtgaacattccaatcttgacaaagtaagtttctggcatctgattccacatgtaaatgacaccaagaaaaaacagcatatcttgctcaacaaaaagggtgttaaattgaacttacagctgaagtggatggcaaagaagaacaaaacaatatactgaataaactttgttttgttttcccttcccagtccgaagtatacagttttagtgaattcctacatcagatcaattccataagaaacggatcacctgaagccatgactctgattagctctacaaaatctatctcattctgaaccttcattgggtacactgcatgtgcttgagcagtgtatattgttgcaaaagtggcatttgattgcacatttgtcctataaataagtttggtcaaagcttttgattcaaaattgcttggcaaatccattgcaaggaacaacatggggatagcaatactgtgatgaatgtctaagcttccaatagcttgaactagataagaaaagtcaccaatgtgacttcgaggtatgtagaatatctcactgttgcaatgaattatcttatcttcgccaacacttcttttgtagttggcttgatattgaaatggaaagctagcaattgccttttttaccatatctccttggttaatgaaccattcaattttattgccatgtaaggggacatcggaccatgattccttcacctatggagaaaaagatgagttaatttgatgggacaaagaaattcacacatatattttggaaaccaggacatgagcatgcaccttgttggttatccagagcttagccttgtcaaaatcatagaggttccaataattgaggatcatatgatcctgaaggaacataaatcccccagcacctgcaaaccggtcaaacacctttggcaagaacctatagtggaaatgtatcagtaagtgctgcaagctttttacatattcaagtaaatgaaactttactggatgaagtggtcagtaagatttgtgagttatgacgacttgaagcgtaacattttactgttgattggttagaatcataaataccaagctgatttcactcacttgtaagcttgtgccaagttgctgacttcaacagcaagatctgaattgcttttctctgaaagaataacaactgccctgaatatacgaccataaagcaatctccactcaagtgcaacacggtccacaggtacggtgcagtgcactataagcacaacatcaccaaagtgcttcctccattttatgagatttccaatctcagtgctaacttccccaatctcctcaacaccaagatgtacggtaggcagtttcttggggacaaacacctgcttgtccccatgtccaatggtcgcccttggccgatcaatctccaatgacatcaaccttggctgccggtaaccaacagagaccagatcttgcagccacgcggacatgaactgcaaatccttctctccccagaacccctcctcagtcatcgcataactcaaatcaagaatacgttcaaagagtgtctgcttatgtgaccgccactccattaggaaatctatcagcctccctacactgacatggatatccttctcatcatcaaacgggtgagcatgcacattatccatgcggtgcacggtcggtgggtagaccactaagtaacccccaatctcccataatatgcgctgcgaccaatacccacgtataacatcagctgccattggactcactgatactggcaatgcaagcccccaaaatgccggtgaatggaacagtgtattaactgagttgattggagccatcatgccctgaggaagtgcgaccttaggcgcatctgcatcaaaccggagatcaaaagcttccatttccgatgatttccgagtgaagtagaacacagcgtcaacatccggtaggccattgcacagcccctgctgtatgaactgcccgccaccgaacacctgagtgtagaattcttccacacccacctccccggctttgtgcagcggcaacccccgcggccacaccgacggctgcccaaagtgcacgtagggattcaccaccgtgcggttgggatccgcatggctgtactgcaagagcacgccgcccccttggcgatggtccagatcgacatcgaagtgcttggtgaggttactgcccaggacggcgttgcgcgcgtccgcgtcgtagatgacgcgcgcgccgcgctgcacggcgaagaggtaggcggcggccttgcgggcgtggccgcgcgcggggaggaaggcaacggagcggaacccgaggcgcgcctggtcggcgagcgtgagcagcgcggcgcccgggtgcgaccagtccgggggcgtggtctcgtcggccacggcgaggagctgccacccggggaccgcgggcagcgggcggtggcgcgggtggtgggccgccgcggcgaagatgatccacctggaggcgcgcagcg

SEQ ID NO: 20411 - DNA, 10701 bp, Oryza sativa
ttatgggccttgatgggccgtgtgtagccgtgcctatgctatgggccgttgctttgctggcttgcacacgtcatcgcgtgctggctttccaacacgctcgaaaattcaaaagttgtctcccttttgatatccccacaaaaatctcgagccccacttgccggcgacgagatggattcagctcttgccgccgccgccgccaccgccgccgtggcggcgttccccaacttcgccgatgtcgccggcgccgtcgcgctcctcgttctcgccgactcgccgccagcgccgtccccgcctccacctcctcccactgtcaggtactacttccgcgcgcagcactctggttttctccattcggtgttcggcgcgacgaattcaccgccccgtgcggcggcgcctccccgttcattgcagcgacgagctctcgtgctactcgggatcctccgcgtcctactccggcacctcggcgaggtcgtgcgtgtccgactccgcgcagcgcggtcgccccgtcgaccccctccgcgtgctcgccgtcgtcgcctccctccgccgcatcgaccccaaggtaaataatctgatgtgctagatcgcgaacgccaatagtttcatcggtgctaatggctctgctcctcgttgactctaggtgctcgccaaggcgacgaacacgctgtttcagggcgagtcgtcgaagaagaggaagggcgtgtggatccacatcgacgacgatgaggacgagagcgagaggaacagcgctgtggccagcgaggggagcaccgtcacggggaccgcgtctgcaagctccacggccacgtcggggagatcccaccggcctccgcgggcgagtggcggtggcgaccagctgccgcgaagggcggacaagatcatgaagtggttgtcgcggccgggagcggtgccggcaacggagacgaccatccgtgcagccgtcggcgacaatgctggcaccagcaaggcgctgcgcttgtgagtaccacactgctgccaattgcaatttgaaacgcttttgaaatggttgtcatgttaatttcaatttgaagcggttttgaaatggttgccatgttaattccaatctgaagcggttttgaaatggtttccgtgttgctaaattgtttgtgtggaatccgcaggctgctgaagcgtccgggctgcttgcgacgttctggctctggtggccgcaatgatccatatgtttacatggtatgtgaaactcatgcctactgtttgaattgagacgggaatacgaaattcgatgcatgttctgtgctgttgaatgatggtggctcattgtattgtagcttaagagattttcagattggagtagtattaccctttgatagtgtgcaaattttttgaatcgagttagtgagctactgagcttagtaatttccagtggcccagtgggacatacacatttgaagcagttcttaaacctgagttaaatttgcggtagtgctcactgatcactctttagtaccccattctagaagctctatttattgtgttgggagctcagcacaggcaaagttcacagcaacagtgacatgttatgacggccactgcacaggcagacatcacaaaatgtgatgtctcaaatttgtgaattatcagctcttattaactttgcagaatacattcattactatttagctattcccatgatttctcatgagtactattttccttttgatgaattttcaggtcacaggctgacccaatgaagttaactaagttgtgtttatagcaaaagagatggtaactgtaaagctattggagaggccaagtgacttctgagcagtatttagtaatttctactacctgtctgtcttaattactgtttaattttgccttcctgcatataagaagtatagccataggagaaagcaaagttcccatgttagaaagagcttgcagatatatttgtaaagataggctactggatagaaatatagacacacaatcatacacccagagattttatgtcatcgcgctttatattagtgtatgtcgaactggagtaatcaagtataatgagttccattttcagacacttctttttgcaattaactgttatctgaacttctctgtgggaatgaaatctgtgctgttgaataggaattattagatattttgaatagtcccttctgtcagctctttattgtacaaatagcctacggttctgatgaacaaatctgtattgaagttcaatccatttatttctccttctgttgcagaagctagtgaagctaccaatctccacattggttgtttttcacatataactaaagctaaactaacgcgctacgatgagcatacgctagagttagctttgttctgaaatctgacagtggaagcctttgaggctttcacagcttgatccttttgtctgcatactttagttcctcttcttactggagagcatgttcttgaaccagaaagctgagtccttggggtacctctttagcgtcttgtagtccacgtagacgatgccaaaacgggaagtgtacccgagcctccactcgaagttgtcaagcaatgaccaagcaaagtatccaatcactttggcaccatcgtctatcgccttcttgagctcagtgatgtagtttctgtagtatctgattcttactgtatcatgcacaccctgagtgatactgacgttgccaggttggtccatacctgtaagagcacaacattgatcatagtgtaagccttctttaatacttttcattgtcaacaaaactattattcggagaatcagggaccattctgatagaattagtaccattttcagaaaggatcattgtagggtttccatatgtttcctttacataggtcacagccttgttgattccccatggcacaatgtaaagccagtaggagtttgcctgcgtgaattcaatcaattcaactattgaagtgtgatgatttaacttgaaattcaacttttcctaactgttcaacatactactgtacaaatgtacaatacattgactgccacttacttgagctccaatgggcacgccgtttcgttcatctggaaaagacatgagtgcatgagcaactgatccaattaaacagtactacaagaaactgaattatgcatcagaaaatcagaaggatttgggggtggagtattcagaactcacaggcaaacccaacatgccagtcatcctgataactggtcggtgtcaggttccatggcccagggtctttcatgtagaaagaggtgtagtggttgatgccaacataatctattgagtctttcaccatcctggactcctcatcactgaaggttggcatcctgtccttgacgatttcgagcatcgagtatgggtaccgaccatggataatggggtcaaggaacctttaaggagatcatagtgtcagtttgctgatccaaaaaaaagggtactttcagactttcagtttgtggctacactatcacaaaaaatctagactgctactagacctgagcatctgaactctggagtaaataatcgataatttgatcctgaaccagatggtgttttcagatttttaccatccgaggtgaaaatctcttgccctctgtgctgcagccctatcagcattgctgtcactgaatggttcataccagacaaaatccaagagaattccaatcctccccttttgataaagctgttcaattggaagaaatgcattgcagactacattctcagatacagggatagcaaaagtaactgagataatttgcattgcatagtgtaaatccagccttgagctgaactgtcattctgctattttacctgatacttttcgcggtatcgcttgacggcggcagcatgagaaaggatgagatggtgggcagcaaggtatggttctgtcgtggagttgcctcctgcatcacagccagagcaccttcccggggcatggaagccattgtcatatcctagagcagcaacgcatctcggctcattgaaggtaaaccagtccttcaccctgtctccgaacgtctggaagcagaaatctgcgtagtctgcaaacgcctctcttcacagtagaatacacattttttctttggtcaaatatatgcttcaatcagcttacaaattttgaagttcatagttttcaagttgaaatgcttacacgatgtttgggcttagccagcctaagtactgctcatggagtgctaatggtaggtcatagtggtagaggtttgcgtacggtttgatgcctaattcaccaagagaaggtcaggacactgatgcagagaacctttgtagtactgtctaaggtaagcaagtgtcctaggaaagttacctttcttaaccatgtaatctattaacctgttgtaataatcaactccttcctggttcaccatcccagtcccatctaaatttttatagaaaactccaaatcacaaactccactgatccaaccaacaacaacaaaaagaactgctgcaggtacagacataatccacatacttgggaaaattcttgaccaagagatcgaaaatctatacgcatcaaagcccatgttcttcattatgttcacatcttcctacaaccccaaacaacaaccatcaagcatcaaaagagaaagaaacaccacaaaccacaacaacgagaaaacacaatcaccgaatcacacacacataacacattacacaccttgtacctatgatactcatcaaccgtcacatcggctgtggcattattagggatcgtccctgtcaggacacaagaacacggtaacaacaatgagcaccatttaccatctcacctgcactgaagtttagtactctgaatctctgattacttttacctggtttctctatgaaagcgtcccagatgctagggccccggccaccctgcttcgccatgccctccacctggtacgccgacgcggccgtgccgaacacgaacccctccgggaaggctcgccggctcagcccgccggcgtcgtagatctccgggttgagccagtagcattgtgccggtggcagcgtcagcagcagatgagctgctgctgctagtgcaagccgcagtgctgctatgaatttcctcatgtctgcattacacacagagggagcaggaagtctggagacaaaaagggctttgtcttccggtggcatataaaagatgggaggaggtaaaagaaaactgagcgcctgaggcttaccaatttttacagttactgattcagtttttcaccctgtgtttattggcagtttgcttctcaaactaagctgggggcagcctgaatcagaaggcctgaaaatggagggaagttgcaacagatgcgattcccagaatgataggaagggccgcacaatttgtaagtttgcctcagttttctgtggaggtttctacgttccacatttccactattgatgtgcccaactttgtttgttgtgctcccaatcttatcttttaattccttgacgaccttgatggaccccattctgtaaattgattgaatgaatgaaagtttggagccaatgacgctcacactgactgaagcatcgctgtggctttactcctagatgaagttattaaaaaacacggatttttaaaaattaatgagcaaagataaacatattttaacttaagataaacttaaaacacccgtcctaaaatatgatcatttttaaataaaacgatactactttaaccgataatatctacaaaagtaatatgttttaagtaaaaagagttatatattataataatttatttaattataaatctagcaacattaaatttatatgattgattttttttacttttttctactaatagttaaatttaaaaagtttaacttcactcttctaaaaatacttataatttggtacgaagggagtagtaatttaaaatggtgggagtgagtacttcaggctaaccccaatcggtgctagctaggctgtgtttaaattaaaagtttggatccaaacttcagcccttttccatcacatcaacctgtcatacacacaatttttcagccacattatccaaccaaactttttagtcacatcgtccaactaaaatctaaactttatgctgaactaaacacagccccagtatagtgcagcaagagatctggacacgcatacatattgcaagactgcaacacgtgagaagcctttgtcagttgtcgctagttcactgccaagatcagcgcccacacacacacggaaaagcggggactcttgcgcgcagccatccggtccgcgaaacgcgtgcaagtcttgccctcctcctcctcctcctcctcctcgtcgcgccgcgatcctaatcctatcctcccccatcatcttcatctccggcgctgtttgtcgcgtacggcgcaacggccgttcgttcttctccgctagtttaatccgctccggcgacgtacgtgcagcgtggcggcttttgcctctacatcagcctccgcggaaacgggccccgcgacggcgtgcgaatttcttgtgtaataactgcggggttttgtcgtctcgacaaatcgaccgcagctgattgatggcaccgtgcacgtatacgtactagtacgtgccaccaccgtccaccgacacttgtgatcatacggtacacgacagatttgtttcgacgccctgcggctgcggatcgcgtcgggggcccgacccgatgctacgtgctcagacaccgcatgtgtcacgcggcacgaggcttacgtacacacatatactcgtggagttttcggttacccatatcctctaataataaattatttataaaggtaatttttttaatgtgatctaacgacttaagagctcaatgcttaaaaaaaaatatttaaaaaaatcttaaaataaactttaaatttaagttatctttgattttgatttattagggtagccgattgagctcatgatctcgtggcctagccgcctagctctcgatccatgcctcaagctccctctcatcttgggccaaacagcaccactaaagaaaaggccgattttgttctgaatgggaccattatatgggctcgtgcccaatatttgcctctcactctctgaccgcttgcattactgtggagattatgggtattccatatctacacggcgatggtattcgaactgggtacaggatacctaatgtagatagaatatcttatctgtatctcgggtttgtttcttaacttgtgtatcaaggaaacaccctgagacttagtcggttacgactgtattttacctttatcttcatattccgttaggaatatagattatcttttgtaatccggactccttccaatatataaggggggtccgggcgcctctaggggcatatgctgatttttcccgaatcatacaatcaataatacactcggcggattcatccccggacaggagtagggtattacttcttttataagaaggcctgaacctgtataaatcctttgtctccaaacccatacactttccaagcttgatagccacccccttttattattgccgaaatctagtttcgacagttggcgcgccaggtaggggtagcgtcaagcttttcgccgatcagtgcaatgggttccgtcaccggcatcgacgacctcgtcttcccacccgggcagacgtttcggttcggcagcctcgatttcgtcaccaacaacttcggcaagatttctctccttgactcggaatcagaccagtcgggagagaatcgacttctagttccgtttggattcccaaacgcggcagaaagttgcttcaagaccatctcgatcgagtcagcttcaaaccactcggccgagatcgcatctactccaacaacgccagatcaagacgatgagccttacccatcaatcttgatgcagctccctgacgattcggcagccgtctccaccgccacgccgtctccatcccgtaggcctaggcggaagtcggtcttaacaccgatttcgcctagcttcagggaagtcggcgtcatcctccaaccactcggcacggtttcaacggaccaactggatggctactacagctctcccaccgtcgactcacgtcccaccgaaatcgtggaatacgatgagttcggttctcgctactacgacgacgcggatcttgacgacttcgacggaagcctagaagacaactacactcctcttttcttcggcgtctttatggccgacaatgaaacggaggagcagcgccaagcccgggaagccgaagcacgttgcgagaccgagcgccgccgactggagcaggagcgccaagcacaagagcaagagcgactacgccgggagcagcaggagcatgagcggaacgcgaaggaggctgaagaccgacggcagcgaaccttggaagctgggcgccgagcgcgtgatctcatcggccagcaagatgttgaagggataccggttttccgtacccctcagcagaatgcggttgccgcgatcaccctcctcgacaccctcctcaaggaaaacgagcacaaccaatctgatcatgtcgtcaacatcctgaaccagaccaagaccatgattgcggcctcggttccagttaactccgaaagcgtccacacgccgactggtagccgagttccacacttccgatctcaggactaccgtcatccaagcctcagcatcaccggcgcaggatccaatcgcaggagcaggggtcacgacgagcggtccgcgcactcgcctcccgactaccgtggggagcgccgagtagaacggccacgttctccgcctcgtcgccgccccatcgatcttcgcgacacaatcatacagcgccgagcagctcgaggccgtcaccactcgccagaccgctacgacgacgaccttgatggggtagcagccttcaccgacgacctgcgtcgagtggattggccagccggcttcaaaccgactggaatagagaagtacgacggtaccactaacccagaatcgtggcttaccgtctacggtctcgcaatccgcgcagcaggaggtgacaacaaggccatggcgaactatttaccagtggctttagcggattccgcccgatcttggctccatggattgccccgtggtacgatcggatcttgggccgaattacgcgaccacttcatcgccaacttccaaggcaccttcgagcgtcctggcacacaatatgatctttacaacgttatccagaaatccggagaatcccttcgagagtatatccgacgattttctgaacaacgtaacaagatctccgacatcaccgacgacgtcatcatcgccgcattcaccaaagggattcgccacgaagaattggtcggcaaatttgggcgcaaacctcccagaacagtcaagctcatgtttgaaaaagccaacgagtacgccaaagccgaagacgccgtcaccgcatcgaagcagtcgggtcccagttggaagccgaaaaatacgccggctacgggaggaagtggaagtaacaatcataaggaccgcaagcgtaagcctgaggaacttgttgcaaccgccgctcactcttctcgacagcgttcgcgcgtcaacaccttcgacaagattatgaactcccaatgcccgcatcatccaaactccaaccacgtggccaaagagtgcttcatctacaagcagttcgcggagcagtacaccaagtctactcggaagaactccgacgaggaacaaagcacgtcaaggaagaaggacgacggcgacaccccggctggatttcaagaccaccgcaaggagctcaaccatattttcggcggccccatggcttatgagtctaaacggaagcagaagttgactgaacgggagatcaacgctgttcagcccgacacgccccaatatcttcgatggtcagagattgcaatcaagtttgaccgctcggatcatcctgaccgagtggtccacccggggcggtaccccctggtactagacccagtggtccgtaatgtcaagcttcgcagaaccctcattgatggtggcagtgcactcaatatcctcttcgccaagaccttggatgatatgcagattcctcgctccgagctaaaaccaagcaatgcgccttttcacggagtaatcccaggactatccgcaactccacttggccagatcaccctcccagtcacttttggcactcgggaaaatttccgtacagagaacatcagctttgaagtcgccgatttcgagacagcataccatgccatactcggacgcccggcgttagccaaattcatggccgtcccgcactacacatacatgatgatgaagatgcctggtccccgaggagtcctatccctacggagcgacatcaagcaagccgtcacatgcgacaaggagagttgcgacatggcccaaactcgcgagatggcgtcagcccgagaggaaatccgactggctgcaaccacggtgagcgaaggaaaagtgcccgctgccaagatttcaaaaagtggggaaaccgaagccgcgactaagaagattcccttagatccttctgatcctaccaaaactgctgtaataggcgccgagttagattgtaaataggaaagcgcgctcatcacctttcttcaaaataataaagatatctttgcgtggaaaccttcggatatgcccggtgtcggtgatatgggaccgggagtatcatgaccagaggcttgaggcagactcaatcgcccacgtggcctggcaccttcggggacgtcgggcccgagggtgaggtgtccgccctcctcctgatttcccccgagggggggtcgg

SEQ ID NO: 20412 - DNA, 8808 bp, Oryza sativa
atcttaaccattacaggcaagatgttgtgtgaagaagggcaaacatgcacgttgccaagattacacgcggtggacaagaatgaccgatttgtgaccggtctgacactgaccatatcgtcagcgcacagccatgttcccacgacgcgctcacccccggcggaagtggaggtaggtgtgggctgtcccatcggagcgtcattcggacagcaaccgtgctgatctccgcccattcaagagaaaaagaacagtccagtttggaaagagaagggtgcatgtggtatccccttgaagtataaaaggaggaccttgcccatagagaggggggggggttgattctttcccagattatgagcttagaacgggggagaagtcagctcacacttgtagctcattcatacgcagatccaccaaaacacaggagtagggtattacgcttctcagcggcccgaacctgtatagatcgtcggtgtctcgtgttttctggctggcatacgatatttccacatacagagagagtgagagcttgagatttcaccctaagcccccggccgaactggcaaaggggggcctgcgcggtctcccggtgaggagccacgagctccgtcatctggcgcgccaggtagggggctcagcgtgtggtttctgagctctcatactcttccgtgtgcgccaagtttcccttgttctgcctaatggccgagcaagcaaaggcgcacaacctctctccgagtgtgagcggcgacgacggggagccaaacccgcgccgtcgagctcgtactcccccacctcctccacgccaaagtcccaagcggggggaggcgctcgagagagtcgaaaaatccgcagcatcgccagtcgcgggtggtgcaggagaacggcgagatggggagcgtcgcctcctcgtctacggcgacggcagcacgccacagggcgcgcttcaggccgttggcgcgctcctacgccacccgcctgtcgtccctgacccggagtctccagcccagcgatggctggacaacgtggccaacttggtcatgacggcacagcagcgcctgggtgctggtggacggtccgccactaccaggacctccggcgccgccaccaccggctctgtgtcatcaaggcggagggcgcggcgagcggcggctgctgcacgccattcggctaccactccctcgtcggcgcctccgactcgggaggatcagcatgaagagccggatgcccgcctcgacatcgagcgccgacgtagtgatcggcgtgctccccgcgcaacggagggtgcctcttcgtccagggtgtcacctcgacatggacgtgaggatcaaccctccgtgcccccggttggtggtgttggctgtagagcctttgtggcgagtcttcggaatgtccgttggcccccaaggttccggcccaccatcaccgagaagtatgatgggagtgtcaaccccaccgagtttctccaggtctatacgaccgggatcgaggccgctgggggagacgacagggtcatggcgaatttctttcccatggccctgaagggacaggcgcggggttggctaatgaacctgccacccgcgtcggtccactcctgggaggatctgtgccagcagttcaccatgaactttcaaggcacctatccacgcccaggtgaagaagcggacttgcacgcagtacagcgaggggatgatgaatcccttcgctcgtacattcagcgtttctgccaagtccgcaatactataccttgcatccctgcacacgcggtgatctacgcgttcagggggggtgtgcggcacaaccgcatgctcgaaaagattgcctccaaagagccccagactaccgcagagctttttcagctcgcggaccgagtggctcgtaaggaggaggcctggacctggaacccctccggttccggtgtggcagcttcggccgcccccggatccgccgctcagacagggcggcgtgacaggaggaggaagaaaaggtcggtccattccggcgacgagggtcatgtcctcgccgtcgagggcgctccgcgggccacccgaaaggggaggcctgcgagcgacaaaaagaaggaagccgacgctccctgacctcggctacttggaagagcgaaggcggcgcgcggcccttcgagccgcgcgctacccgcagagcctgcggcgctaccatcagcgccacgtccgggcccgatcactctgcgtcgacgacctcgtcctacgccgcgtccaaacgcgtgctggattgagcaagctctcaccaatgtgggagggtccgtatcgagtgattggcgtcccccggccgggctccgttcggctggccacgggcgacggcacagagctgcctaacccgtggaacatcgaacaccttcgtcgcttctacccccagtgggggtcgggtgtcaggtcttgggctcgggccaaccccgcacccccccgggcgtgcagggttggccggaggcttatcttttttctcttccatatttcaataaaagcagtttcaatttcctaaaggttgtgtctgtgccgttttttccttttgaagaatcttgacttgaaataaggtcactcgtactcaaccttgccctcgggggctcggttcggtcagctaaaatcgccaaacggggcccagaaccgagccgtgccccggggcgtggtgaactccgggggggaatcggcaaaaacccacaatcgggtcacccataaccctcggtcaccacgctcccggcctggccagtctcgatatgtggatctccccaggcactagccccgacccgagccatttgaggactaggacctgggcacgagcccttgatcaagccaagacacagaaggaccgcggcacagaccatcctcgtctcatacacacaacaaatagaattgacatagaaatttcctctttatttggttgcagattaaattagtctatacaagaagggggcccgaaggcctcggaagaagaaagaaaaagttattcaagattggcgggggcctgggggctcactccgacgcgcccgggtcaccagccttgtcgtcgctgtcgtccgcaccaccgtcaccgccctcctcgtcgaagtcgagggcgaacgcgagccgaagggccgtaccctcgaagctgtggacgatgtggtcggcggcgtcccggacctgcgcgcgtgcgccgtcctcggttccggaagggaactcttccagcgctgcccacggggagaagtcagggtccgagaggcccccaagccgaacggcggcccaaggcccccgacggccggagttggccctccgcctgcttgtccgacggtgtcaggcgcccccgaccctcaggatagcctcggggccactgcgggaaggccgcgcctgtcgccctcttaccccgaggatatcggtgcagaagccgagggcgccccgcgctgcctctcggatgaagagcgccctggagatgcggcccctagcgaagaggatcggccccgccgaaaggtgcagcggcccgtctactttgttagcgaggccctccgggacgccaaaacccgattccctcaggcccagaagatgctatacgctattctgatggctccgagaaaagcaccatcaccatatctccaagcgagacaaatctgctcacccagattcgcgcgctgctcaagtgatgtggcagtcttgaatagaccgcccattatggacaaccaaagttaccaataccaatatgcatggattaagaccgttgggtattttgcccaactatggagaccggtcccacttgtcaccaggctttaggggtggcgtcacacctgaccgcttcccttgggaagggaaattgctctggcataacgccgggggctactgtcggtgatatgggaccgggagtatcatgaccagaggcttgaggcagactcaatcgcccacgtggcctggcaccttcggggacgtcgggcccgagggtgaggtgtccgccctcctcctgatttcccccgagggggggtcgggttgcgtttgccccggccccgagggccgaggcaccccgaccccttaaagaagtctgcgccacgtatatgggataagtgagcacagctgtgctcacctaacagcatttattgcagtctggtcaagcgtgtcacgctgcatgcaacgcagtacagcacgctcttttatccggtctgtgaccggtcacagaccggtcagatcacgggttaggtggcgactggcggtctgacacacgccatgccccatcccgtcaagacgaaagcctctagtcactcgtctcaagccggcgttaagcgtgttatctcttagagatgacacgttagacccggtcgatatatgccaggcttcatcttaaccattacaggcaagatgttgtgtgaagaagggcaaacatgcacgttgccaagattacacgcggtggacaagaatgaccgatttgtgaccggtctgacactgaccatatcgtcagcgcacagccatgttcccacgacgcgctcacccccggcggaagtggaggtaggtgtgggctgtcccatcggagcgtcattcggacagcaaccgtgctgatctccgcccattcaagagaaaaagaacagtccagtttggaaagagaagggtgcatgtggtatccccttgaagtataaaaggaggaccttgcccatagagaggggggggggttgattctttcccagattatgagcttagaacgggggagaagtcagctcacacttgtagctcattcatacgcagatccaccaaaacacaggagtagggtattacgcttctcagcggcccgaacctgtatagatcgtcggtgtctcgtgttttctggctggcatacgatatttccacatacagagagagtgagagcttgagatttcaccctaagcccccggccgaactggcaaaggggggcctgcgcggtctcccggtgaggagccacgagctccgtcacccggtattcccagagaggtgattgagcactccttacatgtcaaagaagatgccaagcctatcaaacaacgactccgccgattcgcacaagacaggaaggacgcgatcaaggaggaattaaccaagctgttagcagcaggcttcatcaaagaagtccttcatcccgactggctggcaaacccggttctagttcggaagaaaacagggcaatggcgcatgtgtgtcgattataccgacctcaacaagtcttgtcccaaagatccttttgggttgcctcgcattgaccaggtagtcgactcgaccgccggctgtgagcttctcagttttttggattgctactcggggtatcatcagatccgactgaaggaatccgactgcttgaagacttcattcatcacgccctttggggcatactgctacgtcaccatgccgttcggattaaaaaacgcaggagcaacttatcaacgcatgatccagagatgcttttcaacacagatcggccgcaacgttgaagcctatgtggatgatgtagtcgtcaagaccaagcaaaaggatgatttaattttggatctagaagaaaccttcgcgagcatccgcgctttcaggatgaaattaaaccctgaaaagtgcaccttcggagtaccgtcagggaagctgcttggttttatggtgtctcgtaggggcatccaggccaacccggagaaagttactgctatcctcaacatgaaaccgccaagtacccagaaagatgttcagaagctgactggttgcatggcggcgctcagccgatttgtttcaagacttggcgagcgggggatgcccttctttaagctgctgaagaaaacagataacttccagtggggacccgaagcacagaaggccttcgaagatttcaaacaactcctcaccaagccaccggtcttagcttcaccacacccgcaggagccgttgttgttgtatgtatcagccaccccccaggttgtgagcacagtcttggtcgtcgagcgtgaggaagaaggccatgtccagaaagttcagcgaccaatctacttcgtcagcgaggtcctgaccgactccaaaacgaggtaccctcaggttcagaagctgttatatggtattttaattactaccaggaagctgtctcattactttcaaggtcactcggtaacggtggtcacatcatttccactcggcgatgttctgcacaatcgcgaagcaaatgggcggattgctaagtgggctttggagttgatgtctttggacatatcattcaagccccgcacttcaatcaagtctcaagcgttagctgattttgttgccgagtggaccgagtgccaagaggatacccccgtggagaaaatagagcactggaccatgcattttgacgggtcaaaaagactttcgggcactggagctggagtggttttaatttccccgactggagaaagactaagttatgtgctttggatacatttttcggcgtctcacaacgtcgccgagtatgaggcgctccttcatgggctacggattgcaatttccctagggataaagcgtctaatagttcgaggcgattcgcagctggttgtcaaccaagttatgaaagagtggtcctgccttgatgacaatatgatggcatatcgacaagaggtacgcatgttggaagacaagttcgatggactcgagctcagtcacgtccttcgacacaacaatgaagccgccgacagacttgccaactttggatccaagcgtgaggcggcgccctctgatgttttcgtcgaacacctttatacgccgacggtacctcacaaagataccactcaagttgcgggcactcatgatgtcgctacggttgaagccgactggcgagagcccttcatacgatttttaacttctcaagagctccctcaagataaagatgaagccgagcagatttcaaggcggagcaaactttatgttatgcatgaagctgaattatacaagaaaagcccttcaggaattctgcaacgctgcgtatctttagaggaagggagacaattgctgaaagacatacattctgggatatgcggaaaccatgctgctgcgcgcaccattgtcggcaaagcttaccggcagggttttttctggcctactgcagtgtccgacgccgacaaaattgtgcgcacatgtgaaggttgccaatttttcgccagacaaattcacttaccagctcaagagttgcaaactatcccgctgtcttggccgtttgcggtttgggggctcgacatggttggcccgtttaaaaaggcagtcggcggttacacgcacctcttcgtggccattgacaaattttccaagtggatcgaagctaagcctgttgtcacgattacagcagataatgctcgagacttcttcatcaacattgtgcatagatttggagtgcccaatcggataatcactgataatggcacacaattcaccggcggagttttcaaagacttttgtgaagattttggaatcaagatttgctatgcctcagtagcacacccaatgagcaatggacaggtggagagggccaacggcatgatacttcaagggattaaagctcgtgtttttgaccggcttaaaccctatgccggcaaatgggtgtcacagttaccatcagtactttggtctttgcgtactacgcccagtcgggccacaggccagtcaccttttttccttgtctatggggcagaagcaatgttgccgagtgaagtcgagttcgaatctttgcgcttccgtaatttccgtgaagaacgatatgaagaagaccgagtggacgacttgcaccgactggaagaggtccgcgaagcagctttgattcagtcagctcggtacttacaagggttgcgacgttatcataatcgcaatgttcgatctcgtgcctttctagtcggcgacctggttttacggaaaattcaaaccacacgagatcggcacaagttatctcctctatgggaagggccatttattatctctgaagttacccggccaggttcatatcgactcaagcgcgaagacggcactctcgtcgacaactcttggaacattgaacatcttcgtcgtttctacgcttaactttctcattgtatttccctattttgactgtcaaacatcaagttttctccttgaagttgtcagacgggggctatcatcataataatggagtgtgattttttatcaattcagtttgcttacttggtttatcattgccttgtttggtttttctacttagtttgcgaggactgaaagtttttaatagcttctttgggttttaggctcaacaaagcttagtaaaaacttttaagaaatcaaaaacttcgcaagaatcatcaagcacagcataaatacaccagtattgtacaaattgagcctccatgtattacattcaaactcagtcagaatcagtcctttcatcatcagagtcttcattactcggttggaggtcgttattgcgaaattgttctacaacatcactcgcaattttatcagccgcattttgcgcactgctgataagatcaagggcagcttcttcacttgtcccgtctgcaaatccatcaatggtgtcgacttcaattctcgggtacaaggattttgtcatcgccaaggccatgccagctcccatacttccagctttcttgatattcttgaaatatacttccggagcaacactcagcttgtcaaatatttcggttgcgtcgagtgcactcggaccaccattattgaagaacatagcttggataattggtgcagcggcattggcgacgttatcccttgctccttcaagcctcttgatcttaccaaccaggacgtcaaactgagcttgagatttgatcttgcgatctgcaaaacacatttatgatga

SEQ ID NO: 20413 - DNA, 16353 bp, Oryza sativa
ttgcttcgccatctgttccatcctggcggcttgcgctgtttgaaatccagatgattgaggatgcaattatgacagcataaatcaatggaacagatctggatgattaccttttgatgaaccacttagttcgaagtttgcatcctggagctgggcgattcggtcccttaactctttctctgtctttttggcgcactccctggtctcatgcagctggtccctaactgcttctagagttcccaaatgaggaaccagcttttccaaagttgtagtcttggcctcattgcgaagatggattctctgcatgatggatcatggttcagtcctgctaaaaagaaaacaaagttaccgaaggccgtcactcggaagacttacatttacaatacgagtggcttctccgagcgctttcttcagctggcacacttcttcatcttctttttgacggtttatgactatgccggcggcttgtgagttctcgtcccaccatttgatcaagataggaggacgagagtcgtcggtcgcctttatacgagggatttcttctccgtcatcacctgatggtcctgatgtgtttccaagacattagacggatatactgaggttatttaaatcaccattgttcgagaagacaactaacctgaagatgtacctagctgagcgtgaggtggtctttgttctttacctgaagacccagctatcgagtcgttaccagcttctggtccttgcgaagtcgtcgtctgcgcttctacctcggggatctcttgatcagggcctgcgtacgactggtttccagtcgggggctcttgagttgttgccgtttcagttgttgccgactggtttccagtcggcggcaggtcactcggattggccctatcgcccgaagcatgggcgccagtcggctggctttcagcggtcggctggttttcagcagtcggctcggggtccttggatatattttgctctgtcatggcaggatcggggtcctttccagatggatctatatcagatggtttcctgcagagtgttctttcagtatttggcattatcttcatcggaaaacatgccgaagcggaaatcataccgagagatctaatacctggaagatgttctgatctttggcattgcacggccagccaattttttcctgggcatggtgcgctttgggggtttattagacaagcccttatccccagatttatcatcgtcgccttcatcatcatcgagtaccagctttctcttgcgaggacctgtttgaccagtcaatttggaggtctgaggttgcggatctggtctgatcgttagccctccacctccctgcgcggtgtgttggcgaggagaccggcgctgagtgactggtggatctgacttcatcaatgcatattcctgaacaagatgcttccatagttagtcaactcagcatgaagataaaattatgttctgatcacggtttgagggtttccgatgtatacctgtggaggcggattgaatgcattatatggcacaactggcaattgatgagagtagctgactacaattgcatttgagaagattttatacatcctctccttcatgattttgaaatccagggaatctggttcttcacggttgggatcatgtttgccgtcgaactcgaatgctgtgcgggatctttccttgattggcgccagtcggcatttgatgaagtgccgagtgatttgctctccctgtaagccttgttctttaagatttaacatacgatccaacaactccaaggcttgtactgcttcatctccgattggaagagagttccaagtatcttggtacactggaggaagacaagagtacccgggaagagcaggctcgggattctgaacatagaaccagtttgcatgccatcctttgttcgaagtcttgaagggcatcgagaaatatttttggctcagagttccccttagttggaatcctgcccccccgactacacacggtttgttcttgtttggttggggcttgaggaagaagatccggcggaatagggcaaagtgaggtttgatccccaaaaaggcttcacaagcatggacgaaattggcgatatgcactatggaattcgggtttaggtgatgcaagctgattccatagaaattcaagatcccgcggaaaaattttgaggtcggaagagcaaagccgccgtagaagaaatgcgagaagaccacaatctcatgagtatccggagacgggaaagcctcaccgtgcgctggtcgccacccgatgatctccttggcagggagaacgccgtgcgccaccatctccttaagatcctcctccgttacgtcggacgacgcccattggccttcgaagctttctctctcttccgccatcggtttcactcaaatgtgctgatttgattcgagggatggcttgggagaggtgagggattgaggcggtggatcacgggaaggattttgatgcacttttcggaggtggatttggccggagttgtgaaccctagttcgccggcgcagctttgcactgtagcagggagtggggaaaatggcgagagttccggcggggaagacgaagcgccgcttggatatcggatttttcagttaagggtatcggaggtgctaatgggcctaggcctgaacagtacttcagcccaatacttttaacagcgtggcccattgtgttccttagggacttaggcatattttgctttggcaatattatgcacacaacagtgttgcccaatgctgatgaaatcctttttatgcggtcatataattctttggaattattgcaatgcaagttaaaaaggtgtccgacagaaaggcgttatgctgtttttgcaagcttttttaggctacaaaagctgtttgggttaactaggaatgacttgtttttattatagtcatttccttggcgtgttatatgcctgttttcatggtaaatagtcatggcctaggctatttgacttatttattaccataatctttatggtacttgatgggtaatctttagagtttttttattcggatgcctgtcaagtgagttcattcgtgaaccttttagagtgtaaaccactcggatttcttttattgtggctaaaaagcagtcggctagcatgcctatttaggcgccgcgtacgcttttgtcatgtaatgcacaatagtgttattattttgtctttcaactatatgtttagtttgttaactaatcacatagttgggggctacacctaattaggtgcatctattcgatgcaccatattctttatcttttcgccctttacagtccactcggcagattttggcttgaagagtttgaagtactcggattatcatctttgagagggttacgatggtcgactgcaaaggactcgggggctactgtggagattatgggtatcccatatctacacggcgatggtattcgaactgggtacaggatacctaatgtagatagaatatcttatctgtatctcgggtttgtttcttaacttgtgtatcaaggaaacaccctgagacttagtcggttacgactgtattttacctttatcttcatattccgttaggaatatagattatcttttgtaatccggactccttccaatatataaggggggtccgggcgcctctaggggcatatgctgatttttcccgaatcatacaatcaataatacactcggcggattcatccccggacaggagtagggtattacttcttttataagaaggcctgaacctgtataaatcctttgtctccaaacccatacactttccaagcttgatagccacccccttttattattgccgaaatctagtttcgacaattactatccctgattctctgtttctttagataataatctctgtgattctctgttggccttggcagaaagcgacaattcacatctgctgcagaaacttgcgagagccaacagccaagcgctcttttcctacacgaagcaaaattttgagagcttaagattcaaacagcttcttggtagccagcttctgataatttaaaaaagccagttttcttagcttctggtttctagttcattttatgaattctacaactacaacttcttaaaatttagaccaaaatctatattatttgaagaagcttctaattctgaaagaagttacagtagcaagaagctctctaaacatacctaggcgcgtgtaagtgtaaccttgacaagatcctggaaatggcgctgtcaggctttaattcggatgagtcggacgtgagctggacctgatgtttttgcccggtcttacgtcctaaacgcacttgtaatctacagtcgcctcgaattgacagcggaagcggattacgacatcccctgactagcgcggatctcaaagcatttcatgtacgtccctgattccattttttttagctagtgtatgctgtttcacactctggaatatctgtgtcactgtccaagcttcgtgtaggcagggttcgtaaaaccgaaaggattttaaaaaaccggttagttttcgtgaaacctttttatcatcagttcgtgaaaacagtcatttttagccggttttcgtatcgcgttgatcgaggatcactggttttatcggttctcggcaaatcaatgagtgattttcactccgaaaacgaaaaggcaaacgctgtgtgtagcacctaggagtatactactcctctacttgctcattcgtttacgtgtatctggcggtcaaacgatagtgagtcggtgcaataggaaaaatcagatgaaagttatctgttcagcttcaaaatcacatcccaggtgacacacagacagcacaggaacaaggacacataacccaaccaaccgacatatcaaaatttagttctggtttagttttcaactttttcttcaaatttttaactttttattaaatcaaaatttttctacacatataaactttcaattgttccatcacatcgtttcaatttcaatcaaaacacaccagctcgcaatacatgaatcgcgcacatgtcagtcgaatcgcacacatgtcaggtcaaaacgtcaaagtaaaacttggtttgcgagggatcttctagggagtgcagctctgtagcaacatttgcagatgccgttgaatgaaatgcaaatcatcagcacatgggctgcaaagtctgcaacgcaatgctttgcacatgttcagagttcttcagacccttgactgttaatctgttatcaacaacgagatgctagcacctcgaaagaaccaagaaactgtagaaggtggataaggtcacgatgatcacgccactcaaacgacatggacataatcatattattaatcttttagtagtagtatctaatcagatcttaaccttttcccccctatgacaaggatgttctgaactttctctaattcttgccgggttaaaaaagaaatgcaggaatcaatcgtcgcgtcaaatacaaagttaccacagcaatgatacaatcaccctcagtgaaaataagatgccaaaaaggggctaccgtacgaggacccttgcatacgatatggccccttgtttaaaaggtgacaatggctggtccacgcggaccataccatacaagcaaatcaagcctctctgtaaagcagcccaaaaaataaaaaaaaaaacaggaaaaacctctctgtacgtgcctgcgtggctgcgtgctcaacgtgtgcccgacaaaaagcccaaatcatttcacccttaataaaactataaaatacattcagaactccaaagatcgagaatccaaacaaaaacaagaaaaataaaagacattgtgatgcctacctttccttattttgcttgctttcctctataaatgaatgtcagagctcatgcctttttccttaaaaaacttgtgatgtctacccaacgtcttagaaaaatgccaatgccggagtgaaaaaaaaagtgagatgagcctagcttaaatggttatgttacttaggttgttttcttcccctatctttcccaactcacctctctcgttttccacgcgcacgctttctaaagtactaaacagtgcgtatttgcaatatatatatataggaaagtttcttaaaaaaatcatattaatttatttttcaagtttattttagccaatacctaataaatcatgcactaacggtcgctctgttttacatgttgtaagtgagggttcctagctcccactcccgaactcagcctcttatggcagaacacctcactcgactttaagttttagatttgatgcaggtactcgtatttatggttaaatttttttagtggtacggcaacgaaatgtttggtgtgacttcatcaatatcaaaatatatcggttcaaatcttccggaggtagttatagagggacgaatatttgcgcgttataaccacatttgtatttaaaaaatctaaaaagagaataaccctctggcaaaatttcccaccaaacaaaacgtctcccaagtcccaagaacgaaagggagaagaggacatcacaaaccgacccacccactgacgatccgggcccaccacgtcccgtatgactgtatgagttgtgacgccccatcaccgcagccaccaatacgtaagttgccgcacgagcgaaaaggccacaccaacggtcacagattagcctccgcctcctccctctctcctcctctcgccaccaaatcctccatagtccacaccccaccaccactccaccaccatcccaaccaacaacacttcgccatcacgccgacgccaggaggagccacgccacgccgcgccgcgctcgcggtcgacctcctcctccccccggtgccctgacgacgacatgggcgccgccgacaacgccgccgtacgggccgttcttggctctttcctctctctctgagtagtgtctactgtctactgtgcttcttcttgctcatggggttgctccgttgttggattcgtgcaggcgccgccgcggggagatgtgccggagaggggcagaggagggggggagccggaggcgaaggagagggaggtgaaggtggtcgtggtggacgagccgcctggggcgccggtggcgaggctgcaggcgcagcggccgctggcgccgctgcaggtgaccacgcaggcgccgccgccgcccatgtccgtggcctccggcggcgttgagccgccgccacaggtggcgactttccagcccgtcatgcagaccccaccacaggtaactaaacaaatgcccaatttgctgatttctttttggctgaatttaaaattcggtggtctctgaatcttcttgatttaaatagtgagattggctgagtcttttctacgcatgtggggtgtgtgtgcgtgtgtgagtgagatcaactgtttgtagcacaaaactggttggtggacatgtcaataattttgtttggtataatcaagcaactcttttgtatagttcaatcccctccacttgacatttcggcataaaaatttctgcgatcatgtggcgactttggctgcaacgacaatggcagaattggttttttaactagttccaagaaacagtttttagaggatacagaaagttgagtttgatctcgttttatacaattctaaaccacttgtactactattttactttgaaaagatttgattgggttttggatatattttgtggtataactcgtatctgagtaaaaagaaagttgaagtattttgcaagttggaaatgctttcaatcaatcaagcagattagcaatgtttgcactcagcaacaaccgaataaatcagcaacgcgtgcagctatgtgcgagcccaaagttgctcagcctttcggtgacagaaaaagataagagaggtggtagtgtttgacacgatttcttaatcaatgtagcctaacgtatagccttcattcattagatgactcatgtgtaacttaagctctaatacctccctaatagaatacctctagaatagagtaatgcactaatgcttggaatcgaatctccagttcaccgtacaagttgattttcatagcaattattccataggtaccaaaacctattgcccgttagattaagtagtagattaagcttcaggttgcagaacatgtgctaggtaatgtcctatgctaatccaatttggttgtaattgagtaaattaattaactttgagtgtggcaggtggcgttcgcgtcgctcaattcgcgcgtgtacaccaatggcatcacgctgtgcgtgttcctggtccacctcgccgcggccacgttcgccgtcgggttcttcgtgttcagggccgtcaaggacatcgtgcagcacccgcgttcccggaacgcgcagcgcgagcgaagcctgctgcgggaatggctgcctccggtggagggcgcggtggcgctcagcatcgtgctggcgttcgcgtggcagaaggcggtgcgggcgtggccgcgcgccatggtgggcgtcatcctgtggtccagcttcggcatcacgctggcggtgggcgcgatgctgatgtgcttctccatgccggccaccgtagggctcggcgtcgccatggtgatgttctccatcgggacggggctgtacgcgtgctgggtgacgcgccgcgtcgggttcacggcgcgggtgttcgagcgcgccgtgcagccggtggacaagttccgggggctgaacgggccggcctacctgatggtggcggccgggttcgtgtggatctccgtgtggtgcgtcgcggtgatcggcgcggcgaactaccggttcccggggctgaccatcctcggcctggtgctcagcttgatgtggacggcggaggtgatgcggaacgtggcgaacctgacggcgagccgggtgatcgcgctctactacctccgcggcatgcagtccagcgtgcagttcagcttccagcgcgcgctctcctacaacctcggcagcgcctgcctcggctcgctgttcgtccccaccatcgaggcgctccgcatcgtcgcccgcggcctcaacctcctcgagggcgaggacgagttcatgttctcctgcgcgcactgctgcctccacgtcatgaacgccatcttcgagttcggcaacagctgggccttcgtccacgtgagcttcgacggacacacgttcttcgttcttgttgctccatggtttaagtttgtggtgacaatggcggatgggtggtggtgtttgcagatcgcggcgtacgggagggggtttgtgcaggcgtcgaggagcacgtgggagcagttcgagaggctacaggggatgccggcgctggtggactcggacatcacgagctcggtgtgcttcctcaccggggtcaccagcggcgcgctctgcgtcgcgctcgcggggtcgtggacgttcgccacgcacaagcactacaccgccaccgtctcgctgctcgccttcttcgtcggatacctcatggttcgcaccgcagcttcgcgccccacctctctagacacattttctttcggagatttgttccgagcgagtgaaaaagtatctcgagataccgttacctcacgataccaaatcgtttccgatcgttggatctagctggacaagatggacattgttagatccaacaatcggaaatgatttgttaccggtatctctaggtattttttgttagaccgaagcaaattttttcttttgttgtgctcacgagaatttttgttgtgcagacacggattgggatggcgctgccacaggcgtgcgtgggatgctactacgtgtgcttcgcggagaacccgacgtcgcggctgttcgatcccacgataccggagcggctgcacaagatgcaggaaggcgccgacccgctcgtgccgacgccgcgcttcccgcaacaacaccccggcgccgcctgatcgcgacacaaaaaagctcacccgatcaacgagtcccaaaccctttggagattcttgcagaaacacatgagaacgaggtgatctcatcctgtcgcctgtgcagcctgagctgacccggtaggcgagactcctctcgtcgttgcgtgaatgggaggcaactcgagatggaatcatgaatcctttggaccatgctgcaagtgtaggcgagcagaatagtagtagcagagaatttggacccaacccctattgctagactttcccccttttcgtttctgtaaatttcccccatttttttgacaccaccgattttttgttagtgaaattagatgacaagcctgaacatttcatatttcaggtgtgtaaagaggtttcattacatctataggaaattcttgtgaatattatccaactttttttttatccttttaaggtcatactcctatttgtttccaagatgaccatgatgaagtcatgaactggaccttataattgaagggcacagagtatcagagcagacatgtagttggaccagactgtcttgtgggggcactaacaactttgcataggttggttcatcacgcaataatggatggtagatagtgaaaaaaaatgtcacatctccatatctccgttctacaacctctttcgttttgtttggtgagtgggtgtagacgctgtagtgagcagggtttcatttaccgcggtaaaccgcgcggttaccgcgcttaccgcagggtacggtaaggggtaaaccgcggtaaccgcgtcaaattcaaataaatttgaaaaataatttgaatttttgataaattttatacggtttgtcgcggtttgtcacggttaccgcggttaccgtgcggtaaccgtgcttaccgccggggcgcggtaaccgcggccccggcggtaaatgaaaccctggtagtgagtaacacaaggaaagaaccacgaccaccggggtaaggccgagtttagttttaaacttttttttttcaaacttttaactttttcatcacatttaaaaatttttcacacacaaacttctaactttttcatcacatcgctccaattttaattaaacttttaatttttgtgtgaactaaacacaccctaatgcatttcatttgatgaagtagttgaacattgaattcaatgaactccccccaccacaagaacatccacaatcaatggaagggcgaaaatgtagccgtgcttgcaacagcacatgtccttacgtcctggatgacaagtttttatattgaaacgatgagaggacgctgtgtaactcttgtctttattattttcggtactactacgtattagggcctctttagtttgcggaaagaaatttttttagtgtcacatcggatgtttcaccagatgtcggaaggtgtttttggatacgaatgaaaaactaatatcataactcgcctggaaatcacgagacaaatcttttgagtctaattaagccatcattagcacatgtgggttacggtagcacttatggataatcatggactaattaggcttaaaagattcgtctcgcggattccatgcaaattgtgcaaatagtttttgtttttatctgtatttaatgctccatacatgtgtttaaagatttgatgtgacgtttttgagaaaaaaaaatttatgaactaaaccaggccttactccctccgtcccataatataatagataatgggtgcatgtgacacatctgtccagattcattttactaggatgtgtcgcatccacccattatcccttatattatgggacggatggagtagtatactcctctgatgatgagaatttagcctccacttagcaaaagatctactcccttcgtcccataaaacaccaacctagtactggatgtgacacatctagtactatgaatatagatatacatttgtccagatacattgtactgaaatgtgtgtcatatcctgtttagatttttttttttttaccgagggaggtccatgaactcgtagcgtgtcttgtcaagctttcacccagtcgtcacgttgcgccaccttttgttttgtgtggtccttcgctgaataatcaccgtttgattacgatttttggtcatgtttctttaggctttttacccatggattgtcgccgttggtggaatattcgagagagatgtggaacctttcattgcacgcacgcacacgctgcgccaccaaatttagaccttgtttagatgggactaaaaacttttaagtccctatcacatcggatgtttagatactaataataaatattaaacgtagactattaataaaacccatccataatcttggactaattcgcaagacgaatctattgagtctaattaatccatgattagcctatgtgatggtacagtaaacattctctaattatggattaattaggcttaaaaaatttgtctcgcaaattagctttcatttatgtaattagttttgtaagtagcctatatttaatactctaaattagtgtttaaatacagagactaaagttaagtccctgtatccaaaccccaccttatctccccgaaaagatgacgctcagccttattgtttcacttatgtctatgtttattaggttaaaagttaaattttcagttttaaatttaaagctgattttaatttttttttcattagagtttacttttcagtttttaattttagaacactaagaacacgcatataaaagtttattcacaaattgattttcgtttgcaaatacgttgaataagccaaaaagatggggccgtaggtcttggcgtatttggcctcttttgattgtctcgagtcattttccagtggctgaagatggagacgtttcttccgagttacaccaacgatttcttcattttcttgcgccagatgacacaggagagtatctcgttttctattccgggtcgtgtgttgtaaatttggcgtgcccttgtgcattttgtcacttggtctgtgagtgctaggagggcctggttgacaggccgtgggccgtggccttgttgctgggaccgatactttgggccgtattcgctggaaatccgtgggccgtagcctattgggcctcctcttcgcgcgatttcttcttgatagcgtcggctgtttgtgttccatgtgcaaattatagggtgttcaggcggcgattctctcctgtgcaacaacgctgaaaattgtcaagcgatttctgtccaaaaggcattttacttctatagctgccaaacacaagtacacggcagtacgacacaaatcacgatgctttctaaatttgtaaattggttggttaattgaaacatggagaactgatgttttctcagaataattcttttttttttgcggggaagaagggaatatattactcagaagcaatatcctcacagacagtttgtgagataaaagtacaatttctcagaataattctaacagtaacatcacagtactctaacctaggaaactccatcagagcatactgcttaaacgtaataattacagaaaaaaatgcggtcagaatgacaattgaccacttcacatttctcatgatcccaaatgatccattccatctgttgccaaatgccgagcaggcattgacatccactatatacaacatcacgaaaacctcttgagaatcatggcgtagaggagctcgttccacgcgtccggcacgccggggaggcaccagtggctgcagtccgccctctgcctcgccggcgacctcgccgccgccgcgacattgaacaccgacgggtggccgtccctcctctgcgccgtcatcagcgtgacgttcagcacacgcagcttcgccgccgccgtgccggatctcgatggctcaaatgccgggttcaccatccctggccaccggtgaagtgaaatccttgatgagttcagctcaggtgttgtctccttggcgcaaccaccattgctgctagccctgcaaatttttacagaattgatgctgattgaatgttgcaatgtactatgtgtatgaaatttgtaacagtctacagaaaaaattttctgtgtctgaaccattttcggtttttcactgaccttgtgtgtgctggtgaatatgttctgaaaatgaccagggacttgtgtgggtttacttcacggtgaacccagctggttaatgtgttcattgctctctgataggctgcctcgatgctcatgttcagaatcaacttcttgcctacctggaaattgcagcgtctggcatgacaaggttagtcctatgaaaaagaagagagtaaattgcacttcaaacgaaacgtgatctaaacccaaaaggttgagatatttatagtccttaaaaaaatacctcgaggtatctaaattttacactaaatttttttacctcgatatacttagtacttggatatactaaattttacactagcaagtgtggtaccttccggtatcttttcaaggatggtaaaattatttcaaaaggttttacaggttttactcgtagtttataagattttcctttagttatatgacgcggtctaatgcaaagtgaaatttattttgacatatttcggtgcaaagtaaaaatatggagcaaacccgatgcaacgtgaaactacatttctacccggtgcaaagtgtaatttaggctgtgtttagttcgtgcgccaaatttttttttaagtatacggacacacatttgaagtattaaacgtagactaacaacaaaacaaattatagattctgtctataaactgcaagacgaatttattaagcctaattaatccgtcattagcaaatgtttactgtagcatcacattgtcaaatcatggcgtaattaggctcaaaaaattcgtctcgcaatttacgttcggactgtgcaattggtttttttcgtccacatttgattctccatacatatattcaaatatttgatgtgatggaaaagttgaaagtttgaagaaaaaagttgaaatctaaacacggccttatactaaagaaaatatttgtaacgtacagttgcagaagcctctcacggctccaccagtggccggtgttgaacacgacgacgtcggcgtccttccaccggtgagccctcgcgtccatggcgtcgagctgcagcgtggagcacgcggcgcccctgtgcgcgcggcgcggcggggggcggccgcgccggacgaggtacggcgaccggtagtgctcgacggtgcagttgtagtcgcggaaccggaaggagagcgcgccctcgtgcttggtgatggggctcccgttcacctcgtagatcgacgccgccttgtcgccgtcgccgtcgccggcgaaggcgacggccgtggcgagcatgcatagcatcgactcccactggttgcggccgatcgagtcgccgacgaacaccagccgccggtttcggagcgtctcgagcaaattcttcgcgtcaaatctggaaatggatatcatgatgagtaacagcttgtcagcttggccatcgatgaactgatcgcgagagaatttttggtgttggaaggagaagaaaaccttgggagagtgcaatggcgaggctgccacctccacttggcgaacgcgtcgtccggccggccgttctcccggcaccggaacccctcgtcgacgaacgggcaccgccgcggctcgacagcgggcgccgctcgtcgtcgtcgtcacgcacccactcgccgtcgacgacgtcgcagtgctcggcagcggcgacgacggcgacgtcatcgacggcgtcgctgctgctggtggtggtcgccgccgtcgtcgtcctcacgagcacgctgatctcgccggtgagcctcgcggcgccgaagccggaggagacgcgacgaggaggaggagcgagagcgcggagacgagcacgcaggcggcccacgccacgatctggtcgctcgcctgcctcgccctcgccgccggcctactcctcgcgctcgccatctccattgctcactcgatcacgccgccggcaatggcggtacaggggtaggagatcgaatggattaatcgcttgccgtgatcaacctgatgattgcttactataatatagtattaactcgttcttggtgttgccgttcttgatcgagatggagggacggttgctttgttcgcttgtgcttggaatcaacaaaacttcttttttcttttggagatgttgatgaacaaaactagcgttggatgtttcggagagcccaaacccaaagggatcaaaggtgacggcgagtgcagttaacgaagtggtagtgtgcagttgaacgttttgggttcgtgtcttcgtgatcagagggcgtgcagtttgcacgctcggccactcttttatcttgtcctaatatctagcgatcggtggagtgttgaacttttttgctacacgcaagtaaaaatttcgtacaaacttcttactacttccttcatataggtgatattcttccctgcataaccttcgccaatgtagccatacattaatacaatcgcaactctcattagctcatctgttttggaaatataattaggatgtatttaatgagagcaactatgtaatctaccatatcatttccttagatttgctagaaccacaattatttcgaa

SEQ ID NO: 20414 - DNA, 5919 bp, Oryza sativa
aaatggtcaacaacgcatatgctaagatgataaagatattttgtttagttcagcgttcttaaggggggaggggggaataaaaaaaaagagggaaatggtcaacaacgcatatgctaagatgataaagaaattttgtttagttcagcgtatcttcaggaaaaaaaatctaactaaaaaaagagattaagctcagatgactaaccaagcaaagcaaatgatcattaaactatatctaaacagcgtaaccaagatttgagctatagctgaatttagtggaaatgccatgaatattggccacaaaatgacaacaacacttaccagacaagatgaagccagatattatgagaatctgaaaagaagaattaagcattagtgtcagcagagtcactaaaactcaaagtcatctgcatcaatgtattatagtatctactttaaaaaaccctaacaagaataatctgaggggtgttgcttgagtaattagtgataaggaaaaaaaaaggaattccttttctcctttttgtatatttttcccttaataataaaaatcttattatcgaatgcagcctacttgtcctgaagtacaatatttccctttcacacttcagattaaacttatgaccaattatagaaaaaaatattgtgtagtgctaaaaccacgacataatacagacaatgctatagtaattactcacccatcgagttgttgagatctcactccagccatgagtcacatctgatagatcctttagtgttgttccaacatataccaatgcaagagtgataggctggcaaaaacagatgtgattaaccaaaaaaaaaatgttgcaacacttggtgggttgattcagcattttagataaatggtaatacagtaagccgcaaagtagttaattacagtgggttctactgtgggtgcttttcttgtccatgtcaatatgtaaattgagaactatggaatcaaataccaacttctgaaggagaataatgtataaagcagcagattatgcaaaaggccaacattgagggcatgattccaattaacacaggtaatatagagtagcaaatgatatcagagcctggttccatgttatgcaagtaaaatgtaacatagcagatgataagagccaagttcactggccaaccagtatgtagcttggtcccataaaaattgcttaaataagaagaaattggcataccatcatccccagccaagaagccagcatgtactctccaatgccaacaggagtaacggacaacaggtagttcaacatgttgaacggaagtaaaggaacaagccttaataacaacacaatctgtaggcaaataagtaagacaaacattgttagatagttaaatacactattgtattaaagagaactttagttgcatgcaatggtaagacttgaatagaaggaacaatgaagttcaggatgaaagcaggctcaaaagtttatttttttaaaaaactatataaaaataataacaatcaagcaactatagttgctagaaaagtactttcttttcaagaacatgcaaaagatgtgtacatgattgtataaaaaagagagcaaaaaaacaaaaaatatagcaaagcaaagcaacaaaacatatagaaaatcacaaaaattgtcaaagagaaataatttaaacgaggtgaattctatatgattatacgttgggcatccaaattgttactatttgaatgcaatttcaaaggcattaaaaaacatgtggcacaaaaaaatgctattttacaaagcatttagatgttgatatatccttcatcacatcagaggctagaattccaaactccatggtgcaagaagttaccttgaagccagacctttcgatagcaatagctaccgcttgaaacttgggataatctttgcatttggagagaacatatggccttcctatctgaaaagtactaaaaccttaatcacagaagtacataaaaaatacaaatagtgaaaaccataatcaaaattatccttaccgttctgccaagcaaaaatgcagcagttgcaccaattgttgctccaatggaatcagcaacaaacccaacaggcaggccaaacagataacctcctccaagctggcaagtagaaaatgcacaccagccaattaattgatatacaccagaatattatactctcatcatcttatgtcactatgtcaggtaaacaggaaagcagagcaaacataatttccaccagaacaatacagacaatggtgcacttgtatataaactacatattttgcatatacttatcccaatatattcactaataatcctacaagtgggagtggtgagcagtagaaaatatccaggaaggaaaaggttctaaaacttcttttaaacaaaaagttgtatgcaccattgccatcccatacaacatttactgtatacagttaactgatgactacagagttgtggtacaaaacattaagcctgtggtaaatgatacatcaataaatcaattgaagattgacaagataatactagaattgacagtttattcttaaaattgattctaatgaaccaacgcagcatttctcattttgtttctcattctttcttcagttcaagcacaatgtaaactgtgaaatatatatcccaggtcaggaatcattggtctgcttgagctctatcagtctgtcttagaaaccaatattcatgaaataaacgaccgtaagaaacagaaggtgattgtgcttactgtaagtatggatgctggaacagccaataccgtcaaagggacgtaagcaagagccctgaaatgcacaacacgatagctatcaactatatatcacaagactgtttgcagctacatttatgttcttgaggaacaacactaagtacagataagtaagtctatatataaaaacttgagtcacactacctcagctctatgtcaaaacaatgaaaacccaagtaacaagtagtaaaatacttttacatccccttttcttttttgtatcatgtttgttggctaccttttagcatgagtggttcctctgaaatgcatcattatgtaatacagagagcaccccagacaggtggtgcatgtgtggaaaagggcatgcctaactgcctaatgccgaagatggagggggaacattctgttcactatatcaatcgagttaaatacaagcaaattgaatacttacaataccagaggaccccatggacccaagttatccttgatccaaaccagaaagtccttcaaaatctgtcaatgatgcattgcgattcataatgaataaaatgaaaacgacaagcatttgaagcaaaacaaaaacctccaattagttttaaatatttataatcacaacaaagaaattaaaacaattgctggcaagagagaaacagggcatgcaagaaatgtagaagaagttaacagtacatggaagattgtagacttttctaacaaagataagtctgttaggtgttaaggaactagagatctaacaagacaataaaatcttctacctccgtcccaaaatataaaggatgctagctatgcatcccccctcttcacttgacgctgttattcctgaactatagcattcaacacggatgcagaaagccaaagaaatacccttgtgatgctagaaggacatgtatttcaatgtactgaataattcacacaacaatggataggctaaatagctaaatctccaacaatcctaaaattctaaaatgacaaggtgacgtagcctttcgtacttaataaacttcggccagcttttcaagccggcccggcgacaaggtgacaaggtgacgtagcagcctacagttaactcggtgtgacaatcatcaacgggagagtgcatccaatcacggccacaaacaaagctacatttcggagttctactaagttgcacaacactaccgatattgcacattctttttgttaaataaaaaaaaagttgcgacatgatcgtatctgaaatcaccccgatatgaagcaagcaaagcaaagctatcgcgaaccttgtcaacggggagcgtgaaaagcgcgacgccgaccgcggcgaggagcacggcggcgacggcgaggcggatggccgagggccaggacagcgccatggacgcgagcagcctccgccgccagggcctgagccccctgcagtcctccccctcctcccctccctccgcgccgtccgcccagccccccgccctccccctcgcccgcagccccaccgctccgcctgccagatttgcccccagatctgccccctcctcctcctcccctccgccccccacccccgcgtcacctcctcctcctccgagcctcctacaccctcccgcaccggaaaatcatcgaacacctggcgcgcgcggcgaggcgctggatctggagcacgcgtcccgcgcgttgcgtggcgtgttggcctcgatttttctcggtggagaggaggaagggagagagggatcggggagaggaggagaggcttctcgcggcgcgctcgctggcttggcttggctcgcgcgtacgcctcggcttgcgtgcgtttgcacctaccgctccgacgtcgccgcgtgccggccaccgacaagatgcgacgcgtgtgccgcgacgatgcgacccgggggaggcgaggcgagcgagcaaactgatcgcgcgaggacggtgatttgtgtgggccgagaatattgggcctttctaaatgggcctgaagtgcaggccacgtacataactgagctatacatttattaacaaaatttctcttgaaaatttatcggatgtaaatacagtgtgaccatagtgtagttatatatcgtaaattgcatataactataaaactgtattgtatgtaacttttaaaaatctcacactaacacgctattttcgagaaacgtaggtcgcaagaggacgagactgaatcttctcacacgtgcacgcggtatgatttttttttcttcctgacttacacggatcttgaagtaaatctaacggattaaaattttatgatagttacatataagttatattgcagttatatacaaagtaaaaaaagtaattatgctataattatatattgtgtttaggtttgacaggtcctagaaagaaaaattatcaataaatatatagcaaaatcattccggaattcgtagaacattttgagaatgactaaactacaagataataaatacacacatttttcttatttatatatggcacgtggtacagaagctccagtttgcaatgcaatggttagttctccaaccccaatgcatgcacacgtacgcttgagtacacagtgttcttagaaattaaacattacaaggaactagtacacaaacttccatagctagcccaagatcagaccagcaaacacaagaacatacacaccagtattacaatatgtatatatctctctatatatactataaaaacgaagtgttaagcgactggtggtaattaattaacacacagcaaaataccataatactgctcttcttaatcacacttaccagtgctaatcctgaagaaaacacgcagcttaagctcagtaatgcatggtacattcgctagcttaattagctagtagccgccgcagtggtaggtgtacttgcagctgtcgccgaccttgacggtgtacttgtgctgcggcttcacgaggaatggcggaaggcggagcagcgcgtcgcacacgcacgccggctccacctccttcagccaccggcagcagtctctgttcgcgcggtggtcgtcgtcgtcgtcgtcgtcgtcgtcgtcgtcatcgtcatcgtcgtcgtcgtcgtcgtcgtcgtcgtcatcgtcgtcgtcgtcgtcgtcgtggtcgtcgtcgtcgtcgccgccgtggtcttcgtcgtcgccgccgctgtcgtcgtcttcgccctcacgcacgccggggtggtggcggtggcggcggcggcggcggcggctt

SEQ ID NO: 20415 - DNA, 12273 bp, Oryza sativa
gccgccagcgccgccgccgcctccgtcgtctcctccactatcgtcgccaccgccgccaccgccaccgccgcctccgcctccgccgcccccgccgtcgtcgtcgccaccaccctggtcatcctcgtcatcatcatcatcatcatcatcatcgtcgtcgtcgtcgtcgtcgtcgtcgtcgtcgtcatcatggtggtggtgatgatcctcgccgggaggcaggatggcgcacgcctggctggcgatggcgaactggctgaggcagaacttcttggtctgcgccgccgccggcgccggcacgccgacgaacgggagcacgagcaccgcggcgagtatcgcggcgcggagcacgggggagccagccattgccaccaagaaacggctagctagctagcttcccttcttggatggtagtatatatctacgagttgtacaatgcagttgcttatatagttgtggccttgtaggagagatcgatcgatcgactccatggctgcaagtttgcaacgagatctggaagagtttttctttgcatggtcgctggatatgtggcgagatagatggccggggggtaggaaagcgggcgatgagttgtaggtgcttcatgctcgtggtgtgagtgacttgggagttcggtcggtctgagaattttgagtccattgttgttcacttgtgtatttgaccttttgagaaattttactgttgttaaagttaaagaaagtacttgtagttattaaaaattttggtacttgagttacctaataatgtgtgaagatatcaaattttacgttagaaaacgtggtaccttatgataccttgttaaaattgtaaaattacccttttacttggtagcatcaagttagcagcactttgtgtgacttgattagttcatctgcacaatttgaccttattttcttggtcaggatgagagtctctctctctatctctctctctgagtccatggtcccgttcatttcctctataaaaggtggataaaattttggatattcatcgtggcacgctttttaaactgctaaacggtgcgtttcgtacgaaaactttatatatgaaagttgctctaaaatattagattaatttattttttaagtttgtaataattataacaataatctatttttcaagtttgtaataattgaaactcaattaatcatacgttaataccacctcgttttgcgtacacttaatcttcattttcaggagaaaagaacatcaccatgtattgttcacttgtgtttttactttttgagaaattttattgttgttaagaaaatacttgtagatattaaaaatatagcgtaattgttgaaactcacaatataagttctaaaatttacttttttttcttaattgagatatcttaagaatagctagtcccaaattactttgaacattcatatatcaaccttggggcaaaacaaccatgcatacatctggatcaacaatgtggaatgtcttggtgctactgacaagtggagcccacctattgaagtgttatacagtctacttctgaacttctgttttgcctataatataaaatgcttgtgatatttttcatccatggcatgttgttgtcggctaaacctgcggttgctgggacagccagccgtcgtcgatgaagctgatgtccacaaacttgtgcacctgatcatcgtccagctgcttctcccatgccactctccctgttttgttggctcctggcccttcacacccagcctctgcaaatgtgatggtcgacctgaatgaacagaaacaaaaacaaaaatttcagcttaaaacacaacaacacattaagcccagttaagaactttctcttttttaaaaaaaataaaaaaagagagaaacaacgggtgcctatgagaaaaaaacggtcaatttttttcgataagggcacgtacaacggtgtttattagtggtctctctctactgccatgcaagtaaatttggtgacatggaggaaagagaaaggagtatggttgttatgcatgacaacggctcagagtcgactcttagcatttattagagcaaattttgttgcatggtggtgaaagaaaggaaagaaaagtaagaaaaagtattttaatacataaatgattagagaccatattgtctctaactgttgtaggatgctagtctctaaataacgcagagcttatatccgactctacctttgtacatgccctaatggaatttagtgcaacctctacgttacatatatatatatatatatatatatatatatatatatatatatatataggtatccaataccttataagcatgacttaatacgaaggtttcagggttcaaaatatattctaaatttgatatgaagtctgggttttggcaaatccaaataaaaaaagaggatatatataaaactgcctttactactcctttgggtcattatgaggggaacataatgccgtttggtttaaaaaatgctccttctgagttccaaaaaataatgaatgagattttccttccctttacatccttcattatagtttatatagatgatgttttaatattttcccaagatgttgaccaacattggaaacaccttaatatattttataaaattatagttcaaaacggtttagtagtctctgctaagaaaatgaaacttttccaaactaatgttcagtttctcggttataaaattcaatatgatcaagtccaaccagtagcaagagtaatagaatttgcagaaaaatttccggatgagataaaagataaaacacagttgcaaagatttatagggtgtttaaactatgtctccgatttttataaagatcttgcaaaagacagaaagattttaaccgagaggttaaagaaaaagcctccagcttggacagctaaacatactcaagctgttaaaaagatcaaaggtaaggtcaaaaccttgccctgtctttatattctagatcaagatgccttcaaaattatcgaatcagatgcctcagatcatggttatggaggaattcttaaacaaaaaaagaattccaaagagcagctagtcaggttcacctctgggacctgaaatgaggctcaaaaaaattattcaaccatcaaaaaaaaaatattggccatagtaaaggtcatatcaaaattccaaggagaattattgaatcaaagattcttgctgcgtatagattgtaaagcagcaaaagatgtcctccaaaaggatgtggagaacttagtctccaaacaaatctttgccagatggcaagcaatattatcatgctttgactttgaaatagaatatatcaagggagaattaaactccctaccagatttcttatctcgtgaatttttacagggctatggcacctaaaagagacttatcagcccaagggagaactacagaaagttcaccaaataagcataaatataatgaactaggaaatatcattcctagaacccctacagttcaagaaaagtatgggaataattcatcttatatcctcaatatagatgaggtaattctgccattagaatttggagactctgatctcaatattatcaagattatgggaaagtatttcccacaacaccaatattttatccctgaatatccagggaaagatcaaaattattatgagaccatattatgcgagacaagaagtgcacagatattccatacaaggaatggtgatgatttgggattcacaaaattattgatccaaaaaaatataagtatcgatgattgggataaatcatcaaatccttatgtagccaggactatatattctacatcctgtacaaataaaagatataactattgggattatcagaaggcctgggaaaaagtactcctcgtacaaaattcccagatgaagcattcatggtttattcgcttcaaagaaggatgtgaggagataccgctgtggtttttcagtaattggtggctgaaagcaggggccattcctgaaatcctaccacaagaaatcatcaaagttattacacaagaatcaaaaaaggatctcaaggaatatccttttatccttatgcaattttgtgccgaaacagggatgccttggatactaaaatgggacctcaatattcaaagaatggagttcccagcaaccttaaagcgaaactattatgcaagatggtgggataagtttgcaatcacaccagtaattgaaggaagaaagtttcgagccaaaaacaagaaatctcatgtggctcaattaaaagaagatataacaagagaattattaaaggcaagacccgagttgacaaagggagaattgcaacttcaagtatatgaaactacgtttaaaagattggaagaatcactaaaatctagttctacatgcaaaagtctagatgaagatatggtacaatgcagccaaattaagccatcttcgccaatacctccttattactcaattaagcaagataatgattcagatgaaggaatatcagatttcaatccaacacacatttagccaagatatgacgacagatcttgtcaccaagataatgagtaaagatcttgtcatccccgacaaagatcactattcaagataaggaatctacactattccagataagataagtttatggtcaaaaggcgatattatgacatctttattgaaggtcaaaagcgtcatcaaagattctctccatgaagtctaaagggatatcatgaactctttgaagtcaaaaagagatataatgaagattctctaccgagcgctatataaggggctcactatcacatttcagaggcatcgcattccacacacaacacatctcactcaaccattcctctcaccgctccaccagccatcacactccactccactccatctaagtgttagtactatagtataacctaaataaaagactcatgagagtctaagtgtgagagtctatgtaagagtccttgtgagagtcctgtacctgtataattacgaacgtgttgtaccaagtccttggtgtaatcttcagaaggatctaccttcaacctatcaaggtatatgaataaacacctggaccgttctatataaacctactatgttctaaatatctaattttatatcttgtacataattcgtatttacagcttgtctttatttcctgtactgcatttatgtttgcataataatataaaaaaaattaacaacctggattgccatccaattgtcacatactaatctcacatccaagattgcatatagataagcatttctatcctcatatctggtgactagacccctagtcactgccctgggttagagctggtatcagagccaagtgctcgtaacctccccaagccatcttctccgaaaggggaggggggggaagaggggtcgggtggcgtgctgaagtcgcggtgatcccgaacggtgtggttgtgttctgaagtcgcggagttcccgaacctttgatcggttgcccgaagtcgtgttgccttgttgagccgcgaaggcgtttatcggcataattcgttgactgggcacttatcaaaggcaaaggttgaacttaattgtgggaaatattccctgccgttgactggaatacatcatatccaaataggttgatcataattgtgggagatttccccgctgttgactggtaactacctacctatcttcctatctttcatataagatgtcttggttggttagatcacgaagagccactgatcaatctgtagtctgttggcactacgtcgataaagaatgcttcatctatatcttttgaggatattgagaaaagtatttccaactggaagatccctaaggttaatattaaggaaatatatcatgtatgtactttttcgtatatatatatatatatatatatatataaatatatgctacttaaggatttatgtccaatcatttatttaaatccttcgtggagcctaattgcctaagcaaagtgatatgcatgcatgtacaagcagttatatttgagcatacataagtggtgtactatttataatagtatgagtgtaatgatatatgtgcgtggtgtaggtttaatgtgagagtgttcgtgcccaacctagacatacgaacatgtttggcggaaccaatgtgtgtctagcccataaaaaaatagataaagtttatgcatagaaaatacatataaactttatatgtggaaacttttaattaatgaaaaattatatataaaaaatcagaatcgaatatataaactgtgggtatataaacttatcagaaaacgaaacggatgccaaaaagaaaaacacagtcatttgcacatgaccaagacacgcgaacgttggcgcattagctctttcaatgaacataatcatcttaaaacaaaacaaaaaaaagtttcttacacattgggggagttccagggctgccatccttggggcacgacgatgttggtcatggacacctggtagaacaccacggtggcgaactggttccacgcgcgcccgaggtactgctgcccggagcccagcagcgagccgcccttgaacaccagcccaccggggtcggcgtcggtgacccgggcgtgcgccgtcacccaccccggctgctgcggcgacggcggcggcggcatgttggactccagcgtgcagttgtcgtagatggactgcccgtagccgaagatgaagtcgacgccgcccctgacgtagcagtggtggaagtagtggcggcccttgaggtcgcacagcgtgtcctggaggggtggtaatgggtcaggtccgtgggttctttcacaagccatcttaacttatttaagtaaaaaaactattgaatttcagtctaacctttttttatccaaccctaacattttctaggctaaaatgttaggcccattatcatccctacctggaaaccgtagaaagcgcagtcgtagaaggcgctccggtcgccgccgatgagcgccgcaaccgcctggacgggcttgctcttgtcgtacttgttataagtgttctaccatcatgtatgtatgcagtgcaatgcaagccagtgtcatactcagtaactcggagccaaatatagaagcaaggtactaacttcgtgtcaaaatgtaacagttttaaactataaatatgaacaatgtatctagacaaattgtccagtagttaaatattgttatattttagaatagagtaagtactttgtttctggtaattagtactttcctaaattcgtaacactgaaatggcatcgagtagtattgagaatactttttccttaaatattccaaatttctacgacatactaaaataatatgaactacataattattgtactagatctagtgagccgcataagagcaagtacaatagcactataagccagttgcaaatatattttaataagataaaagatgagagagaagagcagcgggctacaactctgtagccagctacagcacggactccaagacgcaatgtgtatatgacagtgggaccatatgctaatagtatagtaaacaactattgtatgaattggctgttaaattggctatagaagaattggagctagtagttggctgtactattgaccttgctctaaccaaagcctttatttttttttattttacacgaaagacacatacgtacagatatgacacaccaaactagacacgcacttctattattgataggggaaaaaacctacgggatattcctagcagcactctaccagccgagctatacgttgttctcaacacgtatattttaacatatgcatatgtaccctgaaggagatgctgcgagcgacgaagttgtcggcgaggacgatgaaggtggagctgtcgaacgtcgccgagccgccgacgtcgctgtagccgtggttcaacagctcgtcgatgctggcgtgagcgtgaccggcaaaggtgatctcggtattccaagacccatccccttccagcactatgaattgtttctgactcgggatggtaaccttctccctgcaatccatgcacacacacacgaacacaaacactcaccaacaaaaaaactctcgaaaatccaaacattcttgttgatcttttctttctttcttttgaaatgaatccaaacattccttgaaatggcatatcagattgacagtttgaaacttcttgaaggagaaaaaaggattagcagtttggatacgtactcgtagcttcctgcattgacatggattttgatccagtcgcggttgccgtcgggcacggagttcaccgccgactggacgagcgtgaagtcgccgccgccttggtgatcgacggtgatcgtcctcgacaccggcgccgccgcggagctcgtcgcgatgaacaccccgagcagcagcagcagcgggaggaggaggagctgatcatggcgagatggctgcattttggacacgaatcttgaggagaagaatctctctcgcattgagacgattggtacatgggtgcagaatttatccggtgattaggccaaagcgcgtttacacttgcctgtgctggcatctgcagggtggcgttttacagagtgacagatttggtaggtgttcaactggctgcatatattggcattaaaccaggggaggataatatggttagtttagctatattgatttaaaaccctactaaattttcgctattgttaccacttatacatagagataatttagaaaataccacaaacagtacaccgtattgaaatagaatattagcaccttttcttatcacttgtagataagactattttcataatatatgctgaagtctacaattatacggtattgaaatagaaattactaccctgtcttaaaatatactacgtaaacctagaactgaatgggacatatcgtgatactacaaatctagataagaggcatgcccagattcagtttggatggaaggtatacccaaatatggtacataagaacatacgaacagaaactccttgcacggggatagaggttgtcggagtccgacccatgaaaggcatagtcttatttgcccgtgccctacaaagactctccgagttctacttgaaaaggaagttgcttacccgtgtaaatataatgctccatgggaggtgagtacatcaaatcaagccatagccacaagccgtatcgtagattcatctaaagaaagtccattgttagtcactgactataagtaatcggatagttctcagtgagtactagatggtaagctagattagctagcttgctccaccattgtaacccgtgagagacatcccatagttatacatattaactagattaggactattaccgatctcagggcctaaaccaatataaaaatcccctgtcttcatcttctttactgcaatctcacgtatatttgcgaattaaggatctccatacttcacaaataccgtagatgagtatagtccgtcaacggtatatataaatgaacaaccacaattgacaacacaaatagacaagtgagccaaacagacacccaccacccatatttcccatcttattcttaggttgaaattgcgttgccaacaacttaaagggccattttgatttaaagctatgccaaatttttgtggtgcctatttttggacttgctttagtataattaatttttggtaggataaattgtaacgcctctatatatttgcccaaagctctcactatcttgtaccattgggagttgccaaatattccctagttccatgtcaaaatatagcaatatagtaccagattagcaccacctaaaaaataacaatctagtacgtgattagcaccacctagtactacaaagtatgaatatggagaaatctatgtctagatttgagtcctatgctagttggtatctaataagtattatattgctagtatattttacaatagaagtaataacttgaaatttggatttatttaatattttagagacttgtataagaaaattttcgcacaaaacgcgatgtttgccatccatgtcgtgaattgaacacctcatttgtgaactgctttagcaattgtattccccatcgtagcttttctttattcgtcaactgaacccctcattcgtgaattgaacacctcatttcaaaagcttactaacaaataccgtggtagaatctaaatcttaataaaaagtaatggggccttataaatttaatttttaagtttataataattaaaacttaattaatcctacgctagtgactaatccaattcgaacgggacaagtgcacactccaaccatcccctgcctctgtagaaacaaagcacctccggcttatttggcaacttgagggaaggggattgagagtttacacgagggaattgatggtgagattaagatgggaatttgatttttcatcctagtctcttgtttggtagaggtggtagaaattgatagggagtttagttgaagattagatcattaatgaaaacggatggctgagatttgtttaggcgaagtaaaggaggaattccctcccaattacctgcccctactcaggtattgaaaaggagggagtttattcctcaattacccatccccatcccaccaaaattcacatgtcccccaaccaaacaaaacagttaatagcctcatccctctaaactcccaatccctcctaaaaactccctccaaccaaatagaccgcccgatcatgacccccacggccccaccccatcacccaaaaccaccgtctacgtacaaaacagaactagttttgagaaatggcaagtactggtaggttttagctggttttgcacccgagacaaaaattagatgaacacaagaattgagacatggaaataaccgcttttttcccttatattctaagattaggcatgtcgatacaatttgtaactaagcctctatactaatcttgaaagctgtagtagtgtatgacaattcattacttgcaatgcaataagacaaccttcactacattttcctacctttccttattcctcttgaaaattttgcagtgcgttcctcttgaaaattagcactcaacaaatgaaactatcaatccaaaaattccaaacctctgttcttcgatcatgtgtaaccctaatcagttcagtttaatgtatttaaattaacatttggattacaaattgaacatttaaataccaaagacattgccaatgagacggtaaaccgctaggctaacgacataatctatgggtaactaaactgatacaggacatctcttccccacaattgaactccctcccgtttctgcatttgcagaacagtgctaagaactaagatacatatgtacagtggggccggttccatctcttttgtcaaggagatttcatggtaagcccgcacatgaacggagacattgaaggactcttcacggctcaaaaacgagaaaagaccagatcaaaattatatagcctggaaaacaatgcatgccatgagtcagatgaacataatacaaacagataaacgcaccaagcaactgaagctatgatttctgaagaaataaaataaactgtgtaccattaaatattgtcagcgattatccgagctccagtaacgaaatatattgccactctgccattatgagagtataagttgaaaattaccgcatcatcatgaaaggggaacattgggggaaaaaatatgcaaaggagattgcttaaaaggtttattatcgagaggtaccgcagctgaggctcggcaacagttctgaggtaaatgaggtggaaagctcctctgctcccagtcatctagggtgtttatcatgattgtgtcttccattcctcctccaacctgatatcacaaggatggttaacacaatcgccatgcagagttgctagaactcgaaacaaaaactggtattcttgacaggacacaacatgcagaacaaagtgttgggatcatgaagtagtggtgaaggtaaaagaaatatgacttctttaagagcacaacaaaatatgaaataccatacctccttcatggggaactggatggtccatcgagtgtctagggccaggagggtacttaaatctcctaggaggcattgaccacccagggcctggccctgttggaggattcgatggttgcctacaatgaaatggggtggacggaccatcaaaatggtctggaaatggggggcctgtataccattgacaacaaaggtttgttcaccataaaagtctaattgatgaaaaaacatgtgactgattgtatttcggcagaaatcctaatatagacacacaggcagttagtttaaaacaaccctcataaatatatgtagacagttaggcacaatacttcaacatacctggagggaagtgtgggggaaatcttcctctatcaacttca

SEQ ID NO: 20416 - DNA, 1469 bp, Oryza sativa
ttcctgcagccccgaaggatgccctctatcatcaaaatgatgtgctccatcatcaaaataatgccctccgtcatcaaagtgatgccctctatgatgaaagtgatgtcggctatcatatgcatggggtcctctgtcatgctcaccgtattgatgcctctcaggataggacggattgcaattccaaggttgtgtgttttgttggggttcgggagggtatgggtactgatttggaaatggtggatgtggtggtggctgcaagtgatatgcattattaggtggcggcacagatggtggttggtgataattatttccatgatgtggtggtactgacggcccagaaaaatggggtccaggaggatgaaatggtgcaacaggaggcggcggcggcagcggtggtggtggtggaggtggcagaggcatctgatttgcatgcccagcgtacccacaattgtagggcgctggaggatgtgatgaaactacacaaggatccatgttgcttctattgtttgcaacagaatgagggtgttgctcttgaatattctgcaaagaacaattaaacacattttagattcacagtatatgaaatttcataatggccttcctgcactgacattataactacatacataggtagttcttggaggatctggttgaactcgatcagctgccaatgctccttgcacctgcgaatcttgaaaaacaggacagggtggacgtggcaaaggtggtggagatgatggcaatggaggaggagaaggtggtttgtcatcaggtaagggtggaactgaatcaacattttgcttggtcgttgcacacctagcaacagttaaatctggttggcatgaggagatagcttccccttctgcttctgaggatggggctaaatcctccatttcatggtcaccatctacttcttccaggacaagtcgatgcttcgccacatgcatttgagatgcttcttgctcattagcacctgtagcttcatgttcaggggtaacagcttcaaagctcctctcctcagaggagcttccttcctcatcttcaagtagttttgtgccaatcaaatttggaagatgaaaaccagtgttgctgtgaagaataatcattcatataaacatgaattagtactaaacatataactaagtacagaaagatgatagagacagttcagcatgcacaaatgaggttagttacccatacaaaatgagaacacacctgaaagctgaaaggcaaaccaaattggtgtctgacaaacaaattttcactttttaagttttctaaccttcagtttgttatgctattgtccatttactaattttcaccactctatgcacaactgtaatgcccttaatgagatatttcatatgcttgatattttttacattctctgccagattttgtagtattgatatccatatatgtgtaccgagttttttctgtcatctgcccaccatacattcatgctaatc

SEQ ID NO: 20417 - DNA, 5029 bp, Oryza sativa
ataagctgttgaatgtggggaccacatccacagaaatgatagtatgcgttcatgaaataatataagtagacctcccaccacctggatctactttagtatgcctatgttataatgcttaataaaaaaattctaatgcacatagcactgcctaattactagaacgagtatttgattagattagcgcatagatattccaaactgcatattaaattactaatgaacaggcatctgattagtcagatcatagctatcacaatagcagacaatcgaatgcctggggtatacaataagatcatggttccctcaagtgatcactgtgacaagaaatatctgacatacctacataaattatggtgaatcacataaaaaaaatgcaaatagaagacactaacactagatgctatttgtgctcgtgataagagaaggtaacatgatgcatgcagcaaaaagaacgcatcaagccatccataaaacaatgtaaatgcaatacagttaaattcaaataaatactcacatctgtttagttccataaaagtagaccagcagcttctttttagctgaagaaaggccccatttctctggctcacttatctgtaacagtgtggatattcatgaattgaagtgctcatgattgaaacaactaacacatgctctgaagaaaccgcaaatccttgtaaacaaaccagacataggaatgctaaaaatagaaatggaaagcataaaagttatagagcagcttcatgctacagaccctagcttaatggcaaaagtcaaaagtgaaataccaccaaaaagaatagacgaattactctctgaaataagaatagttgaatgcaaggatatgattcataaagtatcatgtggagacaccatcacaaaagctaaaacaggggacaggtgttgtctaacagttttaggacttgctaacagcaagttcaccaattttacaccatggaactttctccgagaaaggaggtacatgaaaagtaacggttgcacaataaataagcaaacgcctcacaactgaagagcaggagaaactcaagttgttttctataaagcatggcacacaaacatcttgaagcaaaatttaggacaacagatgaacatcaggaattagcaacaggcaagaacgatatgttggacatactaatccaaactaataagtaggtaccctcagaattttaacgaggcccatcatgaaaaaacattacgcaaccaagcttagtcattgatcctcaaggagcctaatctagataaaaaaacgaacttatcataagtctcttgtccttctgtcccacagagagaagatcaatggcaccaactacacctaaccagccaggatgttcatgtacaaaccacaatgctgaatgaacttaatattcaatgcatcaattgatcaaagataagtgcaacttacagtagaaagtattcagagtttccaaatcctatggatgtatccatggagcacaagaaagccctacagaacttcagtaacccactacgataccgaaggctcaaaataccaggaagctaaactgtgttctgagaaactttaacacaaatgtcaacaactcaacaacagcgaaaggttattacacctcaaagcataatgatggcctagcgatcacacagttgtttctaaactatgttgtcatcaacgcagacaggaacatcataagtcgctggcataactcacacatgcataaccattacaaggatgcaactgttgaggagtataatttatggagacatcccaatatggaatccagagctatatatacacacaggttatggaagcaatcaaaagatatctggtattacagttaagggatatgaatcgatttggatccatatttcatatttgagggagccaaactggatccatatctgaatgaggctcgcaccacattcgggcgtgatacaagtggaagacatttgtatctgcgccaaggcccactaccaacatttccttcttctgagctaacagcttaagttccttgcacatataccatgtgatgtacaggcaagggagtaagataaggagtacaagaggcaggaattcataaggagagagtagtgaatgactagaattaaacaagagattatatttatttaggtatagttttttttatatttcacaccacagtatcagtaccaatgaccagagctaaggtgcccgaatctgacccagtccaaaagtctatggagccccaatagcataaagggtgaatctaaactgcattaatgattgacttacatgacaaacacatgaaattgcagtaagaaatcataatatgagcacgggattatcgcgaacttaagaaaagatcaaacatatttacatcacgagctacctatcaccaaactcatcgtacccagaaccctaaacacgctcctcactaagagccacagattaaaattgggggagctaaatcagatcaagcaggcacctaaacctcagttttttttagcacgaatcaacgaggtgtggtaagttcactcacagcataaatctccgaatccgaaattacataaagccattacagagagccctagatcagagaccaagcaatcagtcccactcaccatggccggccacgccgggaagcccttcatcttggcgagcacgaggtcgcccaccttccactgcgccgcagcggccgccgcggccgctgccgcggccgccccgcgcttcttccgagccggcggcatcgccgacgcccccaccaccggcggtcggagggcgcccccctgctgcggctagcgcccgaggcggcagagccgccgcacgacggggtttgcggcgcgggtaggggcgcgtacgggctccgaggtggctgcgtcggcggcggtggcgggggcggcggaggagggaggcatcgagcgccggagcggcggatggggacaggagggaggcggcttaggcttcgagatttttctcttttaattcggttttcttgtcctttttcttttcttttccatttcggtgcattttgatcagaagaggagtagtaggaggactgtaggagagggttgtttgggctaactggggttaatatgggcctacttgggcttagtgcgaaagagtggttaccgctaatgacaacgccaattattgattcgttattgaaaaaaccggtgaaattcagattaatttctctatctattagtactttactaatttctcttcctctagttatgtaaacctagcccgttgcacagcacggacatattagcagttgtcaaaatgtcagtttgaacttttattttttcttttacatagccagtttactaagcagtttttccatatgaatcagcttaataacgccgataaccacaattatttcacggttatcatcgcattttgaaaccttgacttcatcgtaccaatccctccggaaattaaactgtacgggcctcgcaaatgtacagatggtcagatactcagatgcaatgctgttatcaagtttggatccaaacttcagtccttttccattacatcaacctatcatacacacacaacttttcagtcacatcatctccaatttcaaccaaaatccaaactttgcgctgaactaaacataacctaagaaagcaaatcttttgcgaaataaatgcagtgacgttagatcaaaggacagataacaaattgaaagaatcaactcctgacaatttgacatcactttgttcacgcaaagcgtccagtggtctttaaaacatgcagggaaagaaaagctttttttaccaggggcaaaagggcaccaccacaaactgtggtaatgcatgcaactagcttgtcctaagaaaaaaaacatcacacgttgttaagcagggtttacttcctaaaatcagtaaatgtcacattctcggaccaccgttgccatgcactacaaactgattacagatgataagcaagagaaccaatgaaaaaaacagtaaaaggccgcgaggggtaattcgatggtgtcttgtaacttctgtgtcctcagagaatgtgacattgacaacactaccgggaattcacaaaatgcacatgtcgttgcatggaaggctcaaactttgtcagaggcatcctgtgatgtgccctcagaacttttgaccgcagccagcttctcagctaatctttgctccagtgccctttgacccctttctctacagtgagataaacaacagtcaagtgagatctaggatacaaggacagcatacacgcagaaaacataacaccaaatagagccactaattattgccacagaagactgaacactaagaacatccagtcgagtgcagttgatgtcctgactcaatttcttttacattttgttgttggctgtgtgcaccatgtccaaaggctggaaatttaacaagtatccaatatctaaaaaagcatccaattgccaattccactttggttctaatgtttaatgacatcagaaagtgcatccatggagtataagcaatccttatgaaggatacattatggggaaacacaaatataaaattgattgatattattccagggatacaaattaacaaatcaaatggcagataaaggtaccaaaggctcaaatattgattattcattagatggcacaagtgtggatgaaattatgctctaatcaagacagagagagagtgagaaagaaaaccaaccttcttctgttcgcctcaatagaatctgaaccaggcaaaggtgtggtatccaatgtctgacctctagcatcagccctttcagatcttccacaaagaagcctgtggaatattgaagctatcggatccagcacaggtctgcatgttcaattaattggtcaggatattcttccaaactacaaatcaatcaaagttatataaagagggagatttggactaccttagaaattcagggaagaaacttgagaaagagaactcttcgcttgggtctcctttcaagcctgtctctaatctcctttggaagtaccgcaggtaaatccaactcatataaatgccaaacaatataactgggaggtaagagaccagctcctttacgaag

SEQ ID NO: 20418 - DNA, 1098 bp, Oryza sativa
caaagaggaccttgctattttctaattactgaaagggcaaggccactcgggatcaacacatcaacatctctgaactggtctacttgtctctgcaggtaggaggaagctagctcgtaaaaataccacaacaggccctatatatctgtgctctccacttgtggcgagagagcaaaactgcaagtacttctatagttccttgcacctaatgatatgagtttatatttctgaacagaggatcaaatgataaatggggactgctaagaaaagtgcaatctttgttgcactgctgtgcactcacattcttgtgaaccatgcatgtgacagtggtaagaattctgtttatccttcttttgcatttttcctcagctagtctattgttttgttgtttagtttatcttatgatatgtgatttgttgaccatccatgtgacaatggcacagatttttgctctcccgaggactacaacagaacaactttgtccctcaaacttatttttttcttatttttttatagtttttcagcttgtggcgaccttttctttactcggactagagatgcatttacccctttacctctcagttcttcctttgattctttaataactacaattttgatatttatattgaatggaagaaagtcaagataaaaaagtcacaaaatctcataaaaatggaaaaacaattcaaattcctcagtcataccaaatattataatcattgtagaatatcagatatcaaactggatgatccaaagataataaaactcagtggaaactggatggatcattgttacgagtaattttcctgaaacaccttatttctgatatctcatatctgatctgtattgcctttacctgaagcagatgtggtatttgggtacagtgggagtactggtccagagcattgggggagcttaagtcctaatttcacaacgtgctcaaaagggacgtaccagtccccaatcaacattttgaaagatgacgcagtttacaacccaaagttggagccccttgaaatggattatactgctgcaaacactaccattgttgacaatgtcttcaatattgcggtttgatctaaaacagatggttatttgtgt

SEQ ID NO: 20419 - DNA, 3364 bp, Oryza sativa
ggtaatactatctttgcttataaatacacaacattattgactttattaaaataaactatgtaaatgtgatttattttgttgcgatttgtttcatcgttaaagatactttatgatgaatgatcaaactcatgtataaaagttaacaaggttgtatattttaaaacagtgggattactattagaatttggtaactactcaaaatttgaaagtgcccaacctattcaatgaaaaaaaatagcaatatgtaaaatttgacattgtactaggtcttaaactaaataggatcacaaagttatgttattcaactcaaaatttgttttcaagttgatataaaccgtatacacagattgagatcttttgtattagcacttgcttaaggcagagttggcattagccccaagggctctttgatagaaggaaaatcgtagtaatttcgaagggttgccatccttaggaaaaaaaatctataagggcatgttcaatggtagagacgagtatggtgtcttaaacaagattatttaagattatttatagaccgtatgtttacaatagttgatacgacaaaggctttaatgattaacttaaaaaatattccttctattaatattctttccatttttttacactcatgcaaccatatttttatattatagtgattaagagccgttgttatgcataacaatgatgtttttctctctttctttttcttccatgtcaacaagtatttctaattagcaccgctaagagaccactattgataaccattgtacatgccctaacaacatttgcaacaaaggaattgcaatagcatctcacgaactgcaattcctacgcattcgttatgcagtaaatttagcataagctcacacatcatatttcattttgttttgtttagtccaatgcacactccatttgatttcctccagattcctgtgaaccataaacatccagcgtccctttagaatcttgtagtattgtgtagcatatgactatatttctacggttttcctattcgtgcgttttaaattttttttgaatgtcttaaaaatcatatcgtccaaagatacttagggtgtgttctaaagttgttttgaaacagattattagccacacacaaaacgagaaatagatttattgagtgttaattattaaaaacttgaaaaacgagtttagcaacttctatatagaaagttttgtacaaaatgcaccgtttaacagtttgaaaaatgtgctaataaaaatcaaagaagtgccctagccgaaatgtagtttagaacatggcttaagccctctatccctttgtgagtatgattatgaatttgtgaccaccgcccctttctagtgttttgtgtatgttaggaggcacgcttctgagtatgcatatggtaaatgtgtatagcgttatgtgtatttatgtatcttctatgtaaaaaataaaacttatataagactcaacatgaaaaagaagtgcatttgggggctctgcatgattgagaaaacagagaaatagaaaatgcatagaattttgacatgcagacaagcgcaaacagaggtttgtaacacatagtaaaaatacaggaaatatcgtttggttggaccatatgaaaaacataggatttggatgagaaagatatattcataggaaactatttatgaagttgaacatcatattaaaaattatccaaaacttgtattaattgaggtatcccttactcccccgtttcaggttatatgaaaaaaaaactttggtcaaagccaaactgcttcaagtctgactaagtttatagacaaatatagtaatatttacattaccaaaatagctttattagattaataattaaacatatttttataataaatttatcttgggtcgaaagttttactatttttttgtcaaacttgaagcagtttgattttgatcaaaattaaaacatcttataacctaaaacggagggagtagaaattttataggatttagtaatttttaattctttgttttaacggaaatgctataccacgggatactgtcccaagtgcgtgggacggtatcgcctcctcccgcactatctccttgagccatgtcttctccacgtgcgtcactgctactgatggtgtgcctcatattgttgttactctgctccggtgagagctgttgctgatgcatgactcctgttgctgctgttgctttgctccggcaagatgatgaggagcgttgacgacgcctggcggggcgagacggcaagacaatgagtatgtgcacggcgagtcggcggcaagacgacatgatgatggcttcatggtcgtggtcgttgcctgctcgtcgctaccgcctgtgaccgcgccgatgcgaacgcttgatgatgtgggggtgtggacggtggaggacgcggcctcagcgatgagctccggtgtggggcatggacagtggaggacgcggccgctggcgatgagcccggcgtggggcgtggcggaggaggacacggccgctggcgacgagctctgacgtggaacatggatggcggaggatgtggccgtgccggtgacgatctccggcgtggaccgtggatgatgccgccgccggtgacaagctccgacgtgagacgtgaacggtgggatcaccggcgacgatgcttttggtgcctggctcctgatactttgcaagtatcacctaatacatggtaggaatcgccagatatctgacatgtttcacttgatacttcgcaagtatcatctgatacgtggtagaaatcgcttgatacttgacatgtttcacctgatacttcgctagtatcacctgatacgtggtaggaatcgcctgatacctgatagatttcacctgatacttcgcaagtatcatctgatacgtgctaggaatcgcctgatacctaacagatttcacctgatactttgcaagtatcacatgatacgtggtaggaatcacctgataccttataggtatcacctgatacctcagaagtatcgtctgataaaggttaggtatcatgacatgatacgtcagagatattaggacctaatacctaaccggtatcatcctgtcccaacgggattccattgtatagcagccccttgttttaaagggctatatatgagaaaaattgaaaaatctatactattggaatccctacgttttttttttcatgaaatcaaatggggcctcagattagtggtggggcgcagggtgatgcaccaaacggcagaggatccgactccaagcgtccgggatctaggaatctagccgtgtgccactactggatttttcacattttggtccttttaaaaaacttatttcgcaaatagacccctgaaaaaacttattccagaaatggtcctttttggggcgcca

SEQ ID NO: 20420 - DNA, 2526 bp, Oryza sativa
cgtgcaccccgggctccccctcacccccgcctgcccaccgcctccgcctccgcctcctcctatcatgggccaacgcacctccgccgcctgcggccactgcgcgccgccgccgccgccgccggaggagcctcgccggtaacgccctcccccccgaaccgaggaacacccctcctcgcccccgtaaacttcgttcccttccagctgctgaccgagagtggcccccctctcgctcctccaggatggcgctgatggggccaagcgccccgcgcccgcggcggcgtcttcctcgctgggagccgcgctggtcggcttcgcgcgtagcaacttcctcccgctaggtgagttttctgcttctacgcgatctcagctagctcgtgcattgctgctgctgttgggtggacttgtgtgtgggacgcagtgtgccttacaggtagatgtagagttgcgaaatttcacggcctaacatggaacaattgaaattccaattctcataaattgtaatgcaataggagtattacctccagctagtttacttgttaatgaccctgatatttcattagacaagagaaatgctagggtagacgggtccagttaccaaattcaacaagtttctgtgaacccaattatgcactagttagttcctctgcacgtgctttttagttgctctatgttgcaaacttgcaatggagatgataccgtagatgtgtctgtgcatccctcagacaagctcaagtacatattttcttagcttgtgtgtttcttatgttaagctctaattgctgggattgctctggccctcatggatcctacactcggatgccttgctcacaaatattcactgtcaaagtacagcaccttcgggatattccttatctcaggttagtgttttaacccaattcatatatttgtggtgctatgacctcacactaatgacgtcctcttgcataggactgactctgcgaaccaaggaacttggtgcagcactagaagcttggcctgcagggctttttggacttgtatgatccagtttttgttccattacaattgtacctgtatgatctagtactattctgatctgtaaatgtatctatgctgagaatagttcttgcttgctgcattgtgatccagccatccaggatagggttgcatatcacattcatgctactgattattcaatttactttctagcatttaattatttagctgaggtcacatgctgcctgtctgatttttgttagagattcaagttcttatgttgttatcgagtgcctaaatatgtttgcttaaatatttattggtacatattttcattcttttgcaggcctcaatcttgctgtttacaccctttttggctcagtttattatgcaaattaagttcttccctcatgaatttatcactggtatgttggctctcattgtgttccccatttccctgttcctattatattatttattgttgcaatgtagtaactcatgccttcatgttatttatagcttgtttgctttgatattgacaacacatctcacagggttggctatgttttgttgcatgccaacaacattatcaagtggagtcaccttaactcaggtactaacttttcctagatttctattcactaatagcttataatgtgcatattttctcatatagccaggcattcaaatttaatcaagttctatcactgctatgcagcttgttggtggtaacactgctcttgctctcgcaatgacggctatatcaaacttactgggcattatgattgtaagcaaagctttgttgctagtttgtcttctgaaccacttaccagcattacttataactaacaacttataaacacattatcgaactaccgacttaattttgttgattcattgcaacacaatgttttgtttgatgccattaaaagtaatatatattttttagtattgaaaataacattagagaagcaagttatttttctcctgagctgaactgattatgggaggaaaatattattttagataaaaatagaaattatcttgatcagagatggttacttgattgcaatccatcatccctgtagaaccttgaagatatctataacattgcctgggccgtaggctaaaatccagcattgactatgaaacaaattatctttgagacttccaagtagcattgaacctcctaattctggcattaatcttcgtatgtattttcagataatgagcattgagcaatcaacttattgtttttagataataatcaaggatgactttttccctgttttccaaaagccaaaactcctatttctttgtaaaatatgttcatatttatttgtgaccatggaattaggtacctctttctcttgcaaagtacattggtgttggagctggggtgtctttgcccacagagaaactatttaaaagtctggttacaacccttcttatccccattattttaggaaaggtatgttgcttttcttatcttgcaaaagatagctaatatgaatgcataattatgtgcctgtcttctttctggattttata

SEQ ID NO: 20421 - DNA, 5871 bp, Oryza sativa
gaaatccatcacgaagtctgctaatggaaaggttactacacgtataggactgggtcgttactatatcgtgcagggtccggtgtctccgagtcctacttggagaccgtttgacctgcgttataaaagggaccccccgagggaacttaagggatcgaatcttagagcctacacaacgaccatagcctacgaagtcggagactacaggagccaagtcgccgggtgatctagtcgaatcaacttgactacggtctcatcggtaccgccgagttctactactccctttgtaatctgtggttctttccatataatcccatatcaactggattagggctattacccgctaaggggcctgaaccagtataatctttgtctcttgtttccttgatgtcgtattacgtagatcctcgtaccaacgtaccccaataccctctatatccggtctacgggtactcaccgtcgatagtggcgcgccaggtaggggcacttggtgctcaaggttctactactatgacatcgagcttcgtcgacaatagagtcaacaccggccccatccaaggaatccctgcttcaacaatgctggtgtggactcaagtcgatgaaatcgtcttcccggtttacaccacggtgccaatctcggctggtccatcaataaccggaaatgagaacgccgtggctataaacccggacggtcccatgtcgaaggatcctcctgccagggcggagaacgaaacatcaacgtcatacgagcccgagaagattcctagcacagccgagccttgtccttccgacaaggactgcgagccgacgaggacaacttccgaggtcaccaagtcctggtgtcctatccacaagtccaggaagcacaacttgcaagtttgctgggtttttctcaacgtacaagctgaaatctgtgcttgcaaagagcgtggaatcctgcgtacttctctaactcgtgatgtctattgtcctattcacaagacgaagaatcacgacttctcaagctgcaaggtctttctccgcgccatgaagacgacgcttcccaaggtccaacagtcaggaacctctctcgaggagacagacaaggaacaaggagcgacgttgacttcggatcgtttcgttggagtaatcgacatcgatcccccactactagaatagtgaatgtcaacgaccaaaaactaacgacggctgcataatcttggtcgttgatactgctttgggccgatttctggtatccgacgacgctagttttttgtggtcactaatgcgtagtgggctgcggtcgttgttgttatttactcaggttggatgggcaattgcaaatggtcgttattactcagcgacctgtgtcctcagctctccggccactgccgccgccgccgccctcggcttcggccaccgccttcgattcgctccacagctgcaagcctgcagctgctgcccatgctccctataactttgctctttgctgctctttgccacacaaaggaggtagcggaacagcgggaggaagaatccccatcattggcataggaaaagtctatcagatcccctccaatccactgctcccttccaattccgaaatcccctcttttccccaaagatatttcgccccaaatcaatatgaatcaacagtttttgattccaaatccgagatcccctctgctacccccacatatttcgccccaaatcagtataaatcatgaggttgagagatgagaggagtgttgattcaccgccatgtctcgcagccgcagtttatcaccggaggtgacaactaggggctgcatcgaatggcctacatggtctcctcagggctcccaaatgtcaatcctccccaccactgaacatcttaatgccaagctcctccatgagtacatctctccacctgatctgcccagccactctgttatttgttccagttcacttgggactcatcaatcgtcgaaaatagtcacaacaggtattctccaatctcctaatgtaaacatttgcatatgatttgtgaaacatattgaattatgtgctaggttaaatgttaaatcttgccaggttaaagtgttggttgtattgtcctcttcgaaactaataaaagctgcaaagtttgctaggtggatactgattatttctatgctgccctcaacctgaaatgtttgatatggtcctgacaatttatttttgtggtagctatggcactttcattagcattaggctgtgtttagttggatccaaagtttggattttggttgaaattggagatgatgtgactgaaaagttgtgtgtgtatgacatgttgatgtgatggaaaaggactgaagtttggatccaaattttggatctaaacacagccttagtaatagaggaatgtaggcaatttgtttgtttgtaggcaagaacagcaagtgttctagctttattcatagaatgaattcataattatattttataaacagaaacattaggtgtgacttctgtgcaattaacaattatagttacatgtgcattagttcttcctaatttgacatatattcttctcctagactgtttttcatgatggtactactagtttgttgattttaattgtaatttgaaataattatagtatcagcagtgctttacttaaatggtgtacatctcttgttttcacctctgctataatgctagcaatacaagttatttctatttacttaaaattgagttctgcatccagctaactctatacatacttcaattgaagggtctgaagaccatagcttctccttggattcagttgggtccaaagaccatagctactcctttgtttcagttgttgaggacactatgggtgatgctgtcgaggacaagatgtaccaagttgtaaaggaagatgaaccaaaggaattacttagagactccaaggttaatttgatggcaaatgttgttgaagacaccatgaaagagaaagagattaatgaagatgaccatatgggttggtactccttagctttagttgttgaggacaccatggatcagcaagtgggagcagacatcatggaccagcaggttgtagaagactccttggtaacatacaccatggaagagagtgatgaagatgaatacttgaaggcagaatatgaaaagggtgcattaatcttcgctagagatgaggcaaatgccttggaaagaaaagaagctgaagctcgttatgaaaaatcacttgaagagattagagatgaatttttgaaaatttatgtccctttgtattttactctaagaaaaaagtaaattcagttagatagataatatataaattcgatcagcatccagttcatggccagttatttgttagcaaagaataactcatgcatctgtaactctgctatcactttagtatcttcaatgaagactatatattgtcttattgtggggtctgacttgattgatctatgttcactatgtgcattcttgtttcagtttatagtatcattctctgcagcagtaagatagtactttgctggacaatatacagtctgaaagtttcacttcaactggaactttaagttatgctagacaccacagggactgggactctgccaatgatttgtttgttctatcccttttaaactttgtatccattgtacagtgcaatatgatttgttcaacaaagttgtaaagtattcaagtacaggtctagatgaagggtgctcgatttgttcaaggaagttgtacatgatttaagtgcagcctgtacactgctatgtgtatttcaagggtatgctaatgctgtaagcctgtaaatctgtaagcataacatcgaaatatttttgtacatgagctatgctttacagctcagaaaatgcatcttaccttttttttctgctctaaacatgatgtgttcgattttctggtcatccttttatttcagttagtatatgtataaagtagcaatacaataaaataaacatcaaactagcttttcccagttggatattgtgttgtaccttaagttagaaaggtgctggtgctgggttcgagtcccctgaacaaaagtttttctaatgattttactttcttttccatacgtttttttttaaaatacatctactatatgttccaaaatcatgctatgtgaacaagatattttttattaattacaatgttaacaccaaatttagtatagtttatggatttgtcgctatcctgcgtatctttgttcttgggttaagaggtttagacaaccaatccaacactgtcgtctagttataaaagtgtactctttcgtataaggtcataaccgatccaacaccatcgggtgtatattcggcatagttcatcaaggcattaggcgttagaggatcgaccgttcaaactagtaattatagtagaagaaaacaaccattatatttctttcaaaaaagacaataaaatatatgccgtgaaatatattgtactaaaatagtgtatattgtaaatgaattttaaggtaaaagagaacagagaaaatgtattgtccgattatgacaaaaatgagtatagttacaaagtttactccttcgtacaaggtcataaccgatccaacgccatcgggtatatcggcatagttcaagaagccattaggtgttagaggattgactgttccaacaagattattacaatagaagaagacaaccattatatattgcataaaactttgaataaacacaataaaatatattgtactaaaataatatatattgtaaatgaattttgagttaaaaagaacagagaaaatgtgttgtgagattatgaaaaaaatgagtctaaaaaaattattagtacagtttcacatcagggacattaaagaaaataagttgtggctttttaaaaaaatttcagatgcatggaaaaaattatggcgggtgattacataccttttttatttttttttggcgctcaaaggaggagttttaggcatatgtccatgtacatatctcctcctccattcataatagacccaatatcttctcccctctcacatcccctccctcaccagattgagagaaccacagatggagcgctaatcattggtgccgatcggctgatcctctacttctccagtgcggcaccgtgccgcgcggcctcatcgcgctactgatccggtggttcccgtccgagtgcttcttcaatcaaaccctagaaagttctactacaggtcactacttctccctttgcattgaaatcatgtcgtttctaatctggtgcctgtcctctatccttaatcaatccatgatgtttggattctatccttaatcaatctgttgcatgtccgcatttgttagacatttctgaattgttgttttttgaatcaaacatattttatagcgctgggctgtcacttttttttgtgtatgaattatttcatctatagtcaactaaaaacagaatgcagtgcaattaatcatattgccaaataataatttatatgatatctatctagtcttgacattttacctaacagtgtattgtaactcttctttgacattaattatatatacagggttatataaaacttaatatcaactagcaattagaggggatggctccaagcaaggcatggatgggccttgtggatgatcggctaaatcacgagtacttagagggtgtagagaagttcatagattatgcattcagtaaattagatggtgtccaggttatacgttgcccatgcatcaagtgctgcaatacatattctttgcctcgtcacatagtgtcttctcacctgaaagcgtatggaatactgaggagctacacattttggtaccatcatggtgaagtcttagcagaacaagagaatgacatagaagttgatgagtatgattcacaggaatttaatggggaaggatataatggaatgca

SEQ ID NO: 20422 - DNA, 1721 bp, Oryza sativa
gtactttcctataaaacctagattgcagaggttatttatgtgtaggaaaacggccgcatatgctaagtggcacaaagagtgtagggttgatgatggagttatgcgacatcctgctgattcaaaagcatggaaggagtttgataaaatccattcatcatttgcatctgaacctcggaatgtgaggctttgtcttgctagcgataggtttcagccgtttgctaacatgcgaacctcctattccatctggcctgtattccttgttcctcttaatttgcctccttggatgtgcatgaagcaacaaaatgtaatgttgtcaatgctactaccaggacctgatggtcctggggatgcaatcgatgtttatctgcaaccattgatagaggaactgatagaactttgggaagatggagttgacacatatgattcatcaaccaagacaaatttcaagctacgtgcacagctcttctttggacagtgcatgacttccctgcttatggaaatatatcaggccatagcacaaagggaaagttggcatgtccagtttgtcataaagaaacaaattcaatgtggcttaagaaaggtcggaagttttgctacatgggtcatcggcgctttcttcgcagaagccacagatggagaaatgacagaacttcttttgatggtacaaaagagagccgagaaccaccaaaggagttatccggagatgatgtgctcaagcaagtgcaggatttacagggaattatattgtcaaaggatatgagtaagaagacaaaagtatcacgcagtgataggggagataactggaagaaaaggagcattttttttgagttaccatattttaaaactctattgctacgtcataatcttgatgtgatgcatatagaaaaaaatatatgtgatagcattattggaacactaatgaatgtcaaagggaagaccaaggacaatattaatacccgtagtgacttaaaactcatgaacctgaggccagacttgcatccagtagatgatggaggaaaggtggttttgccacctacgccttacacgttatctccagaccaaaaaaaaaagcactgcttagtttttttaaagaattgaaagttcctgatggattttcttcaaatataagtcgttgcgttaatatgaaagagcggaaaatgtcaggattgaagagccatgactgtcatgttattttaaatcgtatactccctcttgctctgcgtggactgctccctgaaaatatttatgaaccacttgtggagctatcccagttctttaagaaattaaattcgaaggcattgtcagttgaacagcttgaagaaatggatgctcaaataccaataattctttgtaagcttgaaaaggaatttccaccatccttctttgatgtcatgatgcatttgcctgttcatttggctagagaagctctaattggtggaccaaccatctatcgatggatgtatttatttgagagacaaattcactgcctaaaatcactagttcagaatatggctcgcccagagggttcaattgctgagggatacattgcagatgagtttatgacattaagctctaggtacttggatgatgtcgagacaaaacacaatcgtccaggaagaatacatgacacatctattggtaacaaatctaatttatcaatcttctcctgtgctggaaggcccattggttctcgtaaaactcgagatcttgatatgcttgaa

SEQ ID NO: 20423 - DNA, 7924 bp, Oryza sativa
agcatagctttgacagtccatgagtggtggaaggcgttagctgctaacacgggtctaccaaagaaaaggtgtttgcatcatcattttacttacaacacgtgaaatctgaaaggggagaaactaaagagtatcccaacataagaaatgtttagcaatagcgcgacgaagatcgaggatgccaaaatctatgccctaccaagtaaaaatgattctttgatcttgtcctcttaaatttatttttttttctcgtacatttctttttgttaattgtgcaggtcagtttacaatggctacatttaatgaaattggcaaactatagaaaccggtttattaaagaaaacattattcaaggtttacaccctaccggatgaataatttactactctctccgtttcagattgtaaaactttctagcatttcttatattcatttagaagttaatgaatctagacacatatacatctatatgaatgtggacaaaagtcttacattgtgaaatgtagcaagtagtatttatcatcctcctaaaatacacaagcccaaattcccaaaatgcacgtggccgtaacaccatttaccacccacgtgctcctacaagaatcgcatggagccatggacctactgtctactggcttggtttcatccagaaccatgggctcttggcagacaacccggccttctcacagtgttttgattggtacacctgggtacgagcccctgtgctgagctgacgatgaactgtttcgcgtgtcgctgtactgggagtattgggtgggtcagtgggtgggtgtgaggaatggacaactggacaggcgatgcggactgaccggtccgtggcccgtgggggcgcgggtgccgcgacatggacgcgtcggtgccctgtttccagtgaccctgtaggaggagaaaaagaagggctcgccgctgcccgctgtaccacgatcgcgtatcgacacatgggcttgcactgcattgcacacacatgatcatccccgtcacctccagcttgtaccggccgtgtatgtggctgccattgccatatcctcatcacatccagctggtgcctgccctgccctgccagaccctttttctgtgccatggaattctgttcgtgaacacaacagtgaatcaccaagatcgagaccgaggcggacgaggccgcgcaggcacaaatgacaagccgcctctgctccaggagagcacggcgccggcgcgcacaggggcaggacacggcgagggcccggcgcgcgggggtcgacacgtccgcgccgcgggggagagcagagggcgtcaaatccgtgtgtgagtgcgcgcgcgccgtagcggcgcttgtctgtcgtctgtctcggcgatcggtcggtctctcgcggcgcgccggcatgcaacgtcttttctacgacctgtggggtttttggtacgcgcgacgcgctatcatcgccatgtgcgggtacatgtgccgcctggactgggaggcgaccggccggcctggccggcacagtgcggtgtacgcttggcataatggaacgtatagtggtagctgccgtctttggctaagctcgtaagagtgctgtttggccacgactctctctttagtttctctgtcacttaatttagttgattttttttaaaactcatatattttgttgattatagatataactaggtacatatcacacatgagttatttacctgtaaatataagtaattttttaaaaaaaaccctcgaagatagtcaaattaacataaactcctaaaattcgctaggaagagcttgtaagaaactagaaaaaaactgtgatgacggtgatccaccaaaagaaacacacgacttgctaggaagtgatcattctcttctttaccacgttgcaagttagatccacgctgatgacggtgacaaagaaacaaaaagtggttgtagatgaaaatgttaggaagcatacccaaaagagacctccgcttggaggttgaggcttatatggcaaaacgatgaaaactcagcttctcccttaagatccaccactggtggcgaaggaggcttgcattcttatggttgcctcacctaagatgaatatgacggccggtggaatctcctaagaagaagcaaacctatcttacttctaagggagcgtccatggtaaagccagagaccattccatggatgaatttgactggaatcaatagaaagccatgggaataaaaaaaagcgatgttgatgaactcttgcactacataaaagcaccaaaagaaaagcgaaaaaatcctactacctaatccccttcccttcgctggcaaccaaagccgttggaatcgatggaggaaaagggtcgggcaaagaggaacgaaggagcccattttagggcccctttgaattggaggaaaaaaatataaattttggaggatttcaatcctatagtaaaatttcaagcctttgaaacaaatgattgaatcatatccaatcctttggaattcctatagaatggacaatcctataaagattttggaggaaatttagcaaaagcttcaacctcttggtaactttcctttgagtctatctctctcatccaattcctgtgttttttctgcggttcaatcaaacggtcattcttgtgtttttcctgtgttttgcaatcatctgttttacacttacattcatgtctaaattctacatttttcctattcctacgctttcttaatcctgcgaatcaaggagcccttagactgtgctttgctagcttgcttctggttggtccaagtcaggtgctctccaggcaacccaccatatataaccggatactctatccgatcataaatatttaatttttatgacaaatataaacttctaaaagtttgaccacttatttctataagcatctaaattgattatttgtgggtcaaccagaaattgtttcttttttatggaaggtgtaaatttataaaatgtaaaaagcctataataatgttacgatagtacttttcaggttaatccatatgttctttttttaaagttctaacggtttaataaaattttattctaaacgtcggcaattgcttatgaacagagggggcatacagttacatgaagatactggttgtcgaaaaagtacacccgagcaggtactttatgtacatcatagctacgtgtacacgtacttgaacttgcggatacccggacatgtacatgtatatatgtaaggccagtagcagtgcaaggcacgcttgacgtgcctccagcccatttaagcaaggattttggcccaaaattcatctctaggttacgcaccccataccacagtgctggtgacccaatcttgtgaccccacgccttaaaaaaatctcgtgaccttcctcatccttatccccacgacgaaggaggcggcgcggtagcctcgagatggcgacgcagcggcccacgcgacggcggcggcggctcggctgacgacggtaacctcggcagttgcctcgtcgtcctccgcggatctggagcagtggtgcggcgtcctcaggctcgtctccggccggcacgacgtccacggctatcttgagcggcgcgacgtcctcggactcgtctccggccagcatggtggcctcggcggcagaggtcctcgaggcggcggcttcctcgaggccgagcggcggcggcggcgtccttggcactccctccgccgacggcagaagcagcagcaacaacaacagcctccctgagcccacgcggcggcggcggctcggccaacgacggcaacctcggcggtggcctcctcctcacttcaagatcgcgttgatctttctcgtcaccgccgtcgcatttctcttcatcccgtcctctagcttctccccttcctcaccggagccggataggattgaggattccagcacgggagcaagatgccgagcgagggaacgacctccacaacgcaaggaacggcagcacgcgccctcgttttcgacgagataacttgtcgcccagatagggggcgagcaaccaaacagagctccatgctctagtgttacgcacgcacaaatccgagctggcgacgcgaggttccgcgccacgtcccgcactgtgagaggcctaagtacattgttgctggctacagtgaatttgatccgaaaggtttgtgtgtcctgataggttgcaggacatccacaattagacgatgacgacatcaaaagcatgatgtttgaaacagagcccattaattctgtcatattttcagtatatgtactaaaagcacagagtcatgaaatttatatattttgccgatttcaaattacatttttggtttcagaattccagtttcaaaatgggaaactgggttccaacttttacttctggatgatttcatttcacccaaaaccgttttatctccattttaagggaccccaaattaaaacctactacgacctcctcctgttttaatagacgacaccattattttgagatatgcatttgatcattcgttttataaaaaatacataattattattttaatatgttgtaacttggtttcagatactttaagcatgacttatattcttacatatttgcagcaaaattttaaaaagacaatgattaaaagatcggacggagtgtttttgttggtttatcggtcgtacaatataatttgggactctaaaatccatgatctagtacacgaagttctggaattgagctctactaatatacaatatacaagcttgtttgaaagtgtgtggacaagacggggacgtaggggtgaactattgacaagaacccagcaaccagctagcggagcccggccacttcggtggtgtttgaatctccttacataaagataaagatgaagattaagttttttaagcaaaacgatgtggtattaacgtatgattgtttgagttttaattattacaaacttgaaaaatagattaatatgatattttagagcaacttttatatataaagttttcgcacgaaacgtaccatttaacagtttgaaaagcgtgccacgaaaatcttaatcttcatctaacttttgttgatgaaaagaacgggccgaatcttcccttttcttgcaggtaaccagctgattttaattttgctacagtttttgtagccatatctagctcttcgtattactcgagagaacaaaaatgtcttcacacattgatacatacagagaatatttgatcaagatctactccccaattcattttttactccatcttcatgatgtccaattattatctactttctccgagttgataatacttatcgttttgaataaggacacgatctctaaaaaaaaaagttttgaccattattttttattataatatgtataaaagtgttaacaaatacatgattttattaatgtattttttaagactaatctatacatatagtcaccatatttgaaagacaaatattttaaaaataatttataatcaaagattctaaagtttgaccttatacctttgtctaaaacgacaagtattatccgctcgaaggaagtatactactcatccacaggaaaaaaaaagagagccaaaccatcgatattaaaacgatcgaaatgacagggaaaaggaggtcaagaatctacgctgcctctgaatgtttccagctccatacatttacacaccagcttaccgttgaagctcacagccgatacgttcggcgagaacaatgccggcctaatcgcccaagattattagatacatgcatcatgcatgcatacatatataaacagatatatatatatccatgtcatgtcaccaaaaagtgagataaagggatacagaaaaagtgacaccgatcggattacaaaaacaagtggcaagaagtagtgatcacaggatcaaacaaagtacactgcaagcaccagcgaattgaatcgaagaacagcagttgaatagtaggtaggcatatatgcaggggggatgctaggactctcctgccatggatggccattgcttcaactagtgtagctagctagagatctctcactgctgctagtcaaccatagcttgcacattgcgattgcgattgctcactcacaatcctatgatcaccttgattaattcacaaatcaactaggataatctgataatgtgcatgcaaacaagcacgaactggtagtctgtaggcctgccctgtagctacgagctagctagctcacacacacgagcaaagctagctagctgcagctaatcacagtgtgccttatttgacagtgaaattaatgtaggggaaataggaaaactaatagaaaatgccagtagaagtagtagtaattaattaagctcgattatattgttttgtccatgcaagatcggtcgtcgcggtgtcagggtcgtcgtcgtcgtcgccgtcgtcggtagccattagcggcggcgagcggcggtctcgcgctgcgcgttgaagtagacggcggcgacggggaggccgaggtcgttgtcctcggcgaactggcgggtgctgaagcggtccctcgacggcggcgggctcaccgcctgccggcgcttctgccggaacagcaccaggatgaacctgtggatgccgatgtttggccgcgggctctcgtagctcaccacctccctccctgcatcaccattgatcacacacaaaattaattatagagagatcagagaaagctataacctagataagacaaataaatattgttttgattaattagtacatattttttttaaaaaaaaaatagttactacattaccagtttaccacaaattaattgaccttgtattgtggctaattgttcactctggatctctctgatcagtcaattctcatcaaggttcaaaactggcaaagactaaagcaggatgtacaggggaaaggcttaccaaaagaggcatcagtagtcccaggaatatcagtaacaatcctgcagcaaggtggtccaatcaaaaggtcacctgattagctacacatactctatagaatgcattgattgaaaattaatctggaaaaacaatgattaacagcatgcatgacagaatctttgcaagcaatcaatcatggcgtgaccagtgaccacctatacaaatttgtctggctatgtaggtgacacttgtacctaataatgtctaatcaacttgaataagaccgagcaatattaacttgtacaggtagtagtataaattaccagtgaagatgctccctcaggtatggatcactaggccctggcacatcagggtcagtcatcacctgaattaagcacacaagtacaaaggatcaattagcacataatggacacatacatattacagtatagatgtgcgatagtctgatgaatccagcagcagatgagacaggcatacgcaccaatgtgaagaaggacctgaggtcgccgccctggacctcgacgcgcggcttgccggcgacggcggaggggaagaactcgtggccgttgaacacctgcttgttggcgccgtaggtggccgtcatcttcaccgtggggttgaagttgtccagcacctcgccgatcaccttccccacaatgagaggctccagcaccctcgacatggccgtatatctatctcaagattatctcacctgaattgattcgatggtcagtggctgaactagtgaactaataactgatgagctgctaagtgtagtatacactcttgtactgctctctcagctctctctctgaatatatgatgtggctaggtgcaggcaattcagttcaggatggtgaagagagcaaggcgcaggggcgatatttatagatgccaagaggcgagaagagcctatctgttcttgtcctgtcctggctggctatattctgatcgtgcaagctgagtgtgatggatcatagattacacatattttcgaataggagagtagtatcggataaaaagctcaggggcatgtctatcacaccagagatcacattagcatgtcaaattgtttaatcct

SEQ ID NO: 20424 - DNA, 43005 bp, Oryza sativa
attcgtgcacgtcaacagaagatgggatcagatttggtatattgtaatttgatttaggaatttagggatagattcctattggaaatagaagttctacttctactcttgagtaagaggtttttatataaatagagcgagaggctatgccttgagggtaagctaagtttgagagattagagagttgataacactttgtattagggtttcatgagaaacttatgagaggagtgttgttattgcactttgtaaaaataaatagatgcataaagttcaatatactttcaagagttttttttatttgggtttgcttgggtccgatagtcaggccgatgacaccactacggttagatcggtggagatggtcggaggaggcgacgcaaaaagcggacaaaccggcgcaagacgatttccatcgaattcgagtgtaacttttaattctgctaaaagtttggtttttggcgttctaaccattcacatttctctgattggtttagttcttgttgttcgacagttaagatcagtttatgtttcagataaggaaagactgcataagagaaaaggatagaattttgtaatgcactcatctgtgatgagacctccctggtggcctagtctccaaccttccttgtggttgtagttcattcttctttagatgtttagctgttttgccatcataagctcatcgatccagtgttttgttttgaagatatatttgtgggagacatattatactgccttaatatgatgttgttgatttttaatatatgattgaccatttacattatttaaaaattagtagataattattatttattctattgtgtttcattattaagatgaactggaaatggcgtttgtttagttggatagagtcagccaatgggaacccctgtatcctcaagtcttctcccttagcaaccgcgcttaataggcggagttaaaaaagataaaatgcatgaaccctaaaactatatgtatacataaaagtatatttaataataaatcaaatgatagaaaaagaattaacaattacttaaattttttgaataagacgaacggtcaaacatttttaaaaaaagtcaactgcgtcaaatattttgggatggagggagtagttgaaacttcgtggcatctaacgttaacgcattaccacgagatatatggacaaatatatattaaatgttgtagatatgatgaatggattagaattcaaatattataaaaatgatataagaatgatgatttagcatgtctgtacgttgagctttagaatgtaataaaatgtagatataattactatgcttttttgttgacctttaaataatcgagtgtttattggattaatgtggcatgttcgtatgttaggctttacggtgtactaataattattatactcgatgtttgtatgtttagttttagtgctttgtgagttgtaactatataaaagaagtatgaatatattaccatgttcccttttcctttgttccggggcaacgctccggtgttctctacttttagtattatactaccagtagaattaaacttaaccgtttattttaaagggtagattagtaatctagtaatggtaatttcggtaggggctgatttatctgtattggtcggacgcaggcatcacatcaggtccgaccgtccgacgcaggcaccacatctcgcccaatgcacgaccactgattgcgactcctcaagtagcccctttaggatccacagaaacgtgagaacaagaacgccgcattgaccgagaacttaacctgcacaagcataaactaaacacatcaagaccagatcacacacaacacaaacaaggatccgctcatttcgaacaaagatgaaacagggagcaaacagaaggttgaacggacccgctcagcagggacggaaagcggcagcatggacctggcggcgcggcgcgcgcgacgggagaccttcctgaacaccgagtgcaggaaccggaccaggaggtccaggctgcggtcctcgtctccgtcgtcgtcctcctcctcccctgtgtcatcgttgtcctctttgctgccgttccagtaggacgcggcggcgcccgagagcgcgagagggcgagaggttcccgaccgtctgagtttgagagtgaaaatgacaaaaatacctctccgcatatatttttttttgacaaaaatatccctccacaattctactatcatcaagtgtggtagtagtagaaatatatttaaaccgttcgatcaaatacgatcaatgattcagattattctctactacaagtagagagcaccagagtaggactctttgttccgtgctataaagatcttcacaagggttatggtttggtgatcaaacccaaattgtagagtacatcggacgattggttaacacaataacatgtctaggacgatatatttttcttgtgttttgtctgaccagtcatagctcgtgtggtataccaagatgggatctaatagtcatagctaggactgtcaaaaaagctcgaggctcgcgagcagctcgagcttggctcatcctaggctcgattcgagctcggctcgagctttaaacgagccgaacccgagcctgagcaaaagctcgcgagctttaccgagccgagctcgagcttctaccgagcctggccgagcttgactatgtatagtttatattgcatgttcaccttattaatataataaactaatagataaatatgtatattagtatctatttacacaataaattaccatgtgttagcgcaatatatttattttaatcattttctactcttttattagtgtgattaactagaaaataactatacttatcaaaagattatcattaaaatatatattatactatttatggccgagctcgaacgagcttgcctaaaagctcgaagatgagataggctcggctcgagctcggctcgagcttgtgtcgagctcgagcttgtgtagacgagctcgctcgagctcggctcgttgatagccctagtcatagcccgtgtggtatatcaagacggaatctcagatctggcgaacgtagcttactttttttttcttctcttatatttttctcccgcttaatcagtttttcttatacacctatttttgtacggttcttttatacattagattagcatgggaaatgaatgggaatgattcagcttttaagatagtggtggtcagtttttattggtacaccggttacgtagaattgcgtagaattggggtgagaaggaaagtaggattaaggcccttctaggtttataaccatcttatgagtcaaaaagctaggtctaaacaaataagttttttttgtcttttttaaagctataaaagccacttttacaccgttaagtcaaaagttaggttagataagttttatttggcttatttgaaaatgaaggtatgactctaccattagacttaatgctttaaagccatcggctttaatacatataaaccaaaaatttagcttaaaatctaaggcaacaaatctaagcccaaataaagagcccataagacagtagaaaaatatattcggttaggaataagttcatccaaggtcccttaatttgtcaacgaattcgattttcatcatttaaccacaaaaccagatacaacgggtccctcaactatcaaaaccggtgcaatataagtgccatggcggtttggagggtggttttagcttacgtggcgcctacgtggctaaattgacccggtcttcatctgacgtggcatagatatggcattgacatggcaatttgatttggaaattaataaaaagagtgaccccacatgttagctacaccaaaagaattaattaaaaatagtggggtccacgttggctccacttttcattcactcccctcatcttcttcctcctctctctccccatctcccctctcctctctccaggagccggcggttcagcgacgcggctggccggtgacggcggagccagggatgacctcggagacgaggacaccagggagctgcgcctgtacggggacgctgacggtgattgttgttactggactcacgcctccgtcgcatggcttcgcttcgcttgcctcctgccatgtttttaccatgccttcttcgtcagtgagatcctctctatatgtgccgttcctttgtagtgatctcgtcagagttggtgttgttgttgttgagctcaccgtggtaggagctgagagggggagagggagagatggggcggccgccgtgctgcgacaaggcaaacgtgaagaaggggccatggacggcggaggaggacgcacgccaagctgctagcgtacacctccacccatggcaccggaaactggacctccgttcctcagcgagcaggtcgtgaaaatcaacgatatcgccattgttgctaatgggatcgagcttgaggtgcatttgatcatatcagatcagatcaaaatatggtgtttttgtttatctcttcttttgctctttcggtgatgcggcgtcaagggaggttcggcggccagcgacgccgcggcgaccccccgtccgacctcctcgccagcgtcgagtcggtcgcctccgccacctcccgcagcatccacgtctccaagttctccgtcggcttccccgacgacgacccggactccgacttctcgcccgacgacccagacctcctgcgcaaccgccccgtccccgaccggctactcgtcgtctccgccggtgtcgccgccaacctcctcttcgccttcctcatcgtctacacccaggcgctcatcgtcggcgtccctgtccaggcgcagctccccggcatcctcgtctccgaggtcatccctggctccgccgccgccggccggccgcgttgccgaaccgccggatgctggagagaggagagaggagatggggagagagaggaggaagaagatgaggggagtgaatgacaagtggagcccacgtgggccccactatttttaattaattcttttggtgtagctgatatgtggggtcactctttttattaattttcaaatcaaattgccacgtcaatgccatatctatgccacgtcagataaagaatgggtcaattttgccacgtaggcaccacataagccaaaaccgccttccaaaccgccatgggacctatattgcactgattttgatagttgagggacccgttgtatctggttttatggttgaaggatgaaaatcggattcgttgacaagttaagggaccttgtatgaacttattcctattcggttatgtgccccttttctcatgggctgttaagtgttaacttgcaagaaccaatcctatctttcgagttgggccttatgcattagagtggacttcactgggcttttgtaagacccacccaacctttagccatccaaccaatgaacttgtagaatgtttttttttaacgaaccgacacaagacagtgtcaatttcattgaatagagcatgaggaaaaaactttacagcttatacggaaattcccgcgcttgcattgttcttcttcttttggtattcagtggtgtgctctatgaacttgtagaatgtgatggactgatggtgatatttgctgaaagtcatgtatattcttgaatgatcgcatccaagcttgtttagtcagtaggacattgaacgattccctcatggttgttcaagtttgaagcttaaattctacggcccaaattcgaagtagtaatttctccttttcgcagcctactacaactactactctatgatgactttcagcaggcagcatgtggactggaaagaaatgttcttcagaatctagaagcaaaggctcaggttcagacagtcgccaacatcagtcttcaaagttgatttgatgcgacgccattagtccaaggttaactttgcaagggtcatgtcactatgagaaagaacattaatttagagagagagagggagagagatagaaagaacaatggcaaagcttaagggcccctttgaatcgcaggattgagaaaacgtaggaataggaaaaacgtaggattttgataagaatgtaagtgtaaaacaaaggattgcaaaacacaggaaaaatacaggaatgactgtttgattgaaccacaggaaaaacacaggaattggataagagagatagactcaaaggaaagttagcaagaggttaaagctcttgctaaatttcctccaaaatctctataggattgtccattccataggaatttcaaaggattggataggattcaatcctttgtttcaaagggcttcataggaaattttcctataggattgaaaacctctaaaattcctatgtttttcctccaaatcaaaggggccctaagttctagaaacaacagaaaactatgacggtccgtattcatcttatgctaatgtaaacacaaaggatccaggatcacagaaagtgatgtaagtatggttagggattgctagccttgactagtacgcagatgtgacaatattaggtctgagtttttcaccggtggcatggcattcagcacaatgtaaacttttcaacacttgtagttgttggtttcgccctgaactccaagaagtatgcaacatggttcagaactcttgaacaggtctaagttgttgtagattcgtagccttgaacagggaaaagaagaggagcagttcaatacattaatctgttttgtgaaaatgacaggatatccaaatattcgtagttagaaggcagaataatacaagggaaaaaatcaagtctttttttttcataaaagaacccacccacatggccacatctaacagacagacaccaacagcaatctaggatctggaggggtgttttctagacaatggagcaaataatctaggacttgaagggatgttccctttaagatattgagattaaaaaaaatcatggaccagttcagtactctattgcatttggtccattcgaggcacgagaaaatatagcgcatatttctgattccgtcatgtgtttcaaattaacctgtctgtcatttgcatcaggtaaacaaaattgcagacaatctttttcacttgtcagttgtcacacacacacacacacacagcgcactgctagataggatcataagatataacttatccccagtgactccagagtctagaagcaacaaaaaaaaaggaataagaaaacgctatagaagtcgatcacagcaaatgttcttcattttcatacgtaactgacatgctagtccagctatacttgacaaagtcatatgtcacagagtctaatagtctacgcccctcttgtgttaatttgcacttgttgaccttctgttctctcctaaaccatatatatcaagaaagtaatcggcacttctcaattaatttctttagagcatagtatgatctcactggctacttatttatgtaagtaaatagccgatcagatcagtgagcatccatgatcaatccaatggtgcacttgctatatttcctgtaagctgactttgattttgttgtcatttctccattcagagaacagaatctccatattacacactggtgcttgaagttggaagaactaaccttaaatgttgagtcaatgttagagaaagatctccactctgtttcttggacagctgatagaagatcaccgatgatagcgaatggcagaaaaaaaaatctttcaaatgccgtcatatacaaagaacttgggttttcctttccctattcccatgctgcattaattgatttttcatgtacagtgtgtactctcaggaaatatacaatattgtctcattcatgacaatgacataaatagttcaatatttcaatgtgctacaggagggcgttttgcattactctactactagtatcaacctatcatcattcggaaattcagacagactatgtggttttgttttttcccactctgataaaacatttcgtcatttttttagcattactggacgccaaccgccgttgtgtcaacatgggagtttttttttttctatggttgatgcgagattgtgccttttagggatttctttctgtgaagaccctatgtttccaaacaaaaccttagaaaatatgatccctctatcgttgaatggcaccttggacattcgagatggtcacgcatcatcaggccatccagtagaagagttcatcattgcatgccttgtgagctccacaatggtcgttgaccgtgttaagtgaaccgtcttgtgtagattaaactcttggcaaggcaatccattaaccaaaaccaaaaaaaactcctgggagtctagctaatgatcaactgatcaagttggcactgtacgtatacttggtactacctctgtcccataataattgtatttttaatattcgaatttatcccaaaataattgtcacaatatagtactaatggtctcattaatcacttctcattcaaaattatctctattttacccttaaccacccttccacttttacatatacaccatttaataaggggcatcatagtttttcttttcaaaccttaatatatgctaaacaatctagaattacaattattttagaattgcaatgaaagtaattgtgaattcataatccgaacaaaggccttttagcaggttcagtgcaaaagctggatgtactttcattgctcaatgaattatccattacctaaaaagaaccagcctttttaattatgttaattaatgaaaagagcgtttggcaagtggacagaaaacataaagtttattgggcaatattggtgcttactagcatggttatgttgagttgttaagaactcaccaaagagaatgaacatagacacattgcgcacagtttgtcaaccaacatgtcgcttgcacgagaacaactcactagtgcatacagtggacaaaggcacctattaatggtaagagctcgtaagttgactacttgcaactatttgaaaattgatgacactgtgtatctataatgtggaggctcatcccatcacccttatcttaaaaatcaatatgagatcaggacagtggcggctaagaaaaccattattatttattcacataataaagaggttgcctacgcgatatttccgttgttgcaagaaacacgatcttcggctacgttctccatcacatctgtctttggtgccatcacctcgacgattttgcaccagccatcgtattcgagtgacgcccacatctatataagaaaataaaaatataaatcacatgggtgtcgagaaaaattaaaaataacaaaaaagtgaccatgcacatgctcataagggccacgcaccagcgacctgtccaaccaagacccggcttgttgcgatgcgagctgcgacgcccgcttgcgcccagagctagctcgatcaacgcatgcatctcaccgatcgaatcgatcggtttctttcacggcctttgacccgtcacacgcggggtcgattcggtgatttcgatcccgtccgctgcacgcagtcccgctctcccacccgaaagcccgcgccgtgccgcctgcgctaactagctttgctacctgctgcgttccaacttttcttggacccactcgaccccggccgatcctgcggtcgagcccttcaaccacgcagcgcacgcacgcacgcatgctgctcgatctgctctgccccggacgaggcgggcggccaatgcgcccgcgtcagacgctcggggttctgtgcgtgccgtgtcgtgtgctcgtgtttgtgctctcgtgtcgtgtttcgtgtgtgccgtgcagcgacctgcgcttagggtacccacaatggttatctataagctctctataagagattcatgtcagtatattttcctacttggaagatattaaatgaatagatagagcaaagctatctactaacttagagatagtctatagagaaaaacgaggcaatacatgagagagctatagatacccacgtagacatactattgaggtggtttactattaatctagtctattgctgagatgtacatgttttatagataacaccttactttaccattgcgggtgctcttatatgctgtggacgtcgtctcgttctcctgggctcgccctttctgtccccgtccgttctagattttactgcctccgttcttaaatataagagattttagttggatatggcatattctaatacaacgaatgtggatataatcaaaatctcttatatttaaggatggagggagtagtactccaaagggacgatacatacctccaactttacttggacgtggacccgacccgatcctgaaattaaatttgaaaaatatactgttgattctttttttcttagaaatattcgtgatgcaaactttttagcagaaatataccgtcgatctcgcacaatcgttgtgcgaaagtgacgagagcgtgaggacgcatgcggtatcacgagatggaagaactagagcgaacggctcacataagaaatcagcgagaccgcatgtcttgtccatcagtattgcttattaacaattttcaacagtcgctatcgctcattgagtgagcgagattgctcggtctcgcggtttggccgtgcgagaccgcgtggtctgacgccgccaccacgcacgtcctcgatttcgcagttcagtgccgcagtttcatcgtgcgagaccgtgcggtttcgcgctatcaccgtgcgacaccgtgcggtctcacgctgtcattgtgcgagaccgttcgcgtcgtcactttcgcggaacggttgtataagatcgatggtatatttctgctaataaatttacatcccaaatatttatgaaaaaaaaacgaatcgaacattatattttcaaatttaattccccgatcctgcgggttcgagcccttcaaccacgcatctgcggccgcacgaggcgggcgtccaatgagccgtgctgtgtcgtgtcgtgcactcgtgcgtatgccgtcttatctcctgcatatgccgtggcctgatctggacgccgtctcctggctcctgcaggttcctcctcacccttcctgtgtctcctgcctccgtccgttgtagtagtaaaaaagggatagtactcgtaactcgcgaaggcgataggagggtgcgcatgcgcggctggtggcgagccgagccggcacccggcagatcgggcgcgcctcacgtctatatagacactcacgggggccgcgtcgtctccatgccctcaccctcgcgcactcccattcccatcctccacatcccgcgccatcgacctcctctccccgggaccgcgtcgctcgcgcgttgcctccacctccagtagcaagtatcaatggcggactccggcaagaagcgggacgggtcggccaacggcgccgagaagaaggcgtcgccgacgccgaagccgccgtcctcctccacatccggttcgtcgttcgttcgtcctctcccctccctccttctaggaacacgcgtgctgcggcctgcgtgcgtccatcgcctttttgctttgttaatttctcgtgttcaacgcagcgtttgtttcgtagtacgtcgtcgtagcctgttcgtgatttgccaccgctccctgtttttacaattttgctgtataatcagctcggttgcggtctcgatctcaagattgacactatctcacataaattaattatgatatgaccgcgtcattgtttaagatcggccaacgggccgcgagcccgcgagaggtcgcgcgctcttgtctgcatgcatgtcgattgtcggggtactcaatgctgtgaccccaatgctttcggcgttaaccatctgtccttttcgttcatcccgaagctaatttatacgcctccatccacgtttcttctgtcctcgaatagttggagtttgcgtgtaggtcttgtgatttttgggtggcttcatgaacaaggtaaaaaggcctttccatcaaaaaggtaggtagtagtagtaaaaagaaaaagaaaaaccgaaataacaggtgcagattgacccggtgggccgggcggctcataaaaattaacgcttctgacttgatcacataaatatcaacagttccgaacaggtgacacgcaactgtacacaccttgatgatcgatagggcctacggcattcacgcacgcaagtactactcctatctacttatctaaagctggctgtttagcccgaatttgattgggccacgtggcttcaatcagtttgcaataaatctatgatttcctgagaaaaaaatataagaaattttttaagagaagaatctggagccatgaggaagaaaaatcgcaggctcccagcatgaggaagaaaaatcgcatgctttaagtacattgcctccacacgcatgagcgaatgatgttgggtcttccttggcagctgggctacaccttgcctgggccagcgggttgagaagatgagttacccaacatcaaatatacttaaagcattacttatgatttatatttttttatatttgtataatgcttttaataagaggaatggtaaatatatgtatatgtgcgtcaaatattaagaatcggagtgagtattttgcaaatattgcactactccaaatgtggtggtgcaagtgtaacgactttacgtgcatatgttccttgcaatattcaaacactgcttgcaacaaaattaatcagccgaaacaagattatcatgttttcaagcccattttaattatcacctccgtagggactagagataaactagctcattacttcaaatcataatagtattgtcaagacaattatcacatacttggggatgggcgtgttggtcttgtggcaaatggacatagtactggccacttggaaacgataagaaaactgtcacatcaacgtgatttttgttgcaatgtcgttgtgaacatatacttgtctgtattttgaggtaatgccaagttatatatagttgttcatcgaataatagaagagggatgtatttgatttatatagttgtatgcatttaaatctccaaagaatggcatattaatgttataaaatatgtacgtatatttgcaaacgttaaaatttccacatatttttgattaatcatctgtattatggttaatcgttggacaatgccttttccgtcccatgattgtattctgctattctgtcttccagaacgcacccacgtccaactgagtatatcaaagcagtgtgaagtgtgaactgctcctaattcttacaatagtttataactgcatgacttttcaacacatcttagtgtcatgttgtaatgaattgaccattgataaggatatatttatataaatgccgacatgcgacacttgaacctcgcaaagtcaacgtagtatcttatatgacacctttaggattataattacatcatactccgtgctactccctccgtttaatattataaatagtttgactaaatttatagtagaatttagtaatatctaaaatatcaattagtttcattagatctaaccgtggatatatttattttgtgttgaaaataatataatattttcctataaatttagtcaaacttaaacaagtttgactataaaaaaaatcaaacgacttataatatgaaacgaatggagtagataatagtagtatatcagtacgtagcaaggtttatagtagaaccggtggtaaccggccaattaacgactggtctgccagaataaatcggccaaataaccaaattggaataatttaaatccaaatgattttaatttttttataataataaatttgatagattcatcaatattttcaacataccgatgtgctttttttaaaaaaaatatatattgatgtgcctcttttcctggcaggtttctccaagaatgtccccctcctcgtgtttgtgttattgctggggctgctgtaccggcagcttcagcctccggttccgaaaatctgtggaactccgggaggccctccggtgaccgggccaagattgcagctcaaggatgggaggcacctggcctaccacgagtacggcgtccctaaggatcaggccaagcacaagatcatcttcgtccatggcttcgactcctgcagatacgacgccctccaagtgtcacctgtaagtcgcgatcgatcgattactgaacacacagtaatctgaaaatgctgagcccctgggttactgaacggaagctgaatgtgtataacaggagctcgcagaagagctgggtgtctacatggtctcgttcgatcgtcctgggtatggagagagcgacccacaccccggtagaacggaggacagcattgcgttcgacatcgaagggctcgccgacgggctgcagctcggccccaagttctacctcatcggctactccatgggcggggaaatcatgtggagctgcctcaaaaacatccctcacaggtatgtatacagtgtacattatatacaccaactgccgctttctgaacattgttgcagggaaaattaaccaaaagtgaaatttgtcctgtacgtgcgcgtgcaggctcgcgggggtgtcaatcctggggccggtggggaactactggtggtcgggttacccgtcgaacgtgtcgacggaggcgtggtacgtgcagctcccgcaggaccagtgggccgtccgcgtggcgcaccacgccccctggctcgcctactggtggaacacccagaagctcttcccggcctccagcgtcatctccttcaaccccgccatcctctcccgggaagacttgaccgtcatccccaagttcgcctaccgcacctacgccgtaagcaaacatgatcgatccatagtactcctacttttttatgcgtgaaaatggatggacgatatgtgctgaataattaaattgcatgggggacggatgagatggttgcaggggcaggtgaggcagcagggggagcacgagagcctgcaccgggacatgctggtggggttcgggaagtgggggtggagcccgctggagatggagaacccgttcccggcgggcgaggcggcggtgcacctgtggcacggcgcggaggacctcatcgtgcccgtgcagctgtcgcggcacatcgcgcagcggctgccgtgggtgcggtaccacgagctgcccacggcgggccacctgttccccatcaccgaagggatgccggacctcatcgtcaggtcgatgctgctcaccgacgagtgagatcaccgaccgaccgaccgagacgcgcatctctctgttttttttggtttttggaattttgggtactgtcacgtaccgacgtacggtggtacgcgtagttgcttgctcctattatcctatcctatatagagaaatgacaataatattttgcggagtcattttgcctcgtttcatctaccacatttcttcgtgactactactgggtctctcaattatctgagccggaacgtgattatggagagcgttggggcccatgtcagttgggccgtaaacgggcctcggcttacgtgcagccccaatattgggccttacggatgtgggctgagagtagttctagttgggctaggtggttgaggggacactgggtgacacacaccaccacagggaataagttcactttgggtccctctacttatcgcccagtccgattttcgtccttggccacaaaaccgggtatgacccatcccccaacttacgaaaaccgggcaaacatgatccctcggcggttttgaaggcggttttggctgacgcgtcgcatacgtggcttctttgactaggtctccatcccacatggcattgacgtggcgcttacgtggcaactatatctcgaaaaaataataaaaagcgtggccccacatgtcagctgcaaaaaattaattttaaaatggtggggcccatgtggaccccacatgtcagcctcactcttctcttcttccctctcccttctctctcttcttcccttcccccctctcactctccttcccgggcagaggacggcgcgggtgggcggcggagcaggcgagctccgacagcggcggcggccatggtcggcgccggcccccgaccggagcgccgccggtccgcgtgaaggcgagcagcgcggcggcgccctggaagacgccatcgacgccgccatccgtgccgccgccgccgaccacccggacgccctccgcgcgcaccgggacgacatcaccgagcgcctctacaccgcgctcgtcgtcctcccgccgccgctccacaagccgcctacgccgtctctcccctccctcatctctcgccgctgacgccgcgccgcgccgctccctcttctcccgccagcggccatcggggagaagggcggcggacggctaggcgagcggcgcgagagatggccgccgccgccccacaccgccatgaggctagcagccgacgccgcaatcctcctccccccgctccaagaaacgctcctcctcctcccacaggccgcgctccctcgcgctggccgtccttgccaccgacgcctcggcgaggaggggaggaggcggaggggagcgcggtcaacgatgacggatggccccatccattgcgccgcccttgccgccaacgccaccgacggctcgcttgctcgcatgcggggaggaagaggaggcgaaaaggccgacggtgagcacgcggggagagggaggaggcggcgcgggagcacgccggggcttcgagtctgccaagtccacctccgcggccggcgggaggaccaaagagtagcggcggctcgccggccgccaccgctccactcccacctacggcccctttgctccgcccaccacccgccgcccctctgcccgccgtccttccgcccaccgcccaccacccgccactcgccgtcgctccacccgtcaccccctctgcgccggcaacgccgccgctcgcccttctgcttgccatgtaggggagagagagaggggggcatagagagaagagggaggctgacatgtgggaccacatgcgtcccacctttttttaatttttttacctgacatgtgggtcccactgttttttattattttctcgggatcaaatgccatgtaaacgccacgtcaatgccacgtgggtcgacgacctagtcaaatggagccacgtcatctaaaactggacacagtactgccgagggacctcttttgcacggttttgtaagttgggggatccgttgtatctggttttgcgaccaagagacgaaaatcgtactgggcgacgaatagagggacccggagtgaacttattccccaccacagcatcgatctgtacaaatgcgtcgatatcgatgtccatcattttgcttcctggcctcctgaacagtacacatcatcgacatgtttgattgcctctctaaacgattctgtacattcagcacgaaacaccatttcaggaaaaaacaaacaaacaaaactgagcatattttgaagttgagttaccctctcgattgttccattcatctgtgcctccttatacatctctaccaaccttacacctcaaatcattaccaggctataatcaccatttcccaaccaccgccacaaatgatacagtactgtattaaccaaatgaaatgaaaagaaataacccattaattatcactaacggggagtaacctaatcatgcccacgaccgacggccatggccggtcaagcacaagcggctagctaatcctccatctccgccttcttgggcgggccgaacctcttctccagccgccggagctccgccggagtgagcccgaacgccctctcgaggacggcctccctgatgccggacccgaacaccgtcgccgggatgcggacgatgccggggttctcgctgttgaaggcgccgtagaccgtggccggcgtgtcgccgacgttgagctggaagtgcaccatggcgcgcgggaacaccatcacctccccctgctcgagcaccttggcgaagaggcggccgccggagtcgacgaacccggcgtacacgcggccggcgaggacgagcgccgtctcggtggcgcgcgggtggtagtgcggcgggttgacgccgccggccgccgagaggtcggcgcgggcgaaggacatccccagggtgtgcaggcccgggaactgcgccggggtgacggacacgccggcgaaccccgtctccggcgagaagttccccgcggcgcgcacgccggagaaggcgaagtcgcccgccgtcaggttggcggggctcctgcacgggtaggccgggagcatggcgagctccaccggccgcccacgcccggcgtccggcacgcagaagtcctgcaccgcgtcgggatcgccccttgccgccatcgccggcagcagcacggcgagcaagaggaggagacaacgacgacgatgcgccatcgattctacgctcgttctgtcactcgttcgtcggtggacagctgcttgctttgcacgtagtagtacatatgtagtcgagcactgatgtcttgtaaggtgagttgatcattgccagtaatcatgcaggtattgatccgtaggttattcttgtattttgtcatgcacgagcagttgtaaagcgtcgatcggccgctttcccggaagtgcagagatggttagaaaagttctcttttttttcttcatgcggaaaagaataggaaaagtgaagggatagaaatatatgtacatatcaatctatagaaaaaaaattagaggtttgagtggatttttttttctctatgcaacttgtaggaaagaaaatattgttttggctttctcatactttattttaacaaatcgaataactcatatagaaattaatcctgagaaatccaaattctttacttttcctctaagaccctatttagttcccaaaacaaaaattttcgtgccgtcatatcgaatgtttgaatacatgtatggagtattaaatgtaggaaaaaaaaccaattacacagattacgtgtaaattgtgagacgaatcgtttaagcctaattatgccataatttgacaatatagtgctacagtaaacatttgctaatgatggattaattagacttaataaattcgtcttgtagttttctgacggaatctgtaatttgttttgttattagactacatttaatactccaaatatatatctgtatatccgatatgataactaaaattaaaaattttctccaactacaccaggctaaatcgaacatgcccctagttctggaagtgtattgaagaagcagggagggaggctctgaagaatggtggcttctgtggattttcaagtggacgctgcacacttgcacagtgcggactgcggaggaccacatgggctggcattattgaccggaagagtcgttcaggtcgtcgtcaatcgtgcgtgcgtgcattgaacctgtagataaggcttccaagaaactcaggaccagggaggagtcataggatccagcatagttggccaatagttcccacgactggttaaaacagaataatctgggaatgatcatgaataataccaataaccggtttggcactcggctttcagttcagtagcttgtgtttatacatagaatgcacatcttttctcaacagtcgactaccgatgaaaatctttcttataacatttgttccctctatcttaattgaagtgctccgagcaacgcatgttgcacggcatatctatcgtaggcatgaccagttgtgacctgtatgtacgtgcgcacatcgatcgccttttgagatcatatatgtgtatgaatcatctgggcagatataatgatgctttcgtggcgtagcaggctgtccatggccgcctccaaccggccgggagcgcgccgccgccggatatagaaagggataataatcccttgccgctgacgcaacttaatcgcactcctgcatcattgcatcttcggccagcgcagcccctccttcacagaaataatgcgttggaatatcatagcacagaaaagttataagcagagagctccattagcaaactggagtataatattagacaggtgatgtctaatctttgtattaggttgctacattcatccaactgttattcacgaaaagatatttcatgaattttataggatttctgttggatttagtctcatttcaagaaaaaaaaacatttctttccattccaaatgaggccaatctgaatcctatggagttcttttcagttgatttcccttaaattttatttttgtaggagttcgaccaacaagtttgtctcatgatctgtctaacggtattttgggcctcaatttcgtgggcttctggcccacgatagcacatcaaacaatggccatcttccaagttgcaaaccttctgttaggcccctttaaatcgcaggaacgaaaaaacggagaaatatgaaaaatataggattctgacaggaatgaaggtgtaaaacagaggattgcaaaacatagaaaaaacataggaataaccgtttgattggaccacaagaaaaacataggaatttgaggagagataaagaatcaaaagatttcttccacgagattctacctctggttaaaatttctccaaaacttgtatgggaaaaggcattctatagaaattttataggattccatagggttcattcctttgattcaaagggctttataggaaaaattcctatagaaataaaatcctgtaaaattcttataaattttctttgaatcaaagggggcttactgtttttttttcgtttcaggttctaccggaggttacttcagtgctgccgtgcctggaactgaactatccaatgctatcgaagaacagaagattgaaagtgacttgtataaatggcggattgcatgatgcaaatagaactgggttttttttttctggtggttgaattgctagcttgcattcctttcgaaatctcttgagagatcatactttattagtcctatttaaattcaatgcttttgttggaacgcgggtgtacctttcaagttcctgttgttccatttggagggtccggccgaacaaatggctgacagcataccgtccatttctaagatttttaatgaactaaaaactgaactacaattgcagatcccttagcacacaaattacgagtttgccctgagtaaccaacgatctgtgatcacagaagatgcatatattggcctttaattaatctcttcttaaaatatacttcctgcttaggtcacttacagggttcacagaactgatgtaattttatgaaactgctaggtctcgatttgtgaaaaccggtcggtattagctggtttctgtacggtgttgactaaaatcatcggtttttacccgttttcggtcggatttcggtaaagctgtgaggagtggtttctacttcgaaattgaaagggtaaaccctggtcacttcatttatttatttttttttgcttacacgcttgacctatttctatgagcaacgagtacatcttgttttttttctaataatggaattcatgtcgacctttgctttcaaaaaactacaaccaattatgcaaagattataggttgaaaaaaaagaaaattacaaaaccacaacttgattaaaaaataagataactacttagattaccaacctaaagatcaagatgaaaccattggcttatatgttatacgtagtccttatcttcatcacatcgagaaacaaattctccaaaaatatcagtcgatcattaccgatcgaaatcagcatcgccgccgacgaaaccataacggaagataaagtcggagagtaactaaggctgtgtttaaatctaggggtgtaaagttttggcttgtcacatcggatatacagacacacatttgaagtattaaacgtagtctaataacaaagcaaattacagaatccgcttgtaaaccgcgagacgaatttattaagcctaattaatccgtcattagcaaaagtttaatgtagcaccacattgtcaaatcatggcgcaattaggcttaaaagattcgtctcgtaatttacacgcaatatgtgtaattagttattttttcgtctatatttaatactccatgcatatgtccaaacattcgaagtgacagggtgtaaaattttgctaggggatctaaagagggcctaagatgtaaaacaacctttcgcccaaatcttagcatcactctaactatcgaaattggcactaggtgcaccaacaaggacctccaatgctacgccttcaagaaagtcacgatattcatgatatcaccattgttgttccggacatttgaaactagggtttcacctaaagtgtccactcgaaagcaagaaggtgaggcaagatattgcgacatcgcctctaggaaagtatgtggccccacaagcatcaccaatgtcaggtgtgcgtgcctcccccatgtcaccacctcagcctcgcgctgtctccacctccactacaccaccggcttgacccacaaccaccgccaacccccaactagatccagctagccctccaactagagggcaactggcaagcatggactagagggcagctgccactaggatcaatgagtgcacttaccccatctctgccattcttgccatcacgcgacaacagatacctgatgatgacatcctccactattacccgccagcaaagacgcaaaagtcgggcggcgaccatgtgagcctctgaataatcccaccttgcttagcttgggaggaggaagccaccttaaaagggagagccacccttcctctattggactagtcttttagagagattgggcctttccccgagtgggtgtgcctatgaactgttggagtccgggcaaccttaagttattgggcctcgaccaactccacctgggccggattgttatcatttggtatcagagttgggcccttgttaagggggtgggaatgatgaggacatcctccactattacccgctagcaaagacgcaaaagtcaggcggcggcgaccgtgtgagcctctgaataatcccaccttgcttagcttgggaggaggaagccaccttaaaaggaagagccacccttcccctattgtactagtcttttagggagattaggcctttccccgagtgggtgtgcctatgaactgttagggtccagacaaccttaagttattgggtctcggccaaccccacctgggcctaattgttatcaataccatacatccagcagcaaggaggtgataccaccactactggagaaaggggctttagtcccggttgggaaccccacctatagtcccggttatgcaaccgagactacgaatccgggactaagtcctgggagaaaggggctttagtcccggttgggaaccccacctatagtcccggttatgcaaccgagactacgaatccgggactaagtcctgggtgaaataactgggagtaaaaatccggttgggaaccccacctatagtcctagttatgcaaccgagactacgaatccgggactaagtcccgggtgaaataaccaagagtaaaaatccattttccaaccgggactaaagatggagctaggccaggtccggttgctctttttttttcttttttcattgtttttaacatcgaatattgattttactccatcgccaaatcatacctaagaaatcccgaatcctcaaatcgatcatctccaaatacatcccaaatcatcacagatcaaaaggatcatcttcaaatcctcaaatagatcatctccaaatacatcacaaattcttaaaaaaaatacatcacaagttctaaaaaattcatcacaaatacatcacatattcacatcacacaaatcaaatacatcacaggatcatgcaataaatcacaagttctcaaaaaaaaatgccagcaggggcgccggccggccggccgctgccgcgccgccgcttcgccacgccggttgccgccgcgcaggctggcccgcccttctcttctcgtgcgctcgctcagccgttgccgcctcccctcctcccctccgcgtcggccgccgcgcggccgacccaccctcctctcatgcgctcgctcagccactccttcgctatgaaggaaggaaagaggtaaggctaagaggaaggaaggagataaggagttagagaggaaaaaaagagatacgagagaggagtttgtgtggagggagaagatgataagtactagggattatatagtgtgttttgatctttagtcccaattagtaacactaaccggcggttgataatacaaaccgggacttcccggttggagttaccaaccgagactaaagattccggaggaccctgacagcatgtgaatcgggactaaagatcacatagtccttttctgcttataaaccgggactaaaaaccatctttagtcccggtttttattgcaaccaggactattgtggtttttaaccgaccggacaaatatggtttttctagtagtgcacatacatataatgaggacagacgattgcatctcctaacactcaaagatacgaatatcaacattcaacaacaaattctgacttctctaaatttctattgaaaatacacgcaaaattaataatggagactagctagcagcaaatccctaagcaacgaacgtgatcaaagcgcacatcagtgcagcgtgtgtaatatttggccattatattagaccatggtggtctggtggatggatagttcagctactgttttcctgaggctgtatatgctgaaatatactccctccgttttttaatagatgacaccgttgactttttctcacatgtttgaccattcgtcttattcaaaaattttatgcaaatgtataagatataaatcacacttaaagtactatgagtgataaaacaactcataacaaaataaattataattacgtaaatttttttgaataagacgaatagtcaaacatgtgagaaaaagttaacagcatctattaaaaaacgaaggtagtatattgtttcctcatctaataatatatatgtatatatgctgacatagttcagctactttcatgagggtgtatagtgaacgttcactatttactaaaagagtgaacatggccataaattagtagttaaagtctgaaattatctgacttcaatagcattcctgaatgtacgtattattccatgattgtaaaaagaaattgtgagatcgacctctatatagagtgaaaccatcttctatatagccacagcccacagtggcggatgtagacaatactgttttttttcttttttggctgagtgcggcaagtttatttcaaaaaatttcataaaggccacgaacgttttttctttgtttgaacgtggaagcaactttcaagttctattgttctactgggcagaatgcaagcaaacaggacaaaaactgtgccatccacttccaatatcataattatgtttgaagcatgcattctttttttttttttttgagaaggagaggctcacctccctcatttcattagagaaatgaaaacagtcctacaagcaatccaaactacttacaacccaactccaagtttgaaacttccaaaaacatcgcacatgactaccaatctaaacattctgaaaagaacagagagaacagattccaccctatttctctaaacaccattctccagcctcttgatgcaaggattccatccatgactcgccttgtacatatcagcggctaccttttttagcagcacagctcccagttgcaagtttgaagcatgcatataattgaactcacactgcacattaattccgtatgcaacacagacctgccatgagtgctacatatatatgatgatcaagtaaagagcaaaatttcatattgggttcaaatctacgtaggagcaaatttcagattgggttatttgaggactaagttccatatttgtttggctaagtttctaatttttttttaaaaaaagactgcgtatatccaattggatatagaagccgggtaaaaaatatccttctctaaaaaaataataataaaagagcaaaatgtgtgaaagttcaattatatgctcataattatgcatgttggagccccaagttgttgcaggtcttcatccttgctctagatatgacaaattcctgcttttatatgctactcttttcgtctcaaaatataagtgattttgtttggaagtgacacatctcagtactatttgttcagattcgtagtattaggatgcgccctattaaactaaaatcacttatattttaggactgatgtagtagaaagctccgttaaattttgcaagattggcatctgcgatttcacatgcttttctctgttgattgtgagctctaaaagcagatacctcagatctgtatatgaattgatcgtctgctcgtactagactgttcgagccattctggctctcagaaacatacatacttatatcgattctgcagtgggccacaacatccctgaaggtcaccaaaccaccacataaacaggaagcaccaaactttacggtgattctgattcagctgttagtcaaggtaaaaaggggacggccacctctcaaattacaggggtcgctatcggaagaaaagaaaacaggcgcatcaggaatagttccttgtgttttgttgggggaaatgcctctcctgtaacgtcgcaactggacgcaaggcggttactctaaatgaaaggcctcgcaaccactcccatgtacatactggtaagtaaagatagattaatcactagtaaaaaatgatttttctgaatgccggtcccgatagattccagacgggtcgtaagcaactggcgccggactgtcgcccacacgaaaaaatgcattattccgtgcgggcgttttaatccgaccgcatatgataatcctcattatcccgtgctgtcgatttaagaggaccgtacggaaaaatcgattctcgcgtgcgggcctcttaagtcgaccgcacgggaaaatacctctccctctttttcttctcacgcacttcaaatttttcacatcctctctcttccttttcccttttattctccctcattcactcctctctctctcttctctctatgcctttcctctcctccccttcccccctctctctcctctctctctatacctctttcctctcctcccctccccaccgagcgcacgaggcgtcgctgccgccaccgccgacggtacggaaggcagcacggcggctgctggcagaggcagcgtggcggcgacggctgacggtcgcggcggaggccaatagcggcggcggcgacgaggatgacggcgaccacgagcggcggtggcgcaacgatgacgacgacgacgggagcagcggcggtgtaatgacggcaatgacgaggacgacggtgatcacgagcggcggttgcgcgaccatggcgatgacgacgggttttgttgggtttatttttctttttttcgtgcgggtggtataacttgaccgcacaggataatcgattgtcccgtgcggtcgacttaacaagaccgcacttatcccgtgcggttgggcagcccacgcacgaaaatattgattttcacaaacctctctgggtgcagacgggcgctacctccgcactgaaaaatgaattatgtactactaccaatctgaatgtaaaagaagaactaaatattactatccatgagatcatcatgacaaaaactagaattgcccagctaaataggaatagaaataaatccagggtaacttgtatcatgagatgggtcaattccaatttgaattccgtacggctacaactctttttaaacgagtcgaagtccagtcttgtcactttccccctttcttatcctcttttttatccaacctcttttatgtattcttgaatgtaatccctccagggcatgcttcatttttttccttacatacaaaattaatagctacaagaattgttttccttacatatatacaaaaaaattgttgtagctttagcaagatttgaacgaaaaaacactggtttccttcaacaaataattaattatgtagtgtttccagctcctaccggctccagcaccattgccgtgcaactatttgctggaagttaagaattttttacataaaacgtcatttttttttggtctcgatgagcgataatttctagggaaaatcggaaccatgccattataattttgcaaaatttgagatataccatcttgacccacatgtcattgactcatgtgggccctacatgtcattgagataccgatggcatatttcaaactttgcaaaattatagcaaaattttacggccatgattggttagtactttgatcagaaatttccattttagaacctagaacacccttgcaacagcgaattgagaaaacaggggatggaaaaaaaatattttggtagaaatacatgtataaaacaagggattgcaaaaatagaaaaaaataatagtttgactagaccacaagaaaaatacatgaatttgagaaaagatatagattcaaaataaactttctatgaggttggagacccatgttaaattttctccaatacatctatggattaaggcattttttttcgaaacaagccgcactatacagtgtgaggttttatattggtatagcgataagaaaagaacaagattacaccctataaggctataattagaaaaagaaaaataaaacaccactacgtgttgacaactcctacacacaaactcggggaaaaatctagcacaaagccaatagttattacacgtgaccagtggctgctcacccaacaataaagtcacaaacacactgccctacacatatccaagcatatagccaccgagaagttcccggtcatcaccacggagatgggtttgtcgagggagagagcgagagagaagaagatacactcatccttcatgcatacccgatggcaacatctaagagcaccgtggtagaccatattgattgaaggctgaaccacggtctcttagacgatgcctccaaggaggtcacgactcggaagtgccaccaccgcccatctaagaaaccttggacttggttttcacctagagaaacctgctaggcagggagggagatgtcttgatagagcccacaagggagatcacagcaccctaaggcgtcacctttgttggaccaaaattgggctaggctttcgtttgtaacctctctcctgcctatggtcacaaccctatcgcctctctaccattcgacctttgttagcacgcaatttccaccacaatggtgcccttcgcccagctagcccatgcccatcttgagatggtccttacgggacctcccactcctaccaccaccgtatcatccccctccccgcgttagcacctcatatccgcatattggcgcttcacaaccaaaccctcctaaacaacaccacatcaagattgccctccaaaccaccacctccaccctcactgtggagctccctatgaccagatctagatacaccggctataggagggtatgttctctaaggagaagaaggggcgcctagccagagaggggagaagggcgggggagggattctacaccgcctgatctaggcacactacacacggcaccaccatccctacaactagcatcacttgtaaggatgttgcacgctgctgccatggtagtttctacacaccaagatccaaccggatccagcatcgtcggccatagatccggcaacctctagctacggcccatcaccaccacaacctcaaagacatcattgtctaacccccacacgttgacccacgtcaccagcggcttggaggcaccattgcttcacttttgccttgcagttgccgtcctagctcgcgcctagcctcagtcggcttgctctaacggtagcgaggtggaggaaggagagagaggggtggtggcaacggctatggttgccgccccgagccatccacacgggagcgacgcgggtgaatagagagcagcatcctatatgaaactcatatgattcaatatattatccgatcctttcatagggttatttaggaaaaaaatattgaattgagtcttaaaaaattcatacactactacatctgtccaaaaatataacaacctattattggatgagatgtctagtactatgggatgtgacacaagtactatgaatctggatatggtttgtccatatttgtagtactaaaatgggtctcatctaatactatgttgctatattttagaatagatctagtatggttttccactcatacatcaatcaatagaccaacctggcttctattttattttctagatggtactactataatttctcggaatctagacgaaaagttaaactgtttgggaaactttcgattctgagataaactgtagctacgagagaaacattgcccttgtttagttctcaaaacaaaaacttttcacccatctcatcggatgtttggacacatgcatggagtattaaatgtgtacaaaagaaaaagaaaaccaattacacagtttgcgtgtaaattgcgagacgaatcttttaagcctaattgtgccatgatttgacaatatagtgctatagtaaacatttgctaatgacggattaattaggtttaataaattcgtctcgcagtttcctgacggaatctgtaatttgtttcttattagactatgtttaatatttcaaatatgtgtccgtatatccgatgtgacaaccaaaacccaaaattttccccaacaaaacaaggcctttgtaaataggctctgaagctcatagtcaacctaaaaggcctagagtgttaaattaggcctggtttatttccccaaaatattttcctaaaaacatcatatcgaatctttggacacatgcatgaagcattaaatatagattaaaaagaactaattacacagttagtgggaaatcgcgagacgaatcttttgagcctaattagtccatgattagtcataaagtgttacagtaactcacatgtgctaatgatggattaattaggctcaaaagattcgtctcgcagtttctaggtgagttatgaaattagtttttcattcgtgttcaaaaattccttccaaaatccactcaaacatctaatgtgatataaaaaaactagctgggtggcccgcgcaattgcgcagctagcgcccaaacaaaatcatatattttttagtatgattttacttaaaatttattaaatacctatctcgttgtcttaagactttgaatgaccaaatcttatcatccccgtgtttctaattatatagtttttaaaagtcacaccaatttctaccccttacttctgccatctccttctttatttgcttgctagatctaccactttctattcattctccttggaacctttaaaaatggatcttatagattttagagtctattatcttgttaggtttctttttataatttctagaagtcacatcaaacgctgccattatactactctgcggttcgtccaatgtcttttctttttattgtcattgggattttaaaaatcgaatataataatcgttcgggttcattttttactttttagaagtcccgccaaaccgttagtggctttgccattgaactcctctgtgacttatctgctgcctcccttctttattgtcattgagattttaaaatcgaacatgattatcattgttttttttactttttagaagttccgaacctttaaaaattggaccttgtagtttttagagtttattgtctcgttgggtttcatttttcataatttttagaagtctcgttaaacgatgccactatactcctctacggctcacccgccgcctactctttattatcattgggattctaaaaatcgaacataactaccgttggaattcattttttattttctagaagtcccaccaaccatcggtggctctgcaactatactcctatactcccagtgcactgcttctcctttttattgtcattgagattcttaaaatcgaatatgattatcaatgtggtttattttttttactttctaaaagtcctagcaacctccttgtccgtttgcttcacgacctacatgttgtccctccttttaattctcattaggattatatttagtgttttattaacagttatatgtcgtatcaaccgacaccactctactcctttataggcatgttatttaatttatcttatcatgtattttaggtggtcttttctttcaatagtccttattttctgtcaccaattagttatcaataaattgtattcctaatggaattctttttttctttttctaattttagaattttttttcaaattttaactaataccgtatagtgttcttttaatatttttatttttcaattccagttgtttcaaaattgtattcctactcaactctcttttactttttttaatttttgatattattttatttttcattctgaattttaattaatctcgtatcgggttcttatatggatttttctttcaatattgcttattcttaatttcgaatttctgttaattttaaattatattcctactttaactctttttttctttttgctaattttagattttatttttatttttcttccgtatattaactaatatcgtattaggttcttatattgactcttctctcaatattcattatttttaattctgaatttcagctatttttgaattgtatttctacttggactctcctttttttttctctgattaatgtgagaatttctagcccccacagcgaacgtggtgcctccttttaaagctattttaataatataatagatttcgcgagctaaacgggagccttagtgacttactcgacgagacaattgcgcccggaaatgctaatgggcgggtgatcgctcccccgcccgcccaacgatcacccgcccgccctctcccctgtactactccatacactcctcccctactacagtacaccacacaatttttttaaaaaaaacaaaaagttagaaaaaattatgtatagaaatactatatataaaaaatttgaattcaaattcaaatttgaatcggctatgtaaacttttggcttataaactttaggtctataaactttacgtgtataaactttagatatatagaaatactatatatagaaaatatttgaattcaaattcaaatttgaatcagatataatttaaattcaaatttgaatcgggtatgtaaacttttgccttataaactttaggtctaaaaactttaggtgcataaactttagatgcataaaaatactatatagagaaaatatttgaattcaaattcaaatttgaatcagatataattcaaattcaaattcaaatttaaaacgggtatgtaaacttttgacttataaactttgggtctataaattttaggtatataaactttagatgtatagaaatactatatataaaaaatatttgaattcaaattcaaatttgaatcggatatataaacttttgacttataaacttttcgtctctaaactttatatgtgtaaacttgaggtgtataaactttagatgcataaatttactaaaataggaaagtaatgtggtgacaaaaaagaaaatcaggtggagggagagaggggaggggatcgatcgctacccccatctcctggcgatcgatcgcccgttaggatcccccaattgcgcccccccagttgttgggaactggagacgagtcagatcatcgacccacacagcgtgatatggaaggcccacctcaaaaggtcgcgtcgcgtcccgccgagattctggaagcgaaaggctgagcgcaatcgcggggcgtccaagtggcccctgcaaaaaatcccccccgaaatcccaccacccccccgcggcgcggccgcatcaacccactggccctgcggcggccacccaacccaacccaacccaacccaagcctcacatctgatcacgacgcccacccccccacgcaagatcgccgcgcccgcgccacgtagccggccaaacgcagccacacagccccggccacgctcccgcctcccgcaccataggccgccccccgcgccctcgcagtctttaacgtcccagcctctcgtttgcctcgcactcctgccgcccatcacccaaccaccgcgcgcctctcctctcctctcctctcccgccgcgcgaatcgcgatcttttcctaagccgcggccacggtttgcctcgctagcttgcagtatctgtatcacacagaggggtcaaggggacggatcagctagctctctctatagctagcaaagccggccatgtgcaagaggagctgcatggcgccgtccgagtcgtgcgcggcgcggccggcggacgagaggccggcggtctgcagctgcggcggggccggtggtggtcaggcggcggcggggacgtcgtcggaccgccaccaccagcttgtgctgctgcaggcggaggcggtggagaagaagaagggcggcaggggggcggcggcgccggacgaggcggcgatggccgacggcggcggcggtggcggaggcgctggggatcaccatcagcaagcggcgttgctggcgccgttgccggtgtcgaggcggccggcgccgtcgtcggtggcggcgggggaggagagggagagcgcgcgggagcggctgaagcggcaccggacggagatggccgggcgggtgcggatcccggagatgtgggggcaggagaggctgctcaaggactgggtcgactgcgccgtcttcgaccgcccgctcgccgccacgcgcggcctgctcaccgcccgcgacgccctcgtcgccgagtgcgccgcccccgcgcgccgcccgccgcacggccccaccgcccgcccgctccgggtgcagaacggctgctcttgatcgtgatcgatcgcctccgatctccatcgatcgatcgatcgagtgctttcgtcaagtttttgcctcccctggccggccggctgctagcttcttccaagtgaaaagttactcgtcttctatgcgaaacctattcggggtatggattatttgatcgatgtcaagtactctacttaatctgtatactacttttgactactggtggatgtaattaattgttaattgatcaccatttgcggcaagttcgatccattcttgttcgaagcaatactccgtctgctctaatataagagcttgctagctgttgattatttcatccgctctctatccttcacctttacctggccatccaatcgattaattagcaaaaaaaattcatgaataagcttccgatctccacatcagatagctgaattccccatctacactgccgaacttaaaaaaatcctaatgattcggatgagctagctatctcctgatcatccactaataaacaacaacaccttaatttgttcctgttcagtttaagttcaaaatcctagctagtatcgcatgtaatatgcagcagcttaattcattcagctctctcatcacatagatctaataacagtaggcagaggtacggtatctctggaattgtgctctaggatcgcaggtttagatcttgaattcttgatcgatctgttactatgagcaaccagcaaatgattctgcatcaacatctcaccgacgtggcctcgttcccttctttcgttggtcgtctttccatttgtggaacagattctttcctacctcctttgctttatgatgtatatggagtatctgttagaataattaaatgggctagcatctataacaaattttgagaataattactagagaaactcaagtatgcactgtacggagggatgtaagtggggtggccaagtgggcaagcgagattttttttccgcttatcacaattctacttagttttatgtttcaaattttgtactagcaactagaaaatgaattattaagcagggttttatactagtaacaagattgttcaggagaaaacatgtatttagtttcactttgttgattgctcgtggaaggagaggtgaatttttacctagggaatgtatggataataaatgagaccataacattgtaacgtagacgggatgccgagtgaaggagagagaaggcacgaagagagaaacattgactcttctttttgaagatttgatgcgaggcacaagatataagggagagttgtgtgtgggtattgtgggaagaaggttagggaaagagaaaaaataatgaataaaaatttggttgtcttgactattaaactaatagtggctctcttaatggcatataaaatcttggagtttgaaggagactcaacggttaaaattgcgtcggtaatacacaattactagtgacgatatacatagctatcaatggtgatacctatcaagtaccaaccatgatacatataggtaccaataatattattatttattaattttaatttaatactctacgatacatcaatgaaaacctatctaagaaagatgtacaacaagtataatagtaagattttattgtttagcccaaccactactggacacatggctaagtaaggccctacaaaacggcgtagtttctctaactactaactagaagaatggtaacccaacacaaaaaacacccatgtcgccctagtgaaataacccatcctgcaccaggagtggggtagggaggttatatgtagtggcggttatagtcttctagaggttttggaccaccctccattttggtacagagtactccatccttcaaatttgataaaaattttgacaaaatagatgtaatgttgacattatataatttagaagtatggtgtaggaccacgcctaacaaaaatttctaaagccaccactgtcctatgacatggaacatggggataccattccaacgtttggatggtgtactctgtaccatagtagctccctttttagcttctctcccccacaaaataccacctcaacctaattttcctttaattatcgcaccaccttaaaattgtgctgtagcagggggtatgaaattgccatggacacccattaaaagtactctttatgattgcaccactgcgaaggaacattgactccagttaacactgaccatttattaatgagaccttttgattcaacagctcaaattgcagttacgtggagtcgaaatcccaaactcgtgcttaatcatgggcctatacggccacatgcattgtggcccaacatcgggtcctgtcttgagagacggagctagcccagcccacggagaagagagcggtccggatctggttggtccacacactccgcatgcagggccgaatagacttgttccccgcgaaatcgtagtacgcgactagctagccagccaccgtccggcccacaacgccggagcgggatcaacgagaaacgcgtgcgagattctggtgcgagccggacggacgatgagtcggatcggcgtcagccactcatcctgtcacagtatcgcccactcgatcggatccgcaccgacactactctcccagccagccacagctcggtgattcgagcgtgggccgcatcggttctggcccatgccgtccgatccgtccgtaggcgagcgcgcgggtcaccgaccgtgttttttttcgattttgctatatctcactcgaaagattttttcttatctctcactcgattttctcactcaaatttacagtgcattttcttgtaagttacagtgtaatttatgaaacttacactgtaacttttgtaagttacactgtaatttttgaatcttcacatgtaaattttaaattttgtattggatttggtctttttctcgaggatatggtaatttaatgttcattatggtgtttcttaattgctttttgctttttattatatctatcggattttaatataaagattaaaaatctgtgtgatacgattataaaaatctttcgaaagatgtataggtactcccgtttttttttcccggagtagccgccggtgatcagtgatctggattctctggaaagcggtttcccttccttctttactgcttcgctaatagtagggaaactattctaatctctcgaggggatgttccctcgtttgctcaaaaatcatctaaacggttatgaaaaattctggaaaaatttgacaatattcatacaacacatatatacaactccacaaaatcttaagtccaaactcaactcacacgtcgagatataaaaaaagacaaattcagcgtatgaatagtagcgcactgtttatatctaaatttgtcttttttgtttctcgatgtgtagaacgaattttaacatgaattttgatggactagtaggtatcattatactctacattgtcaatttttttcagaatttttcgcaactatttgcatcgaatttataagaaaaaggtataggattagaatccactcccctagtactagtcgtctttctctttgcccgtcgctctcaggttcggtgattgtcgctgattaattagcagccggcggttcgcgatgtccggtttccgtttctttctgtcgatttctctctcgagatcgtacgtggagtcaaattaagatcggtcatcagtcgcccgcacactttttgcctcaagatccggtaatacggccgcgtgcgtggtgccacgcctgaggcgcaccatcgatctgactctacgggaaaagtcacgcaggtgcatgtaggacgattcgagcttacttgacatatattacacgcgacaggacaagtagtagtataaagctcgggaggacgggttgatcgatatgattgactcggttgttactctacttgtataagattaggaacacgtgtgctcttacgtaacacagcgtgcgtcgtctacgcaccaataatcacccacaaacaataagtagttaagtcgttttcaacgtgtcaattatacgggagacgacatgtttccgtcgacatgtacggtgctagcttagctagcccggagctgctgaggcgacagcgaaggtacgtacgttgccggcagcggcagcggcagcggggccagattgcccagacatggcgcggtcaagagagcggcagctgacacgaagcgggctaccacgccgctacgcccaccggtgcgcgcgcgcggtgacgaggcagccacccacagagaggcctctcgcacgtacgcgatcgcgcgccgatacatcatccgtctcgatctcctagctcgcttcctccctgcttcccaccggcaccgcggcacggctaccgcgcgcgcgcgcgcacacacaaaccaggccgctgtactcacacgtgctcgatcgatcgctagcttatatagcagcaaaaactactagctcgactcagctgtcagctccaagcctatccaagtggaacgcaacagaggcgtcgtctcctcctctcctcgacctctcgcggttggaggtctcgcgcgcgcgtgaggcaacaagtgcccgttcgatcgaccggcaaggatggcgacggcagcgagagcggcgtcgtgcacccccgccgcttgcgctgtgttggtcatccccatcctagtcctgatcatggcaggtgagttcttcgctcaatctagctcacgatcgagcagtgcttctgcaaattaatctctcctcgatcccccttcagctaagctgtctcgcttcaagctagcagcttatactggttcatcagaaagagacgatggaaattttgtgtgttttagttgctatgcatttcacaattaagttcgttcttgcaaattggggatacgatgctagctgcatttcgttggtttttatctggattagcaggtgcatttgccgatattatatcatgtgattgtgattagtaatgcgcagctctttaagacctcaactatggctaggtgctccatggcgtaagacaccgcgcccactaaggctacaaaaccaaatcaccatataaaatccatctcatttctagaagatccttctattgggtatcaatcttcagttttctatcaattctttacaagcaaagtaagcaacaatagtcgggtatatttccctttactccgctccatttttttactttttccccctccaattctgtttttgctcgtcttatctggtcatgagctgtatgtggtttttctttctccacaaagttcctctggaaagagcatttgttcatcatttattattcgcaccgtacccgccagctgaatttggtttgataggcgagttgcaacttgaaaatataggtgaaaacaaagcacagggctcgacactgcacgccgcattggaataattgagttggttagtacgtagtactactattagttcttggcaggatgccttggtggctcatccaccacatgtccatgtggtccagtgaaatcttgcttcccattggatcacgcgcactgtgtatcttgtatattgtattatatctaaaatttctttattcttcatccggggaaataaattctttattcttctacaggattaattagtccagggtaataatagtgtccaattgtaaacacattgtatcttaagaactgagcataactccgttgacgtggtgtaaggttttcccccaacccacctgagtttgaatcctaaacccagcatgtttctcatgatagcactaatgtatatattactccctccgttgtaggttataagatgttttgactttagtcaaagtcaatctactttaagtttgatcaaatttatagaaaaaaatagtaatatttttgaaccaagataaatttattataaaaatatatttaattattaatttaataaaactaatttgataatgtaaatattgctatatttgaatataaacttagttaaaccaaaacatcttataatctggaattttataacctgaaacggagggagtacttttattccgatgtgcctgcattcattgcactcatgatgataatcaagtttgagctgagctagctgttgcaatctcaaggatgaccaaaaatattacatgaatgagattccgtgtttttcactgcattctatttctcagcaccatagcacatcagaacaaataaatgaacaatgatgatgatcactcggaaaattaaacttgacaaaatgcagcaaaatatacagtggcacattttcctcgcagacagaaccatggctcatttttgcatgtatatatgcgtctaatgcaattgctggtcactgaccgtgacaaatcgcatgcatgcagggcaagtgcgagtcgcggaggcgctgtccatcggcgtgaactacgggcagatcgcgaacaacctcccgtcgccgtcgcgggtgtcgtggctgctccggtcgctcaagatcagcaaggtgaagctgttcgacgccgacccgcacgtcctgcgcgcgttcctcggcacgggcgtggagttcgtggtcggcatcggcaacgaggccgtcccggcgatggccagccccgcggcggcggagtcgtggctgcagctgcacgtggtgccgcacctccgcgccggcgcgcgcatcacctgcatcaccgtcggcaacgaggtgttcaagggcaacgacaccgccctccaggccagcctcctcccggcgttgcggtccgtgcaccaggcgctcggcgcgctcggcctccagggccgcgtcaacgtcaccaccgcgcactcgctggacatcatgggcgtgtcctacccgccgtccgccggtgcgttccacccctccgccgcgccgcacctgcagccgttcctggccttcctgtcggcggcgagggcgccgttcctcatcaactgctacccgtacttcgcctacaaggacgacccggcgcgcgtgccgctggagtacgtgctgttccagcccaacgccggcgtcgtcgacccgcgcacgaggctcgtctacgacaacatgctgtacgcgcaggtggacgccgtgtacgcggcgatccaggcgatggggcacacggacatcgacgtgaaggtgtcggagaccgggtggccgtcccgcggcgaccccgacgaggccggcgcgacgcccgagaacgccgggacgtacatcgggaacctcctccggaggatcgagatgaagcagggcacgccgctgcggccgcaggcgcccatcgacgtctacgtcttcgcgctcttcaacgagaacctcaagcccggcccggcgtcggagcggaactacggcctcttctaccccgacggcacgccggtctacaacgtcggcctccgcggctacctcccgcccatggcatcacacgaggcagcgacccaggtaagacggattactcccacattaccattcttttttcgattacatggaagacacacgtgtgttgcgacatcatacgcatagatcagcggtaaaatcttgattgtgcaaagtttttttttccttgattacacggtacacgcgcacacacacacaccagtacaaacgcaacttcacacttacatccaccagtgtttcccaatagagatgaaaaccaacgttacattcttgatctcactaaattcatatgaaagcatatttgcgtaagtataatatttataacattggaatttaaatccataatctcaccatcacatgacatgtgcttattccataaagatcatactgaaatgacactcacgtacttttttttgtctaaaaaacttaacctatgtgaggatttgatataacctactataacgaatctggatagcgtgggttgcgttcaatcatcacctagatcaggcagtcagctatgctttcacctgattgctctcaaaacattttacgtgatgtacgttgtactactgagatagtgaggtggcaatgtgacagagataaaaggccgttggcatttggcaggcaaggaatagaattctccaccaattgaagtgtcccatccgcttgcacttactagcaaaatgcatcatcaaactcaatattatactcctaagttctcttgtgaacctgtcctttacatgagccttgacaagtcatctacctttgtgtcttttttgcaggtgatccattggttcctacttatcgccaccgcatcggtcgttttcgccttatcgtgacagtatcagccactgtacttagtgagtcgtgacaactgcagttaacgggggtgccattcagaagctgaaaatggcttcgcagtgatattagattagaggatagatctaacagaaatttggaaagtattaacccaccaggcttgcactgcctttcgtcttacagtgttacagaggaagagtcatacagaagaattgtcattggtcgataatacatagcaaatcatcagttgtaagcgtatcacattcttttgggatttataaatgatcttgttctattctggcatctaaggtctggaatctggacgtatattcttgcacagctcctatacacattactgtttctcaccaatcaggaattg

SEQ ID NO: 20425 - DNA, 7865 bp, Oryza sativa
ttagaccaatatgatgttaggaacagaagtgactactgaatctacccatgatttcaacctatcagattcatgcaaaatgcatcaaacctatacaactttctccaaacaggtccacgtgtgtagcaaaaaatcatgtgatgactgtaagtttgctttattttacagtgtttcattttcctttgttatgtcccaatgaaatatgcagcaatttctgttgttttacctttcttctgagagaagattctggcaatgcaagttcctgagctcgctgttctctggccttgttcctcctttcaatgtcattgttggtcttgcggagtagaaaccatctaaacaacggtattgcaaaaaaggaaccagcatatacctacaaagggccacatgttatcagtaatcagtatatcatcaatgcattcatcatacattcacaacataatacaaccaacagtttgcacattatgactttcagatgttcccctcacaaaaccaagggttcatgattgatttcaaccaggtgcttttcaacatgactataaagatcaagggattacaacttttatgcaactaaataggccgcatagagcccagccatacctgaagcaaaggaaacagttgcgcaacaaatgagataagtccaccaggtggcactgtcatttgcctacaaaacaaagtttaatgtaaaaaattagtaaaagtgaattacaattcaatggtatttgagggcagaatcacaattcctacttcaacaggttcccaagaatgatcacaccaaaaagattgagtcctcccaaaccagcaaccattgccctttcagatgcatttgctttgctgcaaaacgacaacaccacatatgaatatacagaggtacaagacaaactgcagatttcaaaaataacaaattgatgcaattaccctctaatgcatcaatacagacaattctcggctccaatgcagtgcattccatagtgtactaatgtgtgacttgattccaagaaaaaataaatttacaatccaaacacaagtacatgcacattatagggtaacaaaacacccttaagttagattttggcatcagactgaacaaatatttccttgaattgaaccaaaatggaccaaatagatagaggtagtgcatggtagagagctgcacaagttaggatgacgaggtagatgagctaaaggcaggaattggaaataatggagcttcatttgtcatttgatctgaagtcacagagggtgatgcggacagctttgatagttcgcagttgtgttttaggcagcttggggtatattttaggacctaggccaaagtacaatgttggaaggtagaacaggttccactagagttaaatgcaataacagggaaactacttgaataactcaatgacaaaaaaatgctaacctgaatttccatggtttctcctctaagtacttttcaacactgctaaacatagcagaccatttgttaccaacatattctctaaccccacttccttttgatgaagcagtacgttgcagtgatggaaacctataaagaatgtttccctgaatacaaaaacaacatcaaaatacactataagttgatcagttcaatcaagatgcattcaagttcactaccagttatgtaatgccaccttcagtaagtggtgggattgatggtgtaaacattaagaacaatgtagggatatgtcttagtggcagtcaatatatgcttaaattatgagaagaaagatggacctgttcatcaacttctgggtgtccctggaagcgtaatagaactggaagaataaatgattcatcatcctgtagttcagaatatcatatgcatatgatgagatgaggcttcacgccaacgaacaatccataacttacatggaaaattcatcacagtatttaatttatttagtaatgaatggaaaagtacaaaaaaaaccaataacaacaagaagaatactaataagcattttagaacagaagttatataccttggattgttctgaaattggtggcacatcaagatacggtgctagttcttctgccgtgacaactccaccattcgatgaaatatattgcccaatctgtatatttattcaaggagaagttagaattttgtaacagtacaaactagtaacaaataagagctgatcatgatagttagaaacagaaacagctatatggcctatgaaaagcttttaccatcttccacctcttatcttcaagaccatcatttggatcaccatctccaaatacaaatgaaaagatctgcataattgatttatgaacataaagttaacccacctacacatgacagaattacaccaaggaaatgaaatatcaagtcaaacccttttaaattacagattcaataaaattcatcccatcttccttttctacccgccgccgcctcctgtagtaatcagcgtccaagtacctgttgaagacatatgaaatattattgtgaacgactgaacgatagcaatgtgtacaaactacaaaattaaaagtattcacggtgcaaaatcaaagattgcattaacagctggatgatttagtatcatttttcatgcagtccctacataagagttattttcatgttgatttacgcatgctatgcatagtgaatgcataaaatacaactaacacatatgcatgagtatgactacgtttaaattgattgtatttttgccagagcatttattctgagatggttcgtttcagaagaaatactagcacaacagttggcacagagcccaggcaattttcaaccataaatgtgcaatagccgatgaagtttagcaaccccccaaacgcaaaagtagatggacattataattgtttgtgttccttcgcccaagaatgcactaagataatccagctatgttgaaactcgtcctaaagtgacaggagacttaccaaaataaatctgttggtatgatgatagtagagtcataggatctccgtcgcctgccgcgattatcttcatcactgatacaataagaagtgttatcactggactggaaataagcaaatgacagtatctctactaatgtccccaaatatatagaaacaactaataatggctaaatcttagactatagagtgagattttttattctgaattacatatttatggatggaattgaggagaacggttgataaatatgaagacattgtgcctgaattgctttgagtagaatagagtatagtaattaattaactgaaaatccatctggttatactaagcccacctcgagcttgagataatggcaatgatggtagtgtatacaagcacaatggaggcgatgagcgctgtcccaaatgacactcgcaccaaatatgcacccacttcctgcgaaaagttacagaaagaaaattcacaactgagccaacaaaatgactcgcgcaatttttatcaataaactttttgtttcatctctccagcagtccagcaccttagttttgtcgatcagcggctcgaccttcattctgaacgacttgccagcaagcttcgccctgtagtctttagggaagacgtacagcacctccccttcctccgagacctacacaagtcgcaaccgcttcatgcttagacagccacaaaaggcacggaggttagcaaaaccaaggacgcggtgacaacggagtacttagcagagctaaggaggcgcacctccaggaagccgccggtgtcagcggcgagcgcttgcagcgcgcgctcggcctgcgcgagctgcagccccgcgcgggacgcgacgtcgccgatggtgacgcggccgccgaagtggtcgacggcctccatggcgcggtcgcgcacgccggaggggaggcggtcggtctccacggcgccgccggggcgcgcgagccccggcgcctggatggtccccgcgcgggccctcacgtcgtggcgccaccgcggcgacggcgggtgcgggtgccggccgtggtggtggtgggcgacgcggaggtggaggtggaggtggtggtggtagggagagagggggaggaaaggggcgtggcgcggcggcctgccgcggcggtgaggcggcgggggcggggcgaggcggaggtggagggagagggaggcggcgggcgccatgggtggggggaggtggtggtgggggtttagggcgaggtgggcattctccggtgagaggagtggctgtggaaggcggaagggaaaggggggagagaggcggtggtgtgtgctggccgtggccacgagatcggatttggtctctctgaccggtggatttctgggtcggtctcgttcatggcctgcactagctaggcacgttaagttcaagctcagcaataacgctaagcaaaattgggtgaaaacagatcgaataaagttagttagacacagataatagacaaaatggatgatcaaaagttcaaaacactagaaaaatatcaaaagtattgggttgagtgattagagagaaaaaaaacacggtttacaaagacacttgtaagactattgctccctccatttcaggtgagaattttcagaatataccacaatatgcactgcttttaggatttgtcacccaattcgtactactttcagaatacaccactagagtggaattttttcgtttcgtgccctccgtccacccaaagacgtgcgtcgtcagttcatccatctcgtgccatttgcctgcacgaatttggccgccggcgagctcgtcctcccccacgcgtcgtttgccctcacgcatctggcgagctcgctcgtgttgtccccgagctcagccgccgccgcaccgggctgtcgccactgcgccctcgagccaccggagctcgacgccctccgccctccactgctattcctctctcctccgggcctctcccgcgtgcgccgatggtggcgacggacagtcgacggtgcaactgacgcgggcacgacggacgagcgatgacggggctgacgccggcggcgacggacgggcgacggctgggctgacgcaggcgcgagcagcggcggactgacgacggcggcgccaggaggacggaggacgacggcagcgccaagaggacggaggacgacggcgcgattgacgctaggggacagagtggtacggaataaagaaaatccgcactccagtggtgtattctgaaagtagtgcgaattgggggacaaatcctgaaagcaatgcgtgttgggtggtatattctgaaaattctcattttaggttgcaagacgttttgactttggtcaaagtcaaattgttttaagtttgactaagtttatagataaatatagtaatatttataatactaaattagtttcatcaaatcaataattaaatatattttcataataaatttgtcttaggttgaaaatgttactactttttctacaaacttggttaaacttaaagtagtttgactttgactaaagttaaaacgttagataattttggtcgacatgacgaatgtgttcggccaattcgcggtagcatatagaaaatccattatctaaaaagaattgcagtagcaactcgaaactttaagaaggatagtaccaagtaacagatgaattatttatgagatggataaaatgcagtaaaaaaaacacagcaacgatttctttttttaatggtgaatgttatgacaatgttagtcccaatcaagctacatcttgataatgaatctaatgtattggtttgtttaattttttgtatgtatacaaaaaggttgtgtattgtattgttctcgtatgtgtgtacattccagttttactattttgattagttggttattgtttattggctagtaacatgatatgcagtagtaatattcaaactaactatggatatactttttatgtagtgcattaagttaatgaatcagattgagcggactgttatcttctttatttactcatatgctttctgtttgtaagttatctcaagaaaatcaaatgatatatccatagtgatggactaattatattttttttaagtgatgaacgtattgcatatactgagagtctatacatagaataatgattgttttgttcatcttttttaaagatataaattttacgttaacttccgttattcatatttttaaactgctaaacggtacattttttttaaaaaaaaactttctataaatcatcattttaaaatatcaaataaatttatttttaaaatttataataattaaagctcaattaatcttgcgttcatctttcattttaatctatctcaaacaccacgaatcatactttgtctttcaatcgttcgcatcaagaaccagaaccaggttcttgcagcggcagctaaaagggggggtttttaactatttgccactcttacggagtgccactcttgagatgccactctttcaaatttttttaaagaattaccataagagagagaattaatctttataaatgaccaaatttgcctaagtggagggctacctcagctctgtcaacatgaaagcggatgtctaatgactctttggcccttggtttaaacattgtaatagctgactataaccaaatatttgagcaacatttgagattatatacaaacgtatctaaaaatatggtttatcattttttaaaaaatagtttataatgggcaaatgttcagtaatttgaataagttcaccataatataataatagattcaacgaggtcatatccgtatagaaataaaccatcacactagtttatagaatatatcagttcatattgaaatagaagtcataggatcattagtccagtacatctgatctgagaactactgaactagtgtggatggtctagctcatggatgtaaccatgtagaaatgtagaatccattatttttattatggtgaactggttcaaactactgatttttttcctatgataaacccttttttaatagatagtattttttttaagatacgtttgtatataatttcccaaatgttactcaaatatttggtgtacaagagtacatggtcaaaccaagggtacaagagtcatttgaatttagctttcacgctggcaaaactgacatggccctccacttaggtaaatttgatcatttgtaaagattaattctctttcttgtggtaattctgtaaaaaaaaagttagaagagtggcatctcaagagtgccactccgtaagagtggcaaatagttaaaaacgccgctaaaaggaagggagcgtattctatgcacacaggccctcgcgtgtacacaccgtgtacaccaactaaaaattatcacaaaaaattctaggaaaattcatacatgtactttcaatagtattacatctacgtgcaaagtcgcatcttcaaattcattctacatagagaataacaaaaaagataaaattctgacaaaattgcaaccttaaaactgtcagattttttgttttttttgttacagctaaaatataatgaatttgacgttaagattttaaccctaagtgtaatacaactgaaagtatgtgtatgattttttctagattttttggtgatattttttagttggtgtgcacgtgtatatacacgtgagagcctgtgtgcataggatatgttgcgtaaaaggaatccaccatttgggttcttcccggggtaaaatatcggcccctcgttccctttcggccacgtcaccatctccccttccgaacagcttgccgccaccaccacaccacgccgctcgccgccctcgcggcttcctgccatccgcgacacgcttctcccgcaccgccgcacaccgtcaaaaaaatatcggcgggcgccgcgcaaagcgacctcctccccccttcacctgcgcgcgcgccgacgaggacacagtagcggccagccacccacacagccaccgcgccggaaaacgggctaaacaatggcgctc

SEQ ID NO: 20426 - DNA, 2520 bp, Oryza sativa
catgaccacaccagttataacaaagaaggtgggtgggttctgtatgttattcccatgagacattgttctgatttgtcacttctagtgattatggagtcagggtcttagcatgtatatgttgagaagttatgcatcccatttaatcgatgctgtcatttgcagtcagctaatgaaaacaagtggaagatgtcctttgtgatgccatcaaaatatggtccagacctgccactgccaaaagacccttctgtgaccatcaaggaggtgcccgccaaaatcgtagcagttgcagccttttcaggtcctaatttcatattctcagttttgtttgtgtacccatttcaacatgagcaatgctacacgtactaaatttttcttactaaacttttactaacaatcatctgaaccgtttgatttaagtagatggaagttacaaaaaatctagatgcactcatagcatgacacatcagtgttagtaagaatttagtaaaaaaaagttagtacgtatagccttttcctttcaacattgggatctcgatatgatttttgtcgcatttgcttatgaacctatttgtttttctaaaaatagcaatcttctgcttattggcactgccgttttcacatttgtaacctttccatttcctctgctactttaaaagcacaggtgtcgtccttcctttccctcccccaatcccacgtatgaaaaaccactccaaaaaaaatccagtgcaactaaaaaactagccaacagacaaaaaaaaaaacacattccccagatcccattgcaagggttgaaaagattgagccatgttcccatatcccgttgcaatgcacgggcacatgactagtaatgataaaagcttacctcttatccatcatgtgttctctggagaaatgcataattgaaactgatgagtttgcacagagcgacttgcatcattaattgtactatgtggttccatctgggaattattgtctgatgtaaattgtattgttgtttcccatattcgtactaatcatcaaaacaatctgtaatattagcttttccgttattataaaaaataaaaaaaataccttttctttttcaagtaatgagaccagaacaaggttcacccacttacattatcatcttatcagaaataatttagactttatgtttgattatgttttcaacatactacaaaatcacccaaaattcgatatacattacccctgttattttcaactttccttctcagtacagaaagtttgaaaatggcatgcatctctcatggtatttattatgttttgagctaaaggttaactctctttctttctgctaaagtaatataagttttatagatattgaaaacaccttgaaaacgttctttgttggttcgagaggatacgcaattatgtacattatgcactcctgccaaaatggcaatcatccactacactgacaagtcatcttttatactctatttgctgtaaaacaggtctggttacagatgatgacataagccagagggaatccagattgcgggaaactctccaaaaggactctcaatttcgggtgaaagatgattcagtggtagaaattgctcaggtaaatcttgctcaaaataattgatcaatattctaatgtcctacataaataagattgatcattgactgatcctgggttttactgaatctgcagtataatccccctttcacacttccattcacaaggcgtaatgaaatagcattggaggttaagaggcttgatgcaaacttctgatgacctagattaacaaataagttattagatttcagtgtatataaaaatgcacgcacctacaaatttagaatttcaatcttctctttgctcatattgtatatacatatgtatcgtgtatcagacacaaatttacatgattgtaaaattgaatgttgaagtatcatagttcattttgatattttaatttgtgtatggtattttttagcatagaaggccatcctgtcttaagatctctgtcacaaagctaaagtagacctttttttcctcgtacaacttttgtaccaaacctagaaagtcttttttacagaaataatgcgttcagcagagttttgagcctgccatatttgacactgatgggcatattttcaccaatttagcatgtagtacatgggagcatcagtaacagtaggatatatcattaattcattatggagttcttgaaggttcttagattggttctttaagctggattctgttttggactctgaacttgtaaagctgtgatctttatgcagaaattaagcaaaggggatatattctatcatagtatcatctaatgatttggcttgtcacttacatttacaggtgatatattccttatatgcgttcctatttccttgtttttatcgtgaactagcataaacaattcgcctaattgttgtcctagttggtttttcattttgtgtgcgtgtgcacgtttgtgtggggaaggtgtttgccgttcactggtcatgggcatatctgtacataggtgcttttct

SEQ ID NO: 20427 - DNA, 1025 bp, Oryza sativa
aggcttgagaacaataacctgctcacagctggaattgatgccattaaaatgtgtactatctatgaagcagatcaacactgtcgcctggcgttttttttttttgacatcattggattacctttctcatatactacacctcataatcagcatatgcatactttagctatttgctatgttggtgtcttggtgacatgcagataaaggataagttggctgcattatacttagagggctgtaaagcggagaaaggcgaacctcttcctgttggactcgtggatatgagggaattgaagaaaggcgcggataggtatttcagatacgttggatccctcacgacacctccatgcaccgaaaatgttatctggaacatttttggagaggtactattccccttgcagagtaatagaaacatcatgaaaacttcgtagtgagttatgtttttatactcactggcgcttctaattttgcagataagagaaatgaccaaagagcaggctgctgctttgagggcccctttgcacgggagttacaggcacaaccgcaggccgacacagccactcaatggtcgcaccgtgcagctcaattacatgtaaccccataacggtaatccaaaagatgctttatcctgcggcagctcatctatctgcagataataatgtgctttagtatgtacccaagttcaggaatgtcaatgtaatcggcgccatggactgcaataaaaccttgttcattgtcatggttcacatcattcatttttcttttgtgagaagtctccgaaagggagataacggcatggatgcagggaagacgaagaccctgaatgtatgaattctatgcataggaagacagcggcatcgagggaggacatgaccatgacctcataggaattgtttgatcttctttttaattgaaatgaagtgaggaatttagaatggaatagaagcaggttcgcttaactgttaatcacttgcaaatggaggaatttatcccttatggcttcttgttgctgcctgttctagacgagg

SEQ ID NO: 20428 - DNA, 4591 bp, Oryza sativa
atcctgcttaggataactaaaaggcaccacaaattaggcggatttgaaggaggacatcaacgtctttacaccatgatgtgatgttaatatgtgtgagattttctaaaaatcaactctttgtgtgatggatggagcattcgaggataaacattcaatcaattctttgtgggacagataagagtattaaaatgaagatatgccaaagtgtttaaagaaaaggagaaaaaaaagaaaatataagcatgccaaagttttagggattagaggatagaccactcaactcaacgagattaggggaaaaaaataaaaaggcaattaactaagcatgacaaagtttggaaaaggaaattagggaaaagggaaaaaaatatacatgttaaagtttcaaaagggggaattagggaaaaagaagaaaaattgaagtcaaagtttcagaaatgaaattaggaaaaaaaatagaagaaaaaagacatgtcaaaggttaaaaaaggatattagcaaaaaaaataaaaatgtcaaagtttcaaaaatgaaattagggaaaaaattaaaatgaaaattaggggaaaattttaaaaataaatgaaattagggaaaaaattaaaatgaaaattaggggaaaattttaaaaaaaataacaataagggcccatccgggttcgaaccggagacctcttgatctgcagtcaaatgctctaccactgagctatggaccctttgctgaatttattttggattttagtttactcaaagaaatttaatggcagtcttttctaattattgtgagatggtgatataatcaatgcaaatttcataaggtcactgtcactatactaaatagagcctatatttcttccatgacgactgcgcttacgcttgagagtggacttgatccttatccaaaaaggacaaacagaaacgcacgcacacaaaaacaagagaaaaggagccacctgaatcgaaacacagccgccagatcgcctcaaaaacaaagagaaaattccacgcgtgaagcgtttagactcgtgtccatcgatattgcggcgcgaaaagcaccgggcgtcctcctcccttcaacaaactacaaactacagtatgtatactattagagcaggtttaataatagcgcctgcggctggcgataattttttccacgtcagttagaatcaaactaatagctaacatgcacaataaataaactgtaacatatctgctcatcaatttatagatactattttcttctttaattatcttaccctctctcttcctttacttttctcgaccaatgactgtgattatcagcctctgtagtgcatagcagcgggcccacttctctcgggttgtgcgtgtagcccggcgactgtttagtcgccgacttatcccatttttgctcttctctccgcgccagctcagcatccaagccaacgtggcatttttatcgctggctttcatagcttattgcacctgttcttactagctcgtggaatacaggaatagcctcgtactatacaggaataaatgccattagcaaattcaacattagtcggccggtccactcattgaatagcttcgagtgtttcaagaaatgagtatatatcgcatttaagctctaaagtttaaaacggtgacataggctgtgtttagttggatccaaagtttggattttggttgaaattggagatgatgtgactaaaaagttgtgtgtgtatgataggttgatgtgatggaaaaggactgaagtttggatccaaactttggatctaaacacagccatagcttagaatataattgttgcaagtcattatatatataggacgagcgcgagattttgaaaagcagctaatgaggaggtatctgctgagtatatggaaaatgtggttttcctaagtttttagttatcttttcagattctgtttagaatatgggtgagagtatgaattatttgagatatcttgagtttctaggagaacctgtaattgcgaaaagcttctccgaaatctgtacatggctatagttagactatccaatgatcactagttacttcgtcggttatgacagaaggtagatgaactttcatcattgttgttttagctatggcaaagcaaatagatttagcaaagttcattcaattacaaattttagcattgatgctagtaaatatctttaaaaaatattgttggccaacatagaataactcatacaaaatcgacaattatttgtagacggagaaaccaagtttaattggtttcaacaatggagcatgacatctatcagtgttgagcctgcgcagctaccgtacgtacaagtaactaatctggtttaaaaatttgtgatatatcatgtcaacaaattatttactccctccgtcctattttaagtgtagccatgagttttcgtgtccaactttgatcgtccgccttatctgaaatatttttgtaattaatatttttattgttatgaatagtactttactcgtgacttatgtttttaaatttttttcaaataagacagacgatcaaaattggacgtggaaaaccatggttgcacttaaaatgggactgagggagtaccacataagcaggaacatattttagctaagtgagttaacgagtgagtggctggatagataaaaaaggcccccgcgttgccccacgcaggtgacacggccgtagcctaccttagtccccaccaccccttcgaccctcctcctccacttcgctgccacttgagggaccaagcgaaaaccgtacgacgaattaggatggctgcgatgggggcaaaagcgcaatccaatgcccagatctggcgcggagaaacgaggaaaaggcacaatggtgcattggcgaggagtcttggtgcggtggatagggtcaccaaagtggagcagtggcgtgttggggcagctgagatagagcgcgacggaaggtcatgactaggcctcctctgcgggcttggtggctagatttatatggatctggcatcccctcttaatcggctagagcaacacgagcaacaggcgggttgctatggcggcattagttttctggcatggatggaggccgtcaatattcatgcaaagggtttcggtgccaatgggcaaggtggaggttggtgcctataaggacgggcatgggcagagcatactagcatagtgaagtggatactatatgggatggagctgtccaacggcgaggagttgcacagtcagtgtcttgtcaaggaggctgagtcaatggtgaaggcatggagatcatcaaggagtaacagtggccggaggtggccgcaagaagtgggaggtggcacctgttgggtcgcacggggagacaaccgtcgggctgaacgatgaggaggtgatgggtgatgtgacttcaactcaagatggcagctcgatcagtcgtcacaacaggcacaattggtggatcagatggtgacggggtggttctctcttccatctgctaggcctcctccctctccttgagggcaagtactataagcctctacacacttgctcctgggtgccatgtaaactcacatgatgaggtggatgagagaaatgaagagagagagatgatgagccacctcttatgcaagaggcaatctctattcaaactccaaaagagatgagatcaagaggtcaataaattaataggaaacaaataaagtaaatttaatatggtgtattgggacaagtgtgctagaggtaatttattgtatatattgactcttaattaatgagttgatgatgtgaataagattgggaggctattagagcgagtacaataataggctacaagtcagctgtaagcacatgtggagtagagaagagaagagagagaaggaaagcgggctacagattcgtagccaactgcagcacaaactccaatatgtcgtgtgtacgagaggtgggaccatatattaatagtgtagtatatggttatagataactattgtatgaataagctattagattggatacagatgaattagagctaatagttggttgtactgttaaatttgctcttatcacccctactttaaaactttgctctgtaggtgttccccctctattgggagaaaattgacatttagccatattcaggatggggtttcgctggaatgccactcccgaatatggcttcgttataatgccattgtcaaatgaagccaacgtgctataatgccatttcaaccattttaactgatttccaaatgttttccatcattctctgacatatttgcccctagtcattttgttgactttgcaggggaaaggagaaaggggatcgatccccatccagtcgccggcggtggagcgtagcggcggcggctgcggcgacggggcatagctgcgagttggtggtcgccggctcctcgtcctcatcaccaccaccacgccaacatccgtcggctcgccgtgggcatgacggagagggcgaggagagaggagcggagctcgccgtgcgcgcgacggaggcgacgaacgtggtgaagtggtggggagttgcgggagggaggcataggggacgccggcgaggcactcgaggaggaggtcgtcgaggaggatggagatgggggtcggcgatgaggtgggc

SEQ ID NO: 20429 - DNA, 2709 bp, Oryza sativa
acggagaggaggaagacagaccgagccgtacggagaggaggaagacagagaggagagatgagataggatcaagggtattttggtcatctcaacaagaaaaaacattacaaaaaacattaaactgagaagaaatggatggaatggcattgcaacaagttacccctgtttgagggtggcattttaacgaaaccacttttgggagtggcatttcagcgaaaccccgttttgagaatggctaaatgtcaattttctcctctattggagggtgttcagacatccgttgcgaataaacatgaactcttgtcttcctcctcctagaatttaccttaaaaaagattagccaagtgaggtagtaattcaaacttcccttccatctatttatcgtgcagagtactcgatgcaaaaaaaacaagcagaaaataacacggcttggaatctcggggaacgaattaaacaaacgccattagcttccaaattaagcgacaatccaaccaacccgtcctgtcactggcactgtcactgccgccgtgccaccgtttttcaaatccccatctccaaaccattggcgcctcccatcacacccgcaaattacccattctacccctccattcctcacctcatctcacccctcttcaaaaccaaacctccatcaagtcttcgtctacatcacacactacacaaccaaagaaagaaagaaaagcgagatgccaccgcttactctcgattccctcttgcacggcggcggcggcgagccggaggacgagtgcgaagacgagttctccggttccgacgacgacggcgaggacggtggcggtggttctgaggaatggggcggcgacgttgatggcgagtatgacccgtactccccagcggagtcgctgtggctcaggatcggggaggacatcgactggagcgaggtcggggcggtgctggagcgggaggactccaccaagggcgcctccaaccccaagtcggccgcggcctgcagctgcgccggcgcgccggcggcgaggatgccgacgtgcgccggcggaggcgggacggcgaaggcggtcgtcatcgcggggctgcccgcggcggcgcggaaggcctcgcgggagcacgagcggcggcggcggctcggccgcgcccgagcccgcgcgcgggtgttcgccggggacgccgtggaggtggcggagcccgggtcgcccaaggtgtcctgcctcggcggcgtccggtcgcgggcgcgggcgcaacagccgtgctgtcccgccgcggcagctgcggggagccgccggtggtggtgcgcgccgtggttggtgagcgccgcgtgccgccggtgctggagcgccccgccaccgcgcgtgtaggtacggtggtggttgccggtggaagcaaaggtgaggcgtcgccgtcgagttcagaggcaatttggcgaaggcgacgccgcgacggcggacggcggggtcaggggtcgtgcaaccacgtacgcgacggctgaccggcgaaacgtacagtttggtcaggaattgtgggcccacctcctcgatgaatgtctatctgctttaagttccctgtgactgtacgtgaaagctgagtacggtggccgttcaaattggaattccaatgggcctcgatccatatgcctctccaatgtcacgctctgttttgttcatcttttgtgctaaatgtttcccaaatgttgctgtacaaatgcattgatacgaaattacagaaagaggtgcacataatacgccgccttatcacgagaaatatttgcatatatgtcattgtaaaaaagttggcttcgttcatatgcatcacttaaatgagcttagaaaaaatatcactctcaatcgaggagtcttcgttgaaatgtcatcctgaactattttgtcattggcctttttctttctcccttcgacacagacctcccttcgacacataaaaagctcatcggcagccaccgcaagctcaataccatgttaggaccttgtttgtaatatgaaggaagcattatattcggtataacggttaataaatataattaaaactcaaccataagggacggaaagttgtcattttcttatttttggtctttgttatgcatagtggctcgatagtacggcccatttagaagacgagaagttactactacaccatccgtttatattataagtcgtttgacttttttctaatcatttttttttcaaactttgatcaagtttgtaaaaaatatactaattttttaaatacaaaataggcatattattaaaatatatcaatgttaaatttaatggaactagtttagtaatcgtagatgttgctattttttttataaattcgatggtacctaaactgactaaaaaaaatcaacgtcttataaaaaaacggacgagcgaaaaaaccggacgagcgagaaaaaaaaaccgtaaatgtctgataaaaaaaagggcgaaaaaataatccgattgcgtgtcaaaaaagcgaaaaaaaatctctatctctatctctgtctctactacttaaaaaataataaaagatgtttccatcgtctgtaaaaaatagctaaaaaaaataaaaaaaggtctgactcctatccgattccctctcagaaacagaaaaaaagtccgactatagatccgattcttaatctataccgtgatatcttacacatcttggtgaaacaaaatgatgagcaagattaaagatctgtttaataaaacagaa

SEQ ID NO: 20430 - DNA, 2863 bp, Oryza sativa
ggcaaaaaaaaccgtagatctgaacgaaaaaaaatacgattcctataaaaggtaaaaaaaagtgaaaaaaatgctagattcgattcctttaaaaacaggaaaaaaagtcggattcctataaaggcgaaaaaaaacagaaaaaaaatcttaaaaagtttgtccaattccctaagaaagtggcgaaaaaaatggtttgtaaaaaatagaacgcttgttcgtataaaataaaaaatacacacatgaaaaaaaaaatagaaagggcgaaatttctaatcaatatatatctctactctatctctaatataatctaactatttttaaaaaaaatgcacgagagaataaaaacggttcaaacaaacgcgtgagaaaaaagtcagaaaaaagcaaaaaaaacacgctaaaaaggttttccatcttccataaaaaaaataaaaaaacgcgcgagaaaaattatttccatcgtcggtaacttttttaaaaaataaaacatgcgaggaaaaaactgtcagaaaaaacgcgccattttaaccaatggttttaaaaaaaccgcacaagaaaaaaacaccgtctattaaaaaaatcgctctgagtcggataggatccatcgattttttgccatctactacacggcttttatttcgtctatattctcttgtttttaaaaaaagcaacaaaaataacatttgaaaaaaaacaagcaaaaaaacacgcgagaaaataattggcaaaaaaaggcaaaaaacacacgagaaaagaaaagcaaaaaatggagaaaaatatggttttcgttataaagaaaaaagcaaaaagatcttgttagaaaaaaaaacttttagaaagaaatgcgtcatttctgaatggtttgagaaaatcgcacaagaaaaaaaacaccgtttgtataaaaacaagccgctcattaaaatacaaactcattaaaatacaaacattgccattgacataattattcatgaaaaacgtatattatcattagaattttttcacccgttgcaacgcacttgcatttttgctagtaacatataaaacgagggagtacctctcgcggtaagtactttttgtataacggcctttccggctgttgcaaaaaagggcggctttttttctgaaaaaaaaacctactcaaaagctgctcttagaaaaaaactgatccagccgtcaaaccggcaatcactcaatagattagcactcagagcaatctctcattatccaccattatttatgtagtttcaactgaacattcacacaagttcgaaaaagacatctggaatttacactggcatatatgatgcgtcacaacacaagcaggtacatttcccttttacagagtagctcctactaattcacatcagtaaaataaacacaccccaggggcatgctgttatttatttcttgactcctttcccactgtacagaaaaaaactttaaaagagtacttagctactagtatctgcgaatcaacatatcagaagcattcaaacagaacaccagcaccggatcgtgtgattgatcatcagtttcactgtcacccagcggatcaggttgggcgagcttccccgcccttctgcaatcagccgcgaaaaaacacaagcagaccgtgtggatcagttcatcattcattcataacccagaaattaaccaaatactcctaagttggaggagatcaagaccggctaattggtttgtttttaatttcaccttatcccctttggcggcggccgccctcttcgctgcatcggccttgtccttgtccgccttcctcctctccttctccagcttctccctctccatcttctgctccaccaaatcatgatcaaattcgacattcaaacgtcgtcagtcacaaacagcagtagcgatcaatgatcaggtgaccaccaacctgtatgtagacgctctcggcggcgcgctcctcctcgctgagcaccctgccggtgccgtcgctgaagtagcgcgccacgcgccggcctccctccatcctcctcgccaaaactgccgccgcccacgcgggttgatgaggcgccaccaccctcgccacggccgttcttgtagccatcttcttcttgctccccaagaacgtcttcttcttcctcttcttgctccccaagagtagagtacgacgacgacgcgtggatgatgactcgcgaatcgcgatccctctcgggagcttgccgacctcgacgtgggggcggggcgcccacctatttctagttaggtttttcactttgtcagtgtccgtcggatgctctcatcctgaccattttgcggcgcgaaaccgaagataaggatgggaatatgggattgagatgagaacgccggaactaaccggataaaagaaagaaagccaagtggtttggaaagcaactcgagtagtctgggcctaaaccatcctagtttgggcctcccggctcccggcccggccaaacccgatccatcggaagcacgcgaggcgaagtgattcgtgcagcgggttccaccaaccgcgcggcggatcggacggtggtgcgcgcctctcagccgccgagtccacggcgaccaccgcctcaccaacccacgcaaccaatgccatgtgaataacagaataagtgcgagtaagtgagccctgcggcgccgactcctttttttacgctcctctgccatttccaccctcttggagttggaggggagcacgcgccgaagcgacagcgcgaggtcgagcaggtgaagcgagtggggagggagggagatggcggggggcgggggcgcggggagtaaggtgtcggtcgccgccgtgcagttcgcctgcaccgacgtcgagtccgagaacgtcgacaccgcggagaggtatgttgtccggtatccctaaccc

SEQ ID NO: 20431 - DNA, 2478 bp, Oryza sativa
tttgagcggttctcgttaactgagtcacaagtgacctatattaattcccgcaaaaagaaagtaacctacgcaattgagttcattttcgccatgagatggctacactgtcaacaaatttatagcccgagcatactagaagataaaaaaaaagaaggaaaaagatagctagagcagtacctcaatcccttcctggattgcacaaactgttaagattgaatctgaagctatctttctcttctacttggtcgcaaagctgtgacccttatgccagttagtgtttctgattttgcagaagccgttgccgttcttttcacattctactttattcttttctcatggagatatctgagactgttccctttgttcattcaattattgaggcaccttccttcacattgtgattgtgttgtgtaccttttggttctgtgacgctgataagaataatgcctcttttttttttttaactttgtcacatctattgctatcattaaaccaaatagaatggcaataagttatacctctctagttaatagcttatactaaccacaaatctgagttataaacttttagttacatcattattgtagttgtaactctgacttctgactacaccgtgaaaactgaagcatgtttttcgacataactttcaataaattaactatatcaatgtacaccgagtcaactttccttttcatagcaacagagaagttcaatgccatttggaatttattttgtggcactcttgtggttaaaggctttatatttcaatattgaccaacttgataggctgcgatgtcttattttcttgatgataaatgtgaagaaaagaaacccaaaattgtttggcctgatcatcttactctctctctctcgcccccctacgtttctttcttataccttgagttagtaaataccaaacaaaccagagattttgctgaggagatctactgaaagtaaactcattcagggctttattattcatattgcaggttgataagagaagctcataagaaaggagcaaacattgtccttgttcaggtatatttatatgatacatatatgtgtgttcagtgatgttgacaagctgcaacttgcaatgcttgttttgaaaattgaaccagaaagagcaaatgggtttggatgaatattcttatttgcaatttcgtttaaattgttatgttttgtttgattcagttcagggcctaaaaagattaatggaatgatgattatgtgcactgaatctatatgtcaatgctttaggaactgtttgaggggcagtacttctgtcaagctcaaaggttggacttctttcaacgtgctaagccttataaagggaacccaactataatcaggtaggcttgcctcattacttgattcttgtcaggagtccacaagcaatgtatatgttctatttctgtagttatccctatgcttcattctttcttgttcgataggtttcaaaaacttgcaaaggagctggaagttgtaatacctgtcagcttttttgaggaggcgaacaatgcacattacaattcagtagccattattgatgctgatggcactgatcttggcctgtaccgcaaatcacatattccagatggaccaggtattgcccatgtatagtttatgacagattcactatagactagtcatggactatctgatttaaacaagttagctatttcctttttggctaggttatcaagagaaattttatttcaatcctggtgacaccggcttcaaggtaaacatggttttatatttatatcttgataggtttgcacttgttagtagtaaaaattcactaggtgttaatgtgtaattggtactatgcaggctttcaaaacgaagtatgctacaattggtgttggtaagttatttatgttgttcagtgatattaatgtttggttctgaaagagcatgagcagggtagtaactaatgcaatatcacctgactatcttttatcgctaaaccattatcctggtaggaatttgttgggatcagtggttcccagagtgtgcaagggccatggtgcttcagggggctgaaattttgttctatccaactgcaattggttctgagccccaggataataacctagattcccgagaacactggaagcgcgtcatgcaaggacatgctggtgctaacctggtactgctatttgttttgttataccttatgttttatcagctactcagctttattgagaaatcaaatatatacctatttttatttacgatccttcggtagtttctgatcattctggatccataccaatcatgcaggttccccttgttgcttctaacaggataggaagggaaaccgttgagactgagcatggtgaaagcactataacattcttcgggaattcattcatagcaggtaatttcagcatcttgttcttttactgctggatgtgtaacaaactaaaatcattagcatatggttgtgcagggccaaccggtgaaattgtg

SEQ ID NO: 20432 - DNA, 9440 bp, Oryza sativa
atatgggaactaaatgacaataagaaaggtttgaaggagcacaaaatatcatatttacccgataatagaagtaatcgtacagacgtaaaagatggtacttgtcagcagggtcatgcttgttgacatacttcaggagcttgatttcatcaaggctctggtcaaaaaaatctttgttgttttttatgattttaacacacacatccattcctgtgtgtaaatcatgtgcttgtatagctttactgaatgctgctgaacccagatattctgtgacatggtaacgtccagcaatgacagagttgagaacaacatggaaatttttgtcttcttcaaaaccagttctgttatattgtcagcaggatataatggagttaaaaaatatcgttagagataaacaaattaacaaacgcaaacaccaagcatgataccaagtatcattttaatacaaatgaactaataaagaaatgccaagtaattaaggaccagaaaaagagcacctgttttttctatgcacaatctttagattaaaagtttcaaattcttcttcctgggcctttatctgccttacttgctcttgcaatgctgctgcttcctcatcatccaatgtggttccagtgtcctcttcttgagcgtcgtctagcttgtgatgccgagaattcattgtgtcatctatttcatcataagtattattcaaagcagatgatgcacttgaatttcttgacctaacaacatcagaagccatttcatctcgagagctccttagggaagactcactattctttttcctccatgtggcaagcatatcatctgataccatgccgttttgcaagtcatcaggatcattgatggtatacatatcaaccttctttgaccataacggtttaacatcagattcaacattttttccactatgcaatggtggaggaaaggagaatccaccgtcagcatatgatgcacctggtggtaaaacgcccttctgattatcaataaaattcaattgttcctgttttgcccctttcgcatttattcttttcttttctgtttcctgctgagaatttctttttccactaacactcagattactttcattaaagtattcaatatctccttcgctgcttcctccaatcagactttcacgcacctcactgccaatatcagcagcatcactgctaatgccaacaccaattgacctaactgaaccatgctgatcatcctccacaaatgggtcatcaggatgaggacgttcagaatcattaaggaattttccatttcctaacatgcctaattcactattctgtgaaacgaaaccctgccagactggttctgaatgcatcaaatttagttcttctgggtccaaaagctggccatcatactgagcaatcaaatcattatcaggaattccatgccccattggcccctccgaagtacctatttgtgcaatgttcttcccgtgaaaatattgttcgccagatatgtaagaatcctcctcaacaaatgattggtcatcatcatcatcctttgtgggacgatcatgccgatcaggcccacttgtgtgaccagttgccttctcattgtcactaggatagtcaatttcatgtgctaaaaaccaggtttcatcctcaattggttgccgggtgtacccaacatcgtcatcatcatcgtattcatcagaatcccagtattcatttggatattcaagtgaatcatcaccaattgttgcaaagcccgataccaagtcagaagtatcctctgcaataccttgactgacagagaaccagttattactaattgtgcgtcttccacctgaatttgtaaacatatagttcaaggtcaaaaacttatgtagcatcaaacatcagagaggctaagaatcatggaaaacaatctgatataatttcactatttaaaagtttgcatgtctgtattataaaaagacaaaattatcaactgagagttagaaaaaatcccataaaacattaaaaagcacatcaattagaaaaggcataagccaacgtcaaatattcctttaggaaagcaaggtcaaaaacacaaacaaaacactgtgacattatgctaaatgtttcacagtacacaaggaagaacacatcctggaatctactcagtgtccgtgaaacttcagtaatgaaaaatcccatattttgctcacatgaaaatggcctcgcaatgcctacttcagtgcccgatagaagtcatctaattatgtatcattcaaatgaaaagtaatacatgcgcttctgcaactacagctacttgagtagaaataacaaactcatgataccaatgcacccatgattttgaaaggtgagaaaatatgctcgctttttttcttgatgcaaaacctgcaacagaaggaatccataatgcggactgctcgactgttgtcgctatcacctaatacatatgatgcagattacatgtagatttagcccatttcaagttttgtcctacagaacatatgtcaaaattctggtctagaaaacaaccaggtgaccaggtctaggagagttaccaacatgaaatacagcttatagaaaatcgaattactaaaatacaatggtgttagaacaattatttacctaggcaacagaacatacaacatttacaagtatattgaaattccaaagagatactcaagtcatgagacatttccaattcgtagattttttttggaatttacgcagagaaaaagaacaattcaactaggtctaaagccattgtattgttccattttacacaacagaaggagaaaaaaaaatcatattcaacacactatagctgtatagcaggagtcagtaccgctactgttttttcttgcttcattcatgcatccatagttcaattcactaataatatgtcagtttcatggggcgggtgcacaagtatgcggtaggttttacagataatttgatgtaagatgagcatgtaaattcaaagcagactactgtggagcaatgtaccatgttgcttaaggggaaggtagaatatatttcatccaccttgtgttctaagtaaaatattgtgtttccatgtgaccactaaaaatgttatcatacctgatggtgttatttcttgtccgatgggaacatcaagataagacccaatcataaaagcatggtcagcactggggtgcttggctcctgacccgttatggttgaccttttcctcccaattcatattaactagcttgtcctcagacttgagcctcacaggaggtaactttggaagctcctcacgttgattgtctccaataagctgcagatcgaagcaacggtcagcaacctgatctgcgttctcctgggacttccctgagtaatactgcctgttcccctcatcaagctgccccttagttgcttttccaacacagtccgcatcaatgcttttcttagcgtctttcctctcatttccatcatggtgtgctgtatggtaactggatgatggattttctgcagggaatggaagcactgtcttaactgtacatccattcaagagctcctctttttctggaacaagatttttatccctggaatggcctggttcatttatttcatttctccctgtccctgcaacatccactttcccctttcctcttccaaaagaaaccttttgctcaagcacaggaccaggttgctcggtcccaacaccacgatctctcttctcagctacaacggcgccgcgccgatgtcttggcacctcctccgacaccaatagctctgccagttgctccatagtgctgtttgcaatgctaaaattccaaggatacagatcccctgtattgttctcctgagccaggccaatccccaaccctttcctcccatcagacccattcggcaggcctccaacatcaatctccttcacgataaactccctcgacgagtccgcgctcctcaccgatgcagcacctctaggccctgcattggaacctgcctcggagccatcttgctcatcgtcctccttgggctccgctacacgcctctgcaccgtcggcccgttgctcgcatcccctcggccatttagctcccctcggagcgcggcctcggccttggcgaagcggttcttctgcaggaactccagcaccagatcgatgttctccgccatggttccctccaataccagctaacccagaggccgaaccccaccgaaatgcttacccaaaaccgccagacgagctaaaaggtggcaaaccccagccacggggtcaaccgaatcgaagcttcagcaacctccccccaactcaggaggccctcccaatgccgcgccgcagccagccacagatcggcggcgcgcgcgcgcgcgtatccccgcgaatcgagccccgcagctcctccgaagcaccacaggaagaaccaacccaacccccttagccgagacggcggcggcccggggaggccgagcaggcacgggcccgacaaccctcaccacccgaatcgcggaaaccctagccgcgcgtccccccaaccccacgccggggaacccagggggggtgagggtgggaagggagggaggccgcggaggggatgaggaacgggggcgcgcgtggggcgaggtcagcgggaggtggggcggggcagatcgagagcggggcgcggccgagcggatccggcggcggcggcgagggggcggcggcggaggcggaggcggaggcggggaagcatttggaggcgcggggtgcgggggatcagggcgcggccggcgtggctgggggcagcatattcgcgcagctgtggtgggggcgtcgcgtcgcggcggtggtggtggtgtggtaaaacaaacggaaagggttgagccccaaaagaaaaaaaaagtaaagtaaatggttttttattacaatctgggatttttccttttctttctttttttttttctcacactatcgtttgggctcgtttggtgtttagcgctcgggcgtcgtggggagtgggggatggatcgacagtcagataagctagggtacgttgcaattggttggggcgttcaaaatttttttggacccggtggccgtggctgaattgggtgcgggggagcgacaacggtccatgaacccccatgcggcgcggctggccaggggagtgtgctggtgctggatggattgttgtttatccgctaataaaaacattgttataatcatatagtatggttttagtttttggttcatggataaggttttttttggttttatactgttttttttctttcacaacctcaattggactgatgggtagggcatagttatcgtaacatgtctattcctacagcattctcttatgtatacaagtttttctttcgaatgtattttagctgttagtatactttagtatatacccctccgtccctaaaaaagccaacctaggactttgatgggacatgatttggacaggcagtcagtcctaggttggctttttttttttacggagggagtaagttataggctcatatacatacaataagatagtgcaaatattactttcggctctataacaactaagatgtaaaagctaagcctctaccgcaactaagatataaaagccatgttataggtttgtatcaaactttattgaagtggtagtttcattgatacacgccatcatgtcttaaaaaccattagttcttttttttggaaaaaaaaggaaatatgagttgcccatgccttacccatccatttctatggtgaattcacataaatgattatgacatgtatagtaggatatagttcgctagaatgtgcatctcctgtcacctaatttatgtggtatggtgggggaatcaacattccatcgaccttagcaagcttataaaaaattctttactatttcatgttaatagaataagaggtttgttttagccggggtttcaaattttgaaactagggtttctgcccggggggaggcgaaagaaccgaaatttccgaatttttagaaattttggatttttttcatacgtcattttttgaaattttgactgattttgaatggatttgaataaaattttaccaaattcgcaaaaaattgtaaaaaactgaaagtttcggggcgagatatgagcatttcgggagggcggcgaaatttcatgccctggtttcagcacgtagtgctaacatcagtgataggcatttcaatttagagaaaatacaacaaatactactgataatggctctattccaaaaaatatcatcgcaccaacaaacttatcttagaaatgccatcatcatcagggttccatccatttcaccatgtgtttccatgtaagaatgtgatagggttaacgtagaaaaatagatggaaacccgacaacaatggtatttcttggacaaactagctcgtacgatggcattacaaagtgaatgaggcctaagatgcactcacgggcaccttgcttattagagttgtgtttgagaggagatgaatcatcaacacatggttaattgagtatgaattatttttaattttaataatggattaatatgtttttaaaacattttttctataaattttttaaagacacctttttttttccttcaaatgcaccctaatagtttaaacactcgatcatccgtgagtactgcatagcaccgggccgggccgcctggcactcctgcatgaacaggcgcgggctaagaaaagccctggccctcctcgggcccaaaacgagaggggcgtggcgcgcttggcgcgaggagaggggtgtggtggtgcggtttggccaaggaaggagcatcggacgcgccgcctctgccttttccttttcacatttccccctccttccctcctgccctgcctcctcggccggcgcggcgccccatgtacgtggctcgaccgacggcgatcgccggccctacccctaccgcccgcggcgcacgtcgccttccggctccgggattgttaattaccgtttcgagtgagacacttttgccccgcgtcgcgtcgcgattctgcagggattcatctgtcctgatcatctatccattcatctgttcccttacctaatttctctgcacagatccagcagtttgacagcaaagagaaacagagggatcatcgaggaaaaaaaaaagggctgggctacaagcacatccagatccaggctggagtaggaggcagctgagcgagtgttgttccagtggtgcctgccaacggaggtggctggctcatgaacattcacccgtacaaccagacaaccgtcagcaagtgcagaaaagagggacaccaaatttcaatttcaggtacatctgctattctgctttgggtcctgtttgtaaagtttaatattctgagaaacagctggagagaagatagggaagctgaaaaacccagtttctagcttgtttctagcttttaattcattttttggattctgcagctacagtttctctcaaactaagtgaaaattagaactgttttttttgggaggggtggggggagagcttttggcagtagcttcttctagaagaatcttcagctgccagaagctcccacaaccaggcccttacttcctagttgcactaggcctgtaaaggtcccatttgagttacaggccccatttgagttcactgaagattagcgcataattaataaaattttaattattttaacttaaaagcaatctctatatagatttttttttgtgcaaaaaacacgacgtttagcaggtttagaaaacgtgctaacgaaaaccaatgtgaaatccgtaccttaatcaagaacaggccctaagtaagaaaagctttattagattctacttttcgaactagtgagtaaagtcaaaccatattttattcatgtagtagtaacttgaatgctctcagcatcaagatacagcatattacagattggtgttttcacttccaatcttaatgagttcaggcgagcaacagcacgcatttgcaacttagaagattacacatactgacattagcatggtgaagaagacgacagtacataaccaaatgtgccatacgaccatttatctgtaaagtcaaccatttatctgcagccagtgaatcttcagtctgcaagtacgtccaatcctaagcacaagccaccgtcgtggctatacgaacgaactgcagaaaacacaactctttagcaaaagtatcacactggtactttgaaaaagtggaagttgttcgcaagagaaataaatatatgaaatcaattgtttgtagttttatctctaaaatggacagcaatttagataaatcatatttgctagtcatctgtaccaagtgacaaagtgtacagattaagaggatgtcataagccaatgtatttcagaaatggtagaaaaatatgtttgtagctaaaaaaaatcagaatggaagaagcgaagcctacaggacatggtggttctataggcactcttgtagccgcttaaatagagcacgagtcaggaaaagacgcagtttcagcagtggactcgggttaactttagtccctatatttagacactaatttagagtattaaatatagactacttacaaaactaattacataaatgaaagctaattcacgagacaaattttttaagcctaattaatccataattagagaatgtttactgtagcatcacataggctaatcatggattaattaggctcaatagattcgtctcgcgaattagtccaagattatggatgggttttattaatagtctacgtttaatatttataattagtgtccaaacatccgatgtgatagggacttgaaagttttagtcccatctaaacagggtctcaagcaaaacaaactgagcagcctaaacagtcaattaagtaatttcacataccatttcatgattattttgctggagcagaagcaagttcgacgctgaggatgaaggttgacatgccagcttccctcatatgtcggacatcgccattcatgagcctcagcaggtttctagaaaccgaagactcatgccttcatccgactgctccttattgtcatcctcgtacatttgtgacagcagatctgctgggactcctttgccctggtgcttgatcctgaaaaacattgatccacaagagttaatacacatcattttatacttcaagactgtcttaacagaaagaagagtaagcgtgcaaatgtcatgactaacatacctaagttctaggtctatgagatgaaggttttccccaatgctgttcttggtcaggctacaagagatctcaacagaacccccaacaggagagaacttcactgagacgaataggaagtcagagagaatctgctgtagtcgaacaccatccccgtagactgtttgcttcatatatctctccggtaggttgcaagagactctaatcccttttccctggcaagttatgagtacttgacttacagcagccacaaacacatcttgcaatacaaactcaaccatctccaaatccaagcaactagacctgtgaacacagcagcaggaaattagt

SEQ ID NO: 20433 - DNA, 8793 bp, Oryza sativa
tgcaacattgacctccttcatctgctcttcattcagacctgtgttcttcagtgctttcctagagtaaagcatacctgagagagggttgttgattgcatgtctcatgtaggagtaagctttcaactttgttagtgcattctgctgtgaggcttgctgcacatgtagtgcatgttgcagctcatgactaggaacttgaatgaaacaaaatactccagtgatgacaccatctgcatttacttttctgttaacagaaagaaggcactcgatatacttcccgttccggtcgaagaagctgaatggagccttttctgtttcatcaccagctaatgcactgttgataagaatgcagagacttacaaatgcatctttattcttcacaagacaggaggcgttggtgctatcaaacacctcaccaagaagcatcttattgatcacctcatctctatgccacccggtcaatttcgtcatggcagcattccactcagagcaccatccaaattcgtcagcaccaaatatgggaggaataagcgggcttggattgtgaataattgctttgtagtctccctcaacccgagtaaatttgtccatgaccaacttatgaacagtcatatcttgtgcaacaaagcacacaccaacaacatggtcgtgaaggtcccggctggcacaggcattcacaaccaagataacagggccatcatctctcttggagccatgagttttcacctcaaatttcacttccttctcttctttgcctgatcaatcaaagaaatgtttagaaatcaatcaacccacaacgcagctgaatgtcaagtattaatgtatgagcatgacaatcaaatgtagcatatctaggcattgaacattagaaagcaaccccaaagtttttttgataaatcgaattgccaaataagcagaaacttgaaaaatactgggggaatagacaaaaaccactatagctaatttacccaccttgcaaagctaaatacagcatcctctggacaactggtacagaagattcctctacaacggtaagtatgtgtcttccaatagcctcatctactctcaaccctgtcaactcagcaaccttctgattccatccattgaccaatccattgctatctacagccaagattgggacagttgctgtttccatgagacgaaccatttcacttgtaactgcctgcaattcagcaagcccatcaagcttgagatcaccaacctgattatctaaactagcggcccttgttggcttgatgtcatcattcagtgtccctctaagtataagttgtaatgagtgaatagcatccatctcatagtcattccaaggcaagctcttcatcttgacaacctcaaggaatgccttgaaggacagcctagggtgcattcttctgctgtcatccttgtctgatggatcatgttttgcacctccccatctgatttcagcagctgtatgtgacctgaaccagaacaggatatccttggaatttattttagctactgccattccacaaatcatatcaccaagagcagcagctcctggatatccagcatcatgtaggctatcagtactcaggccagtggaatccctgtggacatctgacagccagaaggcaatatcacgtatctgagactcagttggagcattctgtagccgccacacttttcccccatacaaaagagcagcaccatcacatttcacaaggtccatgatgttgggagtccctgatactatactcagaggagaggattccctgagaagcatgtcagagagcattgtttgcatcctcaatatgcttttctcgcgtacttgcctctctaattcaaactccttgttaacatggacagcaaacacttgtgctaagaactcacaggcataccgcaatgggaaaggaacatatctggggctctcatggtggcaaacaaggagtccccatagtttcttcctcttctgctgttgtgcaggttgatcagccccaacttcatcatcatcctcattctcattaaccacaacagccatgacaagggatgcaatcgagttcatgttctccatatactgaagatgacaactgtgtggtgccctcagtgttgaaccacataagctaatatccaagtggagcgactcatcttcgataatcttgatagatcttgcacggcaatcacaaatcatccggactttgttcttcatgaaaagaaacctggctgcctgagggatatcagtagctggataatgcaggccaagataaggttcaagaccaggctttgtgatctcagcaaagacttcaccatggtcatcttcatggaacttataagccataactctatcatatcctgtgaggtcaaagagttccttgaccaccgtattgcatagcacctccatgcttccacctggcagtgactggatcttagagattgccttggcagcaagtttgtaagattgcaaagccccagcggcagttgctggaaattctgtaggtttcacaggctcaaagtctaccaccaaacaaccagttgcccgatgaacaatggcatagaaaggcttgcctgaggtcttgcattgaactaggatagggttcagcaaggaaacatcagcaaatcccagtgccttctgcagtgctgtggcacctgggtcagtgaaaagagaccatacattggtgccaatgcgtagctttgggggatcatcaacacttggcactgcatggctgacagttgtaagcatctctggtgcattctcgctgagcgctataacattgaaggtcttctcatcaagggccaacaagcaaccaaatggttggattagctttgctctctgaatgtgatgcaagtaagctatgaccttctcagaacgagcttgctgctcaggtccagtagttctctgtgcttcaaccaatttggagtaatcaaaggagtcgccatattcttcatattcagcattgagttcagcatcaagagttgtttgtgctaatatccttgcccgggagctttggcgggtcctgctggatgaactggaacattgagtaggtcttgaagaagacatcttctgccttgattacctgaatcactcaagagtcttatctgctgtataccactcctgctgaacaagataatataagttgaaaacatcaatcagtaaaacaaaaaagtatagcaatccactaatatcaatagatgcctcaatctagtggataaatgtggactatcaactttgatcaatgcctaaaaccacatgattagacttccttgttgcctgagcagttcagaaaagagaaatgtttttgtctttcaagagcttgagaaatataaaaagttagccctgctagaactcgatggatgaagtaagaacggttgacgaagtaaaataatacaatgttaaagatgctattgaagaacggtcaacaaatcttagagcattagaggactaaagtttctccaaatacaactgcaggcacttgtgttagcaaataagcatgacatctcctgtaaagccaaaacctttctgaggaatttccttcactaatctgtgataagatattctctactttgtatttgtcattcatctgattttcattggcattacatggccagtctttaagattttcaaaggcatgaaatgcaggaaatctagtttacattctaaaaacagtataaaaggaaagcttccacattctataaattactacgttgattggaggaacgctaaaacatatccattatacttattgtggtggatctagattatagtgtgggagattaataggatatatattagagctatttcataagaaacactgttgcatattagtttcgatacaaacatgttattagtatctaactgcataattgcttggaaattctgctagtttgatgtttagatttactctttttcagcctaatattccctctgttaacacatgtatgccactctgacatgggcatggtaaatggtaatctaatacaacttcgagtctttcaccactatacataaaactatttagattggcgctgtaaaaacagcaacaatagatctgttagggaaaaaaaattctccaaagtaatataatttttaaagggtttcatttaaaataataattgaaataagccgtcaaaggtaccttggactcacggaggctgcactttcactagtctcatggaccaaaaccccaactaaatctcatatgaaggtactatactgggccacatactgggatcagttttaggaccagttgcaaaagtgtgaggacaaggacaatatccagtttgcatggcggacttttgagacaatgatcatgcaaatcttcgccatggatggagatttagaaatatgattgattcctgattcttttaattagtccttatgtcaatgttttcatatggttttcttgtcctcttggtgtttgttactttcagccagacgtgctgcaaattttgtaatggtgggttgtaatatctgctgatgcaaagacccggatttcccattatctaaaaatctcatggaactatattttttaccaaaaagaaactacaaaccatattcagttgtagttactaataaaaaggtgaaatatcttagctgaatggaagttcacagacatcacagaagacggacttgctctaaacagctgaacttagcatgtccatgaaattagtatgatggactaatacgaatgatcagcatcaagtgcatttttatcatttggaaggttttatagaaagcataaaagagtcgcttatctaaaaaaaaactgaagccgcttattatattactgaaacaggttttataagtctttgctgtgcatacaacagtggctaaaaaaacaacttgtggcttaacttgtttgcaagtccaaatttggagcaaaaccccttaacaggacgagcaacatcgtttggagtttggactactcgctcctccaatagtaggctcttatgtagcaacattttcaattgaactcatcattttgttttctctttatcccaacatatggggattttgagttatggcttttctgacaataaaaaacaacaactaagcaaagccagattaaatcttctcaatatttctgcaacagcacacttctccaggatcagcaagttgttcctgctgctttccactacccctcacctttgttcctatcctcttcctgtaccaaggcttgggggtgagtcagtggacactgacgtggcacatggatagaagcactgaagcagtaccccctctaccaagaaccacccagtggcacccaaagtccaagaaatccaccactaaacaaatcctaaaaaaacccatctcaacagagacaagcaccgaattttatcctctttgcttgccatccatcacaaaccccaggaaaggggatttctgaatcatcaatcatcagttcatcacactcgcatacaagttcaagtttttttgttaatctcaaagatgctaagccctgatcacaaaaaatacgaactaaacaagagcaccctccagtccccaactcccaaacatctctcaccacatctcttgtcccccccaaaatcatcagagaaagagaacaccacactacagggcagcacagcccgttcctctccaagaaacgaacaagcagcagatgatgctagctaaggcagcatccaaccatacaagcgaagagcagcaaagatgggggaagaggagggatcgaccggggtacctgctcggctcagctcagctctgctccagtagtggcggagctgtggactgtgcgggaagaagaggaggaggcagacgagacaaagccaaggcagccgcactcgggtggcagtggcgagctgaataaataaatagcctagcctgtgatggtgtgggggctcagctagtcagctgtgctgtgcttaggccggggctcgcgtcgcatcgcacgcacgcaccggccccatccttcccccatcaccccgatcaccggccggcgcggatggggtcgccgtggggaggtgaggtgtcgcggatttacctcgacgccaacctggagttaattaccgccaataattaacctagggagatatatatatatatatatatatatatatatatatatatatatatatatatatatatatatatatatatatatatatatataaaatttgtgtggtgctccatggtgcccgggcaccattgttgaaattgagtatatacctaattcaaatgagtatgaaactttttcaattacttagatattaacattagctactttactaactagttcaaagcaagtttgaactgaatttgaacttgtttttgttagattttgattctaggtatatagcatccatacatataattagttaggtatgtaatcatggattgtgaaataaagttaaatttgagttgttttgttgataggtataggtatgaatcgagttattataattaggtatatactcacaatttgaaaattttgaaaaatttgagtgattttgtgtatttgatatcatggtgcccgggcaccatggtgccccatatgagtgtcctatatatatatatataaataatacaaagggaaaatttagaaaacatgtaaaataaacgtagatcaactgattgagtttcttgcagtgggatctattcacctatgactaaggcaatgtttggctaatgtgatagggaaatgattttccacccaccaaaagacatatttaaatcttaatcattcattctccctctttcatttaatcctaacccttcgttcatttactaatcccaatcccactccctatttttcattatccaaacacaccctaattacttttttaagtagtagatgacgtgttcaatctcaaaatatactaataagtttgtattaggaaaaataaaattcagaaaataccattgcaagatggatacgtgaggtgtaaaataccattttacgtgataataaatgtatcaataagatgatttttttttacttcgtggattttttaacaataagaccaaataaattggccgttatatttatgaccgtgtttttattaaaggacaccaaaatttctgtatatatttacactatgaattatatgtagtgtaatataaattttaaatatttatagcctgatttttaaatcttacgaaacttcagtacttgcttatgtacttaaaatccttggaaaaattgctagtgtaacttccacacataaatagaaaagttaatgagaaagagatatgaaacatggagtacatacaagagagagttaggctgagttcggtaaacggtatctttcttcttttttaatcacgtttcctgaacaattaaatagcgtatttcatgtgattttttaaaaaataaatatattttttccaagtttataataataatcgattaattatgcactaatatgtttttttcgcatgacgtccaaaatcctagctaactcaacgggtctacctttctcagtcctagtaataatcacttaatagttcctaaaaaaatgtaatcgcgtaataaaaaaagtgacttagcaaaactgtttaacctgtcctgcttaacccaatagcctgcgtagtaaactagtactcctcccttctttaagcacaatccgtaagctgattgggacagaagaacgcatagaaaaactcccaacaaacttacaaatttagtaatagtacgcagctgtacaccagtggccatgatactctattggacgaacagctcggggttagtagagattactagattatagatcgagattagcgttagtgccatcattatcaccatcatctaattggggtttaattaagtagagcgagggagcagtggccaagagttggagttgcacttgctctttgggctttggttctttttcgacttcctttttcgttaactgcaaaagaatttcttactacttttgggtgacagtgcacccgtggccctcctaggggtttggtatttggggctttccacttgcggacatggccatgtgacccgcacgtgaacgcccatgcccccgcgtctggggctctcggatgctttcggctcgcaacggggtttggcttttcttttttttcttttccgcttttgaagactgggatcaggcacaattcatcgcgtgatctgatcctagctcctgtgggaattctgagaggaaggtcatatgaatctagtaaaaaaaaatacaatggaaactaatcttttattatgatataatttttaaataacttttgtaaaaaaaatccccagatagcatgagtatcacagaacactaggatttatggatgtttcaataaataatgcattttttaagcaattagtaatctagtatcacaaaaacatagttccattaattttcggtcacttgacaggtgaactccgtgtgttaatctcacgtgccttttcttcccctttcttagtctggtgacttggtgagagcaagtttaatactccgtttcgaaatgtttgacgccgttgactttttagcacatgtttgaccgttcgtcttattcaaaaaatttaggtaattattaattcttttcatatcatttgattcattgttaaatatattttcatgtaggcatgcaattttacatatttcacaaaagtttttgaataagacgaacggtcaaacatgtgctaaaaagtcaacgttgtcaaacatttcgaaacggagggagtagtatagccaactactagcttcaaatcatctatagctaatataataacacattcatacaatagttaactataaaaatatactcactctgttccacaatataagggattttcagtttttgcttgcaacgtttgaccactcgtcttattcaaatttttttgcaaa

SEQ ID NO: 20434 - DNA, 1612 bp, Oryza sativa
cgtgagaagataaggaatgagtgttctactaggtaagaaaagatagggcttgtttagaagagattttggcagttgcagtttctatcagaattgaaagctcctcaaacagtccagtttatgagaagttgtagttatataatcgagaaaataaactagaagctaaaaattagggttcctagcttttttcagatttttagaagctgacttactaccaactaattattttttcagaatctttgaactttcccaaataggaccatagtccgacttggagctatctagaaccgcctgagataatatccaaaatgagccctcaagttctttgtgaacaaaggatagttctaaagtataaattgaccttcacaaaagggagagggaatccagtatcgcctatttaatattgagtacacaaagacacagcaagctaatatcctcgagtcgtacaaggagtttcttgaaggcaatccgccgaccgcatcaccaaggcatttcaccaagatgggaaaatggtagtggatgacgtaagataaagaggtcatggataccactacaatcactccctctgctatacactaagatgctatgctaggatgaggtagagcttagtgcgaaagatccaatggtaggtgagggtaaatccaacaacaaagcttgatgcaaatgatcctgtggttgctggtagagtaaaaagctcagagttgcataggcggtactcattgatactatgagtgttagtagccgtgaaatttgaaactcggcaaagatgaacaatgtgacatactggatcgatgatttgctagcttatagctcaactccgagtaacttggccattgttgataaaagaagggagataagaagcaatggctaacaaacgtggcccacaagttagtatgatagagttaacagagcggggtttatgtaacaagttaccttaaaatcttatgtttattgaaacaaaccccaaaatccaaggttttgtgacaggcataactcaaaacctaatactttgtgaaatttacttaaagtttatttgtcacacgttgtttcaaacaaaaatatagttagaaaaggagcgagcagtgtttgtacttttcttttttgaaagagaattattcatgatttttacatttggcactagtcactcgtatgtatgttctcttacataacatatatagtgtaggccaagtagaccatagaccactctagttacatacgagtagtttcgatgaaaatgaggggagacaaggatgcatgacgaagtactgaacggagctaataatgcatcgaataatgaatgattaaattatcatcactaaattagcgacgaattaaaacactgaaaacaaaaagagagaagacatcaacatctctgaatcaagctaatgatctcctggacgagcactgatgagaggctgcagagccttgacgacgatcgtcatgttgggcctgaaatcagcctcgtactggacgcacagcgccgccaccgccgcgagctgggacacatgaacattttgattcgttcagaaaatataccagattatacacagcaagtttgctaagccgatcctgacacaaacgacttgctgatctgaagaaaaaaaacagttcagaa

SEQ ID NO: 20435 - DNA, 8245 bp, Oryza sativa
ttcctgcagcccatacatagtgtagtatatcgtttagttaattcgttatgttataagttgttcaaaacagaaatgtatgaggatcaaaccacaatattgcaattgattactatttgtggttctcctcctatattcaataaaattgtcacactcaaaatgcgggtccgttaaaagcaaaagagattactatttgtgtttggtctagaccatcaaatatattgagaacaaatatgttatacatctccaattttaatatcacagttaaacgatttgccaccgatttcgatagtcgagttcatattgtcatcgtggattcgtgatcgagcttactctggcgcgtggtagccgaaggtgccgagcaccttggtggagtggaggcgggcggcggagtccggcgactggttggtgaggttgaagtcgccgatcttggcgtcgtggccgtcgaagacgagcgcgttgctggagcggatgtcgcggtggacgatcggtggctgcgcgcgctcgtgcaggtactccagtcccctcgccgcgccgtacgcgatccgtgctcgctggctccacgtcaacaccggcccgggctccgcccccttcacccccttcttccctgcaataataaaaatcatgaaaaccccacaatgagatgcaaaataccataaaattcggaaaatactacagcacggtatccggttcgaacagaataaagtattaactgatacaccgtttaaacggaatgatacctctgaggtatcacctgatactagtaaggtatcagttgatatctaggtatcagacgatacctctgaggtatcatcctgtccgaacaggatatggacctgtagtatttccctaaaatttatgcgtttcaaacggggttcctttagaacaattggtgcaacgacacgtgaatggtcgtcgttgatgcacagcatatgttgtgatgagtactactagtagtgagtttaatttggttttttttgtaccgtggaggatgtcgtagagggagcctttggtggcgaactcgtagagcacgatgcggttgttgagctccaggcagtagcccagcagctgggtgaagtggtcgcacttgagcctggacaccacggacagctgcgtgcagtgcgtgccgtgtcgtgaccgatagaggcaagaacaaaacacgtacgcgagttagtttttggcgctgatgaatactcttggagtagcatttgcacttttttttttcttgctgaatttgaaccgaatgtgcggttttctcgtttacctgcgcgcagaagtcggcttctgactggccggagccgccgttgttgtcgaacatcttgacggcggcggcctcgccggtgctcagcgtggcgcggtacacgcggccataggatccctccccgaccagcgacctgtcgccgaagttgccggtgagacggttgagctccgccagcgccacggccgggacgtcgatcggcagcaccttcgccggcgcgccgccggctctcggcgcgttcggccctctcggcggccctgcattccaaagtgtcatcacgacggccggcggcgaacattacggacaaattaatcaactaggactgcgcaattcgaacctggtgctcgcggtggcggcgccgccgggttggcggccggcgcgccgtggagctcctcctcggcgccgctgcaacaccacatcgtgcgacgcagatagctagacagacagcttagctagctagctgtgcaagaacgattaattcagctaataacttagcttaattagccgctcctctcgcacgttgaaggattcggagctagctggttcaacgatactactactatagcatatatacatcgcgacgcgccgagtttgccgcgacaaactcgcgcgaaatgcacgcacgcgggaagacaacgacaaggccggtctcgcgacgtgcgaccctcgcatagaatttttgatgcaccattatatttcgattttgctatatatttatcgataaattttctctcaaaaatttgacagatgtaattacagtacaatcatagtataattacactgtaacttgcatgtaattacactgtaactatagtgtaacttgtatgtcactttcaaaaatctctacgtaatatgttatttcggtaaaacagaagttgtgggaacaaatccttacacatatatgtgtgctgtgattttatttttcttcctcaccaaaacaaatcttgtaatagatctaaaggtttaaaattacatgaaacttatatacaagttacactgtagttacgtgcaagttacagtgtaattacatataagaattatactacgattgtactataattatatctgtcaaattgtcgataaatgtataggtggtcccttatattttgcccccctttttttagcccaaatacgcacgagagtggcggatccagaaaatcgattcgttgatgccataacttatttatcattgtcatagtatactaattatatttaaatcatgatgttataatatatggataaatagttttgttatatattttactacaagtcgtcggtatcatctgacaccggttcttatactgttggtctgctcctggtacaaccaaatagcatacatggtactagagcagatgcggttggtgtcaagctcgtacgtgtatgtacataccacgcatgtcgtggactacaacgaaccaatcatcgtgtgctaagcccatgtgtgtacatagtttagcttcatggagctaaagatcggttagtttaattattatgctgctgttagtaatcggttgagcaatgatttatttagctgggtagagattacttagttttagttctctagatttaatgcgaatacaattcggactgcaggctgatcaaccacgtttgcgccgcggtccgctccgttgatcgatccggcgtcgtgctcccatgctgccttcacgtcgtcagcaacaacggcttggccggtttagaacagagcaccacatgttttcgagtgagctagttggtgattttcagaatatcgacatggacccggcgtgtgaaagttacacacacattatattattgaagttattacaatgtaatcatactatatttatatttgatcgatagatatatagtaaatacgaaaacaataattatggtatcggatgatcaaatcacggtgctttgctgatatcacctcttctaccgtctgctgcaccgtgaaacaaacgccagctcagaagaagctcaacctgcttacctgcagttctttgccccagagatctccggtgtctaccaccggtcgtcgtgctcgccatgcgcagcgaattcaggagagatgggcggtgccatgggatttgtttatgattgattgactttctaggcttttaaagccttgctgttgcgcaactttgttcaggttgaagatgatacagttttaaattttcattgaccgggtttaagattagttgcggatgcaggcaaaattggttcaccgggaaatgtaaggagtgttcccatccagctagatggacgcaaggaattgcttgtttcagtttcaagcaatgcaaatagtacttttggtttggagggtactgcacgtgttaacaacaaaaaagaagttaatcagatataccagattaagtagacgcattggaagcaaagctacattccacaagtagcttcaataaattaatatctacagaacaaaaagtataaaatgtatagtagcatcaaatacagagtacaggatggttaaagttctcttgttacggtcgctgcttcaacatgtactttgtgcacatatatacagaattttgaagtgaaattcccatgacgacagtcttttaactcctgattagctcaagctgctttcttgcttttgtatttgtttgcgcagatgacatatatcacaaagttcagaaaactgagcccagcaagaagccagaagaaataatctaggtgaccttgattcaagttatcaggaatccatccaggatttcctcctcttgttgtgaagtacgcaaccaatgtcaaaatgaatgcactgagataattcccaagagctgttgtgacaagctgcagtgcgctgcagaggctcctcatggcatccggtgattgatcatagaagaactcaagtgacccgacaaatgtgaagacctctgaggcaccaaccaagaaatattgaggaatttgccagcagatgttcagtggtactggaacattttgatccaccaaatgttcagcccttgcaatgtccaaccttttaatctcaagaactgcagctgccgccatcgaaaagattgagattaccaaaccaatccccatcctctgtaactctgtaaagcccctcgggttgccagtgaacctcctagctattggaaccaagatactatcatagagggggacccatataatgacacttaccacatcaaaggtagatagagatgctggaggaatcttgaatggacctactgatgtatcaagcatcatcccttgctcaacaaacatggtggacatctgagcatagacagcagaaaacacaatagtcgttgcccagacagggaacatccttaccaatatcttcagttcttccacctgagtcacagtgcatattcgccatgggtttgtaaagctatctgctttcacatcaagatcagtaattgtagcagctttgtccagacatctgaaatgaatatcattgagagtatatatgttaggtcgttagtttctcggcaaatatggaaatagaggacgagcagatatcaaaagtcaaacataaatatttagctattttttctaaagcgctaggccaaaaggccagtatctataatatttaagtcgcaatttatcaaaactaaaatgttaaccatcacaaaaagaagaagagaaacactacacctaataactttcagaaaatatattttcctagttcttcaagggccaagagctgctaggaattgtgcactgagctatggtctgctgctgctgcaattttagctcagagaggaacacacctgagttcatcggtgtgctccaattgccgactcccttcaattgctgaagccccatcaggcaactcatacaagcgagagctatcctctggaacatgtacgttccacttgcgaaaggaggcaacaaccacctggcatactcgtgtaataggactgccgcctggcttttggaatctataaagtgatgttccagagaagaaacttatgatggccagccccatgaaaattgttggaatgccaaagcctattccccatcctatattgtcttgcacccaaaccagaaaactgcttgatatgagagcaccaatgtttattgagaaatagaaccagttaaagaaagatcccttctggattcgctcaactgggtctgtatcatcaaattgatctgctccaaaggatgagacacagggcttaataccaccagtaccaagagcaattaggtaaagtccaagaaaaaagacagtatactgcaatggatttgctggtgggcaaaaggacccttcgcaaggtggaggcatgaatgtaggaactgatgctgaaagagtcagtacagccatcccctacaatcaaaatatgatgtaaatataacaatgtaacccggtcaaattatagaatcagttcggttcagcagttcaaatacggacagctatgagcctatgaagagagcttgtacacaagaattacaggcctattcagtagacagtaaagaaacagatctactcagctctacccttcctagcagttcatttaagaattgggaaagagtacagcaggccatcttaagtttgagaagctgcatcacatactcactaatctgagagcgtatatatatataccacattcacaaaccatttctacattcatagctaataaatgtttcttctttcattttgaggagtccataaaagaactgatacatggtacaccataaaatatcaggagaaagatgacttacaatgaagtatatcgtggagaatgttgcaatagtccaataccttccccagtatgcatcagccagtatagctccaataaggggagttaagtagcaagttccctgccatgcagtcacattgctagcagcagaagcattaccatcatgcagtttctttgtcaagtatgtaacaaggtttgtggagattccataataggccaaccgctcacagcactcattacctgtggtcagtgatggtagttaattatatatcattgcagatgccgacataataatagaccttgataccttgtagattagtgttagaaaattacctaagataaatgggcatgccctccatctaccagttctctccttcacaacaggattcccagaaaagtcgacagatccatctccagtgtatgtaagttggttggattcctggaataaagatatttacagtgccatctcatcaaacaatttttgttgggcaataactgaacagcttataatgactatagagaacttttaactcggtaagaaatcaatgtgcattgacagtcgtcacagagtaacttaagtttaaatgtgcattgctgactgaataatgtatcaattcagtaagaccacaaatctaaactgtatacttgacttcaacattcagagttcagacgcaaaggaagcagctgtactgctgcagcactatgctggttcctaggtagttgcgttggcatgcggcagccaaaattatcgtaagtccttccaggacaaggatgccattttcccatattgcgcagtacaggagttgaataatccacaagccagaatttttttttgcttaaaaattaagaaaaatagaacaaacagatattagttgttttttttttaaaaaaaaagctataagtagggacgattgttcagcaaagttaacttccacgaatcgatatcgaatacatagaagagaaatatttcccttccaattttccgctcagccgaagacttaaggtggtgtacctaaacaaacaaccctaacatattcctcactcctcactgaaatcgaaaacagcgattcacctcccaaaaaaaagaacgaaaaaaaaattctcaacacgattcacaagcacgatcgctgattcaccgccggcgcgccaaagaaacagagggcggattcaaactcacctccgggatggcgaggagaccctgctccagggtggactcctcctcgcgctccgcacggaccaccgtcacctcggccatggcggcgggcgggcgcctccctccttcggtggatcagtaacctgcggcaagcaagtctgggccctggccttcgatggtggaatcgtatataggaagctaaaggatcaggaggaaggaggaggaggaagcttgcagatctggatatgtggggtctccgggtccaacaagacaaacggtgaagcgcacgacaagaacacccactgtcttaaggcgattcggggtcgtctttttcccctcccctcgctacgattgttctgtgatagaaacgggttctgactggtagttggtgagggtatcagagtttttttgtgggaaaaatatgcagtgtaaatcctaaagtgagtataacaaatttgtgagaaaaaaaatatgtagtgtacatcttaaagctgagtataacaaagatgatgtaaatgacacatgaatgagagaagaaatgaatagattcataagctgtaatacgtactctaataaactactattatgtgagaggtgagtaagttagatattaatgatgtaatatagatctataattgactgttgtgtgggtgggctattaggttggttattatatatgatattttaatttttaagctagtagtagaatttagaataaatttagaataccgtaaaattaaaaataaactaatatagatttatccatgttatcatgagtaaatttgtttctctcaatcaaaattttagctatggtcgtatttgggaataaatgcgtgacaagttatatcataatagtcttttggaaaacacgtacttcgtaaaaaaaaccgattttgggttttgatttatttttctttacggagggagtaggttaacctatagaaatagatttgtttaggctgtgtttagttcagcgcaaagtttagattttggttgaaattggagatgatgtgactgaaaagttatgtgtgtatgacaggttgatgtgatggaaaaggaggatccaaactttggatctaaacacaaccttactacagtagtaaccgagcagatccctactttctgcaagaggcttaatacggagtactataaaagtaaaatgttggtcactttaggtgg

SEQ ID NO: 20436 - DNA, 26868 bp, Oryza sativa
aggaagaagatgagaggggaggggggagtaggtggagctcgtcggggcgggcggccgccactgccggacctccccgtaaccccgtgggccacggcgcttggaggctggagagaggaggggagacagatggagagggaggaagaagatgaggaggtgagtatgacatgtggggcccacgtgggtcccacaattttttattattttgtctgtgaagatgacatgtgggtcccacgtgctttattatttttccagatcgaattggcacgtaagcgccacgccagtgccatgtcagatgaagaccgggtcaaattagccacgtaggcgccatgtcagccaaaactgctattaaaaccgccgagagatctcgtttgcctggttttcataagttaggggacggatcgtacctggttttgtggttaagggatgaaaatcggactgggtgacaaatagagggactcaaagtgaacttattccgacgcctctactagatgagtgaaaccaatttaaaagcgctccatcggccaaagaggagccgagatggtggtcttggacgctatctagactgcacacaagcttatgagcccatcctccacagcaagcatgctatggccatcgaccttgaggccaacaacaggggaagaagctgcccgagcagaacgctatttttgggagcggcggcttgtggccaaatcatgccatgtggccgtgagctagccaacgatgatgatggctaagggcgagccacttccatcttgccataaacgagacgacgactccctcacctccttcctttatgcccctctcccacccatatgtcctcctctcctctgttgctgtggcccccttcgtgctagccacccaccacgttgttagccttcccttcctatggatgggctggcgagctcaagctcatcaggacaaataggctcccacttgagcgccaccttcgtgatcgcacagtctacgattgattccagtctcgatacccctcaaccaagatcccttccgttactgtcggtcaccggcacacactccctcatcggctctatcctgccatggaagttgaaagggagaacagggtgagagtgagggagagagtggggtagagaggaaaagagtaaagacagagagagagagctgactgatatatgggcctaatactttttattgttttttctaactggcatgtgggacctgttaagtttttttgttgttttatttttcttctaaagccatgtagacattacgtaggataaaaccaccatctaaaatagtcaagggactcaaattgcactaaatttagaagttgagggtgctatatatctgattacggttaagggctgtgaaaaaactcgatctctcttgacggggtctaaagtgaacttttttccatttaataacctttgctttgcctctctgggctatggcatctgctccacttcatccaggcccactttaactaaacgagaagaggccaaagcttaaagctgtacttgcagtatcacgaacagtcatgagctatgatatcgtcccgtatcatggcgtctgccaagtgccaaccatgaactgtctgccctttggcactactgggggttcagctttccatacgtgccatctggcggtgccaagtgtccatccactgccaaagaccgtgacccggcgaagtggcgaacaccaaaagccaccggatgattacccgcgcagctgtacgtccacgcacgcgcaccgcgcaccatccgctaattgccggtgatcagctcgcaggcggcgcggcacggcatgtgcgcgtggtcgactgctcggttcaccgcaaagctaatcacgcacgcgttaagttgctgcgcccaactgaagtcgccgagagcgagaggtgactgacgacgcgcgcggggcgcgagagatcgatcgaggtgaagcgtcgggcgcgcgaggtgccgagagacagtagtcaccggccgatcgaggtgaggcgtcggcgcgcgtcggcagcgcctgcacgggaaaacgagccgaaaacggcacggcgtacgtacgacggtgcgcagtcgtagtacagcgcagctggcagccgacgggaggggcggtcatatgtcacgcgctcgcggcacttggtgagtgggactgaaaagctcgccgttgtgttattccggaggcccatgcctaataggttgttttctccggtggaacgtaactttctgcgttggacttgttcgtgggtagttctaatgggcgatcgatcgccctaccgatctggtagcgatcggtagcccccctcctcccttcacctggttttcttttttggcactgcattacttttctattttaataaatttatacgcctaaagtttatacgcctcaagtttacacatttaaagtttagagatcaacaatttataagtcaaaaatttatatatctgattcaaatttgaatttgaattcaaatatttttttatatatagtatttctatacatctaaagtttatacacctaaagtttataagtcaaaagtttatatatccgattcaaatttgaatttgaattcaaattttttcatatatagtatttctatacatctaaagtttatacacctaaagtttatagacctaaattttatatacccgattcaaatttgaagtcgggtatataaacttttgatttataaactttgggtctataaactttaggtgtataaactttagatgtatagaaatactataaaaatatttaaacttgaatttaaatttgaattggatatataaacttttgatttataaactttgggtctataaactttagacgtataaactttaggtgtataaattgactaaaataggaaagtaatgcggtgccaaaaaagaaaacatggagggagggaggggggaggggtggtgatcgctaccccctcgcccctcgcggtagcgattgatcgtgcattagtgtttccgcttgttcgtccacagcctgagggggagaggcagcgacggtccgatgtgcactcaattgcatcttttcaaaccaataaatataaatggattattctggccgattttgctcttagagcaagtttaatagtatagcccactaatagctccaattcatctatagtcaatctaatatccaattcatacaatagttgcttactatactattagtatatgatcctacctgtcatacacacattgtgtcttggagtccgtgctgcagctggctacagatctgtagcccgctgctcttctctctcttcctttatctctttaaaatatgtttatagctagctggcttatagtctgctattgtacctgctcttagataacttcacaatgtacacggctatgcgttggattttacaccctcatttcacattataaaatattttgataccttcatttctcattagatttgctaacatcggtacaaatttgataaatatatgaaggatatacatggatacatgcataaatctattgaaatcaaaacatcttatattataaaatagagaaaatactataatgtttacggtaaaatatctgtgcaatcacgatgtacagcgacgtgatccactcatcgtagagttatcaggacgtgtaccggttgtgtgctcaattatcgtctttaaggctaatcatgtgccatacttctggagtacagtgcaatccagcatgctctggtaccacctccactaggtccctttgtatatcttggaattttttgcattcacagcacgacttaggccgagtttagttttaaactttttactttaaacttttaattttttcatcacatcaaaactttcatacacatacaaactttcaacttttccgccacatcgttctaattttaacaaaacttctaattttagcgtgaactaaacacacccctagttgtgttccaatatattgcatcacatttgcttggtcatcgaacggaagcttgcagtgtacactgcattgccatatggccacgcatgctcacatggattagaggaagaactggcggtcaacttgattcccacatgttattattcatcaccgttctgaatcgacaacgattaattacctgttcacgtcgatcacagacgggaaacgaagatatttttttggtattcaaagctgcaatgatcactctaaattaatggaaccatgtgaagaatttggatcaaggatttaaggtgatgctgaatatttatgtactatagatatgagacgaaagactcgaaattttccagataaataaaaagacctgggtcgctgtccattttggaatatctctctgaataagactcctagcttagatccagatcgagaatggtttcatccacacgtatgtgccttatcaaagctttcaaacgtgcttcaatacaaagggtatccttcacatccactacagtagcacgcacctgtatgatttattgatttggatttatttgacccacggccaaccagatcagataacttggaagctcttagtccatggtgaatacacagtatccactacagattcgattttcccatgcgaccaaaatcgaattttgtaagcgggtgggtggctagcccgcaccaaagtgtcgtctacgaaaatcaaatttttgtatgtggatagagaaaccatatgtgaaaaatttaattttcgcatgcgggcgcttaagccgtccacgtgcgaaaaggaaaaatcgcaaaaaaaaattccaaaaatcgaaaacctacttcgaaaccctgaccctagaatcctcttatcgtcgtcgtccttgtcctcttgtcgccgccgtcgttgtcctcgtcctcatcctcccgaccgtcaccgccaccgtcgtcgccatcctcctcgtcctcccatcactgtcgccgccattgtcattgtcgtccttttcctcctatcatcaccgttggcggatccgcacgggcacgccgggagggggggggggagggggagcagtggctggatccgcccctaccatcgtcgccgccggtagaatccttctcgccctagcccgcttatgtcgccttgcccaccgccgttctcaccctcgctcgagcccaccgccaccactgaagcccgagagctccgctaaagcccaagcccgccactgtcgtgagggagtgtggatgggagagagtggggagaggagtaagagagttggagagggagggtgaggagtggtgagagagagggagtgtgaggagtggacgagagaggatttagtgggagagggagaggaggggaggaaacaagagtgatgagaaaaaagaggagtattttcgcatacggtcctgttaatataaaatatgcttattttcgcatgcggttcttgaactgtgcacggagatcgatttttgctgacgggatcagttttatgatccgcctgcaatataaaggggttcttatccagaaaaatcaattatgtagtagtgatcctctgcatataaaactcaattcttaggatcaaccactgtaaactacaaacacatgatctggaaccttgggcatcgagaaaatgtaagtttttcatctagttgatagtgtaaaacagagtatggccatcagatcgcctggtaacgagggactagctgcacaacctactatacccgctatgccaacactcgcaagaaatttcacatcacctcatcatcgattgcatatacacaagaagaatttagactttagtagcagcaagcgtcagagttgttcaactgcgccagcatggtcgaaactaaagagccatcatatacttatcatcattctttactcgtacaccagataattaacaccggtgacttttttaaagagaatatttaacagggatgacttttcctcaaagcaacatttggaaaatgttatactccagtataaataagaagtcgcaagtaaaacaatcaaagtaatcatcatcatcatcatcatcttggaaacgctccaagaaaacaaatcaaatagataagcttaaaaaactacaaatattcggacactctttttttatgtgcggtctgggaatgggcgtagcgccgtccttgaattgcacagccccaaatggccagatccacgcatgttttgttcatcgattaaacacgaccaagtggaaggacaccgacgacctgggctcacacggcgtgtggacgcatgatctctaattccccatctcccaatcgtgatgcacgccactacagtaccacacctacgctgacacaaatcgacatatcttaattagcgattagtcttctaccactagcactaatataagagcaagctaactactagctccaatgcatctataaccaatctaatatctcattcatacaatagttacatactacagtattaatatctagtcccacctatcataaacacactgcgtcttggagtccgtactacagctagctataaatctgtagcccgctgcttttctctctccttatttatctccttaaaatatgtttgcagctgacttatagcctgctattgtacctgctctaagagcttcatcgtttattcatattctctaataagagcaagtttaatagtatagctaactactagctccaaatcatctatagccaatgtaatagctaattcatacaataattacttattatactattaatacatggtcctatctgtcatacacacattacgtcttagagtccgtgttgcagctggctacagatctgtagcccgctgctcttctctctctttttttatctcttaaaaatatgtttatagctggcttatagcctgctattgtacatgctctaagtccttttaactcagtaggaaataaaaattaatttataaataaaacttttatatatcgattagttcgtagcgacttaaaaactaaagctaaaaggttatgttaaaaatatcttaaaattaacttaaaaattaaattctaaactttatatttaattttttgttttggcttattagactaaccgatcgggctctaagggtttttttaagtgtaatgccatctcaaaaggggaagatgaaatacccgatcgagcaatcgcgcctagttgtccaatcggcctgcttctcccggcatcctggcaaccaaacccttaatttaacaactcgatagcaaaccggcggagtaacgacgttgcccccgtgtaccaaacgcgtgtgtggattagaacagattcttttttaagacctattattaagaggataggttaagcacatccctgtccccgtgtaccaaacacgtgagggtacgttctcttgtgctgaatagctaaatgatttacgatagttatgggcgtacatacaaattaactaaatattaaatattgtaaagttgaaagttagatttagaacaaaattatatgtgcattaatgtatagaaagtttttttaaaagaaaatcgtgccgttaagtattctaattccattctattcgggaaaaaagaacacatcatgggacgatgttggtgattggtgaaggcttgagcggcatacacacatgaagctgtgatactttttatgttcaccctttcataatcgtactaacctctataaaaaaacactttatttcacgctattcacttgggcaaaaactatttatttatttatttttaagacagaggtagtatcatttattacaggtgcatatgtagtacttagccaattttaccctggtgcatcgtatatcaacaaaaattgcctcttgaactctactatttttatatgtagttgacgttgatccattgagataatgcggtgatgtatgatcgttaagggagaattcggaaaaaagaacatcagggcaatgccttatatggggaggaaagcatggtgaaaatttgctaaatattgtgaaaagatgaatgagagggtctacacaaccgttattctcaaataccatcctttttatattatgtagttggcattgaagtaatattcatcttatcatcatctatcaactttgagcgctcacatcattttttaattatttctttaaaaaatgtgatatctttctaaaatgataccatattatcaaagtgcgttatattctaaatataagcatgaaaccttcgtttatataagcctacgattaaatgtaacgcatacattgctagctatgttatttatatatttaattcgataaacttagaggctactccttgatctaattagcacgcactactatatctcacctatgcatgatttgagatctaatccttgatctgtccttcctacgaccttcttctttggaataaaatatttctagaaaaaaaatttatctgtccttcgaccttcttctttggaataaaatatttctagaaaaaaaatttatctgtccttctcctatggccttcttatttggaataaaatatttctagagaatttcacaaaggaaattcaatagaagttctgccaaatccatatgggtttcaaaggagagagccttcccgtctcctttttttccttccatccaaaaaattccaaatggagtagtagttcacatttttacaccgtcgtcttcgcaaatttaatactactatacgaaggaggaggaagctctcgcgccgcggtcgctttccttcccctaaattaaatcccgtgcgacgcgtagagacctcctcctccgctttctcctccaaagcccaagctaatccccctcctcttcctcgtcgccggcgagagctcttcgtcttctccaactcgaccggaagcaagcgcgcttccgatccgccatggtgctctcccacggcgtgtcgggctccgatgagtccgtccactccacgttcgcctcccgctacgtccgcacctccctccccaggcacgcacgctcgcctctgtctcgagcgccattggcgccgatcgattcggtgattgattgggagttttaattttggatccgggcggggcttgcaggttccggatgccggagcagtcgatccccaaggaggcggcgtaccagatcatcaacgacgagctgatgctggacggcaacccgcggctgaacctcgcgtcgttcgtcaccacgtggatggagcccgagtgcgacaagctcatccaggcctccgtcaacaagaactacgtcgacatggacgagtaccccgtcaccaccgaactccaggtactcctcccccccaccttgcttttccgccgccgcggccgccacccccctccctcctcatcccgttcgtcgtttcgcgttcgttattacgccgcaaattcagggatcactgcggttattaatccctctcgttttaccgtgagatttatcccaaaattttgatccaaacttatttttggtttgatttgatttgggtttgggtggcggcgtagggtagctgctgggttttgatcagctcgttccaatgggtgcaaccggccaacccagttggtggccgtccgtttcgacaagtagtcgcggtggatttctaatcctcccacttggccgctgatctggtctagagattagaaaactagctacttagaaaaatggagtacaaacagctcgattgtccgcgtgagccaagggccatcagcccatcacatactcacatgcgccttcgcccattggctctctcttgactacaataatatggatccttgtttaccttctctcagactgtacgtttctgcttttccgtttttaaaacgaaagttgccaagaactcggggaatcgtaactcatatgcagccatttttcgccagtatttaggctgtgttcttcccatgagttttcaactcatggaaactcatctccccgtttgatacgggtttcaaaaaagtttatataagaaaattgttttaaaaaatcatattaattaattattcaagttttttattactaatacttaattaatcacatgttaatttacccctccaaaagaacatgtacacagccttagcatggataggtcgagatgttgaagaatccctttgtaatgctttttttttaccaagttacacgaaaaataaaataactttaaattttaataatcctatagaattcctgcatccggcacaaccaacatgttcgtcattaagcaaacagtttcgtttgcctgtgttttataagggtgagcgataaattaagcgatacacagtagactttttgattgctttggagtgtttgtaaccgtagtcgtaacggcaagaacaagtaggtccctttgaagcaactatatatgacccgattgccagggtcaaaaatgatgtgacagaaatgaaaaacccattcccagcgtgtctgtcaccttgacgcgtactcactactgacataaaaacaacgattagtgtctctttcagtagttaattaggacagaaattgattcaccgattaaagaaaaacagtactcgtacatgttcgaggatccctcgttcctaggaggagaatcgaatttggtcggtcctggacaaatgtcacgtggtgactcttggtttctgagtggattggaaacataaaacataaaactcagtttctaattggactaattagatctgacactaccttatatttagatttgtagtattacttggtgtctaatcatgtatttgctatattttgaggtgaaataaacacattgccagtattttcatatgagtttttggtcatttcaatctgctgacctgtcaagaaaaaaaatgtttttcttctaaattttatccttcaaaatggaacatattctatgaattttccgccctccaagtgagaagataataattgtagtaattaagccaatgtccggtgattacgtcttatgtgtggacagatgcaaaattttcgctgccgacgtactctctgtgtccaccaataattccttgacaatatgtcccctgtcctctcattttctttgaggctaacgggcgggtgatcaacccgcccctccctctgtactcctctcccttctttcctatcatcgtaaaataaaaaaaaccacaaaattagtaaaaaaattagaaaaaaaatctaatactcttatacatgtgcataaactttataccgtaaactttgcacacataaacttactttatgtatagaaatattttatatatacaaatatttgaatctgaatttaaatttaaatcgggtatataaacttttgacttataaacattcgctctacaaactttaggtggataaactttagatgtgtaaactttaggtgtataaacttttgacttataaacattcgctttacaaactttaggtggataaactatagatatgtaaactttagttgtataaacttattagaagagaaaaagaaaaaaaacgatggctggcagcgattgatcgctcattaggaaaaccgtgggatattgtctattgtcaaggcctagtgggatttgcctttctctgtccactaagcagccccgtagaagaagggtaacggaacgaggcggtcgtcggttttctgacggaattcatgtgctaacgaccaaccaaatgtcaagccataacaagctgtggaatggggatggaaacaatgagttcaagttgtattctgggtccataataattgtccttttgcgatattgtgtcacgtagctgctcttagccatgtgaggggttaggtcgtgatgtattctgaaaatgtttcttttcatggtaaaccagaagaaagtcgagaactaatttcgttacatggtgggggtacatgataaagctgttatcttgcgctccaataatatacacacgcacgtaagagccacgtaaaccattcatgtccttttcccctgtttattttagtcacagattttccgaggatgaaaaaagaaactgtactagtttcagttttgttgattcaagatcactgtttaactttcaagtaaccgaaatctcttcaaatttcaatggtggggttataagttaaaacggtctgagagagtgtgctgaaggacggaacaacctggccagtgctaatcacttggtctgtagtactccatcggttgggatgagccctctaacagatattgcatctgttttgttatatggttctatcggatgaccgagagttgattataccccgtaacagtttattactacctccgtttcacaatgtaaaactttctagcattgcccatattcatttagatgttaaatgaatctagacttatgtatgtgtttagattcattaacatctatatgtatgtcggcaatgctagaaagtcttacattgtgaaacggagggagtagtaacttaaaaattaactagctgggtggccggcgcaattgcgcggctagcacccaaacaaaatcatatatatttttagtatgattttacttaaaatgtattaaatagctatttcattgtcttaagactttgaaagatcaaaccctatctcctcgtgtttctaattatatagttttaaaagtcacaccaattactatccctcatgtcatctctttctttatttgcttgctcaatctaccactatttctattcattcttcttggaatatttaaaaattggattttatagtttttaaagtttattgtcacgttggatttcatttttataatttctagatatcccgtcaaacgttgccattatactcctctacggcccgtccactgtctcttctctttattgtcattgagattttaaaaatcgaacataattatcgtttggtttcatttttactttctagaagtcccgccaaaccgtcagtggctttgcgattgtactcctctacggctcgcccgctgcctcccttctttattgtcattgagattttaaaatcgaacatgattatcattgttttttttacttttcagaagttccgatcctttaaaaattggacttgtagtttcatttttaataattttaaaaagtcccatcaaacgatgccactatgcccctctatagcctgtccgccgcctactctttattgtcattgtgattctaaaaatcgaacatcatgatatcgtgggaatttattttttatttttcatttggtgttttattaacaatttttatacgtcgtatcaaccgccaccactctactcatttataggtctgttacttaatttatctcgtcatgtgttttagatgatcttttctttcaataatctttattttttatcaaaaaatttagtcctaattgaaatattatttttctttttctaatttcagatttttttaaaaattttagttaataccgtattgtgttcttttaatgtttttattttttatttttaatttcagttgtttcaaaattgtattcctacttgaactctcttttattttttctaattttggatattattttatttttattctaaattttaattaatctcgtactgcgttcttatatggattcttctttcagtattgcttatttctaattccgaatttcagcaaattttaaattgtattcctacttgaactcttcttttattttcttttgctaatttcggatttatttatttttattccgaattttaataatctcgtattgggttcttatatagactcttcttttaatattctttttttttaattccgaatttcagctatttttaaattgtattcctacttggactctcatttccttttctaattttggtttttattttgaaattttattaatctcgtattgggttcttatatgaaaacttatttctatattgcttatttttaattccgaatttcagctatttttaaatcgtatttctacttgggctctccattccttttctaattttgggttttattttatttttatttcaaattttaattaatctcgtattgggttcttatacggaaacttctttcaatattgcttatttttaattccgaatttcagctatttttaaattgtacttctacttggactcttcttttttttttctttatctccgattaatgtgggaatttctagctcccacagcgaacgtggtgcctcctttcaaagctgttttaataatataacacatagatagatagatagattgtgggtaaaatcttttatatatgtgtgtctagtgtcctaagcaatttataagccaatgataacaaaattacgttgtgaaaataaatcaactttaaaattaagttaggaaatttaaatgttggagcattcgcgtatattgtttgtccacagcttttctaattttcactactcactacggtataataatggaaattaagaatccaaaacgtgcatattactatccattttttgttataaggtgccttgattttttttctagttaaattttgttagcgactagtgaagtcaacttgcactatgttggaacatatctttttttgtagcaattttatatatagatttttctctagacgtggttgggagcgcatatacgtcaaatatcattccacatttcttcaagagtgatcaaacttcacaaagattgacaacagcaattttaagtcataaaataaaacagaatgaaaacaatattgaacatggttatgacaacagtaacatttcctcttatatggcatcattatgctagtttcattaacatcttctccacatttagtcaaactgtcagagtatttatggctcaaaatttgaatttgagtgagtgaattacgttgtagcaaaatgtgtttattgatgtaaattcgtaaaccattgctataactgcatagctggtgcttcttctcaactttcaactgaatttgctgtttgcagaaccgatgtgtgaacatgattgcacacctcttcaatgctcctctaggggactctgaaacggccgtcggagtcggcactgtcggctcgtctgaggccatcatgctcgccggtttggccttcaagaggaggtggcagaacaagatgaaggcagccggcaagccatgcgacaagcctaacattgtcaccggcgccaatgtccaagtaagcagatggccatctccatttaccactcttgttaacgagcacgcgtaattaacccacatttgaaatgcaggtttgctgggagaagttcgcgcgatacttcgaggttgagctcaaggaagtgaagctgagtgacggctactacgtcatggacccagctaaggccgtggatatggtcgacgagaacaccatctgcgtcgcggcgatcctcgggtcgacgctgaacggggagttcgaggacgtgaagctgctcaacgatctgctcaccaagaagaacgctgaaacagggtaacgaatcaaacagttcatttcttccaatcctctgcacaaagccacaaagtacttatatgccccaatgcacattgaaaactgaaaagtgtttgctgcatagtaaaaagctaatgcagagttgctgctggattgatttgaatgtgcagctgggacacgccgatccacgtggacgcggcgagcggcgggttcatcgcgccgttcctgtacccggagctggagtgggacttccggctgccgctggtgaagagcatcaacgtgagcgggcacaagtacggcctcgtctacgccgggatcgggtggtgcatctggaggagcaaggaggatctgcctgaggagctcatcttccacatcaactacctcggcgccgaccagcccaccttcaccctcaacttctccaagggtaaaaatctcctctctttgttttgacagttttacggtttcttgaatcttgatggctatgtcagttcggttcatctggttacatgcatgatgcacgcacacaataacagaatggcacaatcttttttccaggttccagccaggtcattgcacagtattaccaactaatccgcctaggctttgaggtgagaaaaatgctatttcttagtactctctctccgtttcaggttataagacgttttgcttttggtcaaagtcaaactactttaaatttaactaagtttatagacaaataaagtaatacttataatatcaaattagtttcattaaatcaataattgaataaattttcataatatatttgtcttggttaaaaatatcaccactttttttctataaaattagttaaactaagattaatttgactttgaccaaagtcacaacatcttataacctaaaacggagggagtagcttttatcactcttacacaatcacaattaacttgtactcctatgtgattaatacatataatttgatcacgtgatatttgcaggggtacaagaacatcatggagaactgccaggagaacgcgatggtgctgaagcaggggctggagaagacggggcggttcaacatcgtgtccaaggacaacggcgtgccgctggtggccttctccctcaaggacagcgcccggcacaacgagttcgagatctccgacttcctccgccgcttcggctggatcgtgccggcctacaccatgccccccgacgcgcagcacgtcaccgtgctccgcgtcgtcatccgcgaggacttcagccgcacgctcgccgagcgcctcgtgctcgacgtcgagaaggtgctgcacgagctcgacgcgctccccgcccgcgtcgtcgccaacggcggcgacgccgccgccgcgtcggcgagcgagagggagatggagaagcagcgcgaggtgatctccctctggaagagggccgtgctggccaagaagaagaccaacggcgtctgctaaagcaagtcagctgcgcagcggggatcgtatactattattatggtccacttcgtaattgcgacttcttaatttttaccgtgtcgatcggtttaccgtctcaagtctgctctcatccgattttcggattgatgctgcttaattatgtaccaagttaattaattcttagaggacggaatagttccgactcaatacgaagcattgcctgtataagtcgaacacgggatcatgcattttacgttgggtgtgtagcagtgaattgatcagtgatgctccatctctactctgaacgtgctacctccattccaaaaaagaaaaaaaaaacttttatgaacgaatttgtgtatgaaaattaccatctccgtctcgtaatataataaattttggttttagattgcgtaaagtaaatctcttatatgatgatgatgatatgaaggtagtacacatttttctgagactggacggtagactgtctggtactgggagagaagacaccaacaaccaagggagaacgagacgttcctggcacggcgtgggttcgcatttggactggaattctctcatcgtaaggcccatcagtcatcagtagtccatcttaggccccctgtaatttttctgattcatttttaggaacaaatgcaccggatttacttgaaaaaaaaaaactgaccaagtacactcgaccgtccaaaactgataggacggctcagattgctcactacaccatacatacaactccctgcaaccaacgttgcgatggtgtcaaaatcctggtgatgtttcttgatcatcttcttacgacaatcgcacaaccatgaaaagaaagagtgttcattgagcggtaagcattgagaatgcccgccgatagctctgagcgcaacccaccacagttgtcgcgactccgggcatgcgaccaagagattatcaatcgtctcttcgcattgatcccaaagaacacatcgatccagatatgacaaaccacgactctgaaggccggttcactgtctagcaacggttaagggcgaccaaccaaaggaagtagcgacaacgagggggcgccaaagattgcaaaattggcttgtgctggagatgagttcttcaaaaaaaaaaaaaaagagaacacgataagctgagcgggaagagtattctcctgaggtctcccaccgccaagatagagagtccggttcttcggaaagctgcactgaccgaaggcaatcccaaagcttgaaatactccagaatcgcttgaatacccaacaccgaactgatgtcccggatccatcttctgtcagtcaatgcctcggccaccgtgcgacgattccgaagacgagcagggacggctgcatagacagccggcgccagcgactgaattatttttttaatcttaatctttgctaaataatctagttcaataattatattgggaaaatgaagtaacttataagagtggcaaatagtaaaattcccctatcatatgttccacttgacatttcgattttttttaaaatctgagatttcgaaatagattatatcactatggagtatggagtatgggcatttcatattttcatttcggaagggagatttcgaaaaaagaaaaacactacagtggctgcgcacccgccgcatccgagcctctgcacgccgcatcctctccgccgacgaggacaccggcccggagccccacctggccaccaccactcgccaccttcgccgcctcaactgccggccgtccagtcctcggggatgcggcagtgtgtgtggcggcccggtggctgtgctatggcggccaaaatcgaaatcaaccgccggatttcctgcgctccaccgcacggcggcctgacggtggctgctcatccttcgcgccgagctattccgccgccggtgagttctccatgaagctttgctgacctctattcggaatacgaatccgtgcgatccagtctgattcagagtggattcgcgcgcagacacgagtttcccgggaacaagtctgattcagagtcggatttctcttttcagggcaacaaattccggtggtgtccgtgtccgtttcagtttgcgttggctaacttcaggtatatgaaggtataccttgtgcctctcacttcatcaaatgttccaactcggcaagttttcaagcagacgacgaatttcacctttcaagtggggatcgatctgttccaatggcggcctgtagcatagccaggattataaacttaggggatctagcaaaatgtcccaaaaatttgtgctgcctactcttcagagttgtgtccaagttcctagccctttctcccagtttactgaaggaagtggaaaaagatgatggtgatcagccatcaatgacagagagtgtcatggcaaatttaccagagctgcatcaggacatcttaatggagatatttgccctcctggagatccctgacctcgtgcgcgcagggtcggtttgtaactcctggcgctccgcctacaatggaatgcgcagcctaggtatctataaattgtcccagacaccgtgcctgctctacacctctgaatctgctggcgatagcgtcgtgtctctctacagtcttgtcgagaagagggagtacaagattactctaccagagccacccgtgcgtagtaggtttctgatcgggtcctcactgggctgtctggttactgttgatgacgtatccgagatgcacctggtcaatccgattacaggggaacaaatagctctcccttctgttatcacaatcgagcatgtgaatcccatcttcaatgagtccggtgctatccacatgtatgagtactcatggtacagtgcatcgagggtttatcattctgagccatcaattttctcccttgacgagctgcgagaataccttcttgataaggcttttgtgttttctgatacatccacagaaaattacctcgtggtactaattcacaatccgcattcgcaactttcgtttgcaagggttggggatgataagtggacctggcttccaccacacactcactatgctgactgcatctacaaggatggcatattgtatgcagtgaataaagtgggagaaatccatgcattcgatctcagtggccctgtggtcacaatgaagacgataattgaaatggtgccaggatatgcttgtgataagatgtacattgtgcaagctccatggggtgatcttctgcaagtttggaggtcatatgagtacattgagggggattacgaggctgacttgcatgatgctgaccctgcaatatctgtggagaatactgcggaaattaaaatatttgttgttgacactgtggaaaaaaagcgtgtggagatcgaaaacctggatggtcacgtgctatttcttgggcataaccaatcactttgtctcagcacagaacaatatccacatctcaaggaaaattatacatattttactgatgacaacgatctttcgttatttggacacaagaataatcgtcgtgatattggattatttgatttgaaacataacagcagggaggaacttgtgtctcctcagctttggtccaactttcctgctcctgtatggattacacctagtttcacaaagttgaacttcgcctagaagaagcacctttaaggctagttttttatttatggatattagagttgtgtatgtttcttcttgttctgtgcaatttatatgtaaaattatgattggagaactaaagtgtgaatgtgaaggttaagttgcttcatatttgttttgtaccaacctttattatgtttatttaaatttctgctatgtgaaagtctaaacaacaggtcttgtgcggtagccacttgaggggaattagtgaaatatacaaggctaatgtgaccaatgttattttggaaaatggtaaagctgtaagtactgagtctaaaataacttaactctgagagtcttgaatgcaaaattggcaggatgaccgggctaattttattttgaactacgactaattacccttacaatgtttgcaagtattataaagtgtttatgttctttcttaacatgtccattaacctcttagttttattctctgctatctatgactaattatcctgtcatgcagcatgtccattaacaatgtatattttaatggtaatctgaaatagtggataatgctttttgttcttatttatgtttcttcttccaatgattttggacttttctttttctagtaaattgaatatatttggggtcatggatgccacaaagtaaaaatatagagttctcagattgcacatgtaacaaatatttattcatttttgttctgagttttgacaatctaaacttactacattttcctggaggtatgatacagaagccatgtactttgatgaggatgtgagaaccgctaaacgtcagcagttagaatgtgaaatcctaatgagtcactcatttccatgttactaattcaagttatgactaagagaaagtagtttaaccagctgatggtgtttggttattacgaaaatatgtttgttttttcttaatattcttgcttgttcatgacatttcaaataatggattgctaatattcacacatacattccaacaaaggtgctgcaaaaatttcaggcactctaggataattgcagtgataattgcatatggctattataatatagacatttgtctcttcctaattagagaggatgatatctgtcagaaaaatgtaaatggactgttttatttgtccttatttgatcaactggtctcataaatcttgggttttgcagcacacatgtcctgctttcaagaaaatgttagaacacctgcatcatgtggttctcaacaaattcaaaagcgatctagaccaatcattaaggagcggcgggggatttgcagcatcagctcgttattgtgcgcagtcatcaatggtgaaattaaatgctagatcaaggtaaacaaaccacggccaagatatattgggattaaaatattttgcaatttgttaaacgtgacatgcattctgacctgctttctgctgctattttttgtcctgcaaatccgattctgcaaaagccaaatctccaaagtttggtgctcatttgatagttttattgacgatgaatgtctaaaccgtatgtcgactagtattatgggcctttgcttcttgatcttgttttaagcctcttgtgcttgctcctgccaaccatactgtgtaaatttttcaaatattatatgcttgtcgatagtttgtgcattcagattatactagaaacacaacagtattcattataagtaaattcctagcagtttgaagtaatgtgatttgaaactcatcattccttaaatctttggtctacaatacatgacatcaactctctgcattgtcatgcagattctttggttaagcatgcagtgtgggacactacagaagttaggggcaaactggagcaccatatagaagctcatgcaacatctgttcggggtacaaaactggctgaactgaaggctaattatgaggttatttttcatactcagtgcacagtatattattgcaatttcagcatgctcctagaattcctcatttcatgagctcttacagttgtttttttaaaaaccatcctcatgcttggatcttttgttgccgcaatgttcagaaaaaactcttggatgcgcttgctggacctgtatagtcaacctggaaactggtgaaaaaaaactcttgggcatgtattagaagactttataggcatgcaactgaaaatgctattttggcattctcagcttccctctctgagtttgaactagaccagataactatccataagatggtcaaggaattaagagaacatgcaagaagtatagtagaagagaaagctagaaaagaagctgggaatgttctgatgcgtatgaacgaaaggtggaatttagagggaaaaaatagtcaaatctctcttacattttcaatgattttcagattatactagccatttttgcaatatttatcttatccgtacccatttcattggactgtagattttccactgttgagccgtgataaggactccatgcctaggacatggaaagggaatgaagacataagtgcaatcactagagaagcacgtttagcggtatatctttttttttcttttaatcaatattgcaccatttattgggtatctgatctatggtgtagaaacatgatctgtttatcatctttacactgcaggcagctaaccgtttggacaataaaccagataaaatagaccggactctaacaactgctcttttagatggaagaccgctttcacagaagaggagtattgaattcgcatctgatcctattgtctcaagcacatgggaagaggtgctggcacttagatttagaaaattgtgattttcaaggaaatgtgatgaataagtcgtaacattttcacatctatacaggtgttagaaaaaatacactgatcacaccagtgcagtgtaaatccatctggaggaacgcagagactgagtatgctgttgcagaagcaatttctatgcaggtatattccttggccatttctgctcaagtgcttatccaattgattgcataacactgaactattttggtcaaatggataggtaaaacataattgaatttgttgttttcttattatgaaccatgaagcctggcctggtgatttcagagggtcctcaatgctcttaaaaaaaactgaacttgataagctttttcatgaaatatgttctttttgtccattatgtggaagtccatttatgatatttccatctgatgttggtgctatgtgctgaccaaattcttccaaattttcttccagcaggaagcacacaaacatagcaataattggctgccactgcgtggactattctacttcttgcaattgtaggttacaacgaatttatgtttcttctaaggtaatcatctcaatgaagtagcttgcttatccttgtaaaggataggattctctgttgcattaatgcataaactgagaaatcccaaacttgacacttaacatatataactgctaaccatttttatgaactcctggacacgaaccctttgtatcttctggggctcttcgttgtcttcgtggtatcctatgctgcatggttgcaatataacatcacagcctattttcgccatggtacaataagattatacacatctcgtttcacataaattgtatcccagtgcattgaaccaaagtcgctgttgcttaagaggagttaaggctggatcaccttagcttgtttcatcatgcagaattcttctcttaaatttctttttttaaataatggatagaaatttggcctctatatccacaagtggatttacgcagccaaactcctcttaaatttctatctagtgcatttcagttcaactgaattacttgacacgtattattcgaactaatctctgggttgttctttcatatgcagctgtcaggtcttctgacaattacatctggttttctccccacaataatggacatcataacagcagtcatcaacattagtcacaaccagaagagctccattaattctccattgtgaacccattgttccatgttcctcagtttaaacaacacatcctgattattctcctgttctctggacgaaagtcatttttcacagaaaggagttaaggatgggctatcttagcttgttcattttatgatgacataagttactacagtgattgatcaaccggcaactaattttatgatgacagaagagcatctcacacgtgttatttgttactacagtgatcattgaagagctgaagctttaaggaacaagtgtacatatctgagttgtaacaatctaggcgaatatagagattaagactacaactcgaatgtgcaaacatatgtatatgtatagatgattaatgcacaaaaattggtcaatccgtatctaatttgctaatgtgattattgcacaaacatatgtatgcagagaaatgactaagagttatctcctcgagatctcagctttatatgctggtgaacaaacgatgaaaggaaatgatgaagtcgaatctgaatttcttgagaaatgatcactcttcccaccaaccagctggcaatgtgtgacaaaagtagttgtgcaactgaagatcacgagccgtagtaacatagatgcggcagtcctcggcctcacatggaacaagaggaaacttgctgtgcttcatgtggcagtgaagcaacatctgcaagtgcaaattataaccgtgtaagttgttgttaagaaacacacaaaacaatagaagaaaatattgattgtaagaacagagcatcactgaatagaagaaaatattgattgtaagaacagagcatcgctgaatagaagaaaatattgactgtataacacaaaagaagaacagagcatcactgaacaactgcaagtacaaatcacaacattaattaattgttgttaagaaacacacagcataataaaacaaagcatgcattgctgactatacaacacaacagaagaccaaagcatggactactgacctggctgcctgaaaccctgttgctcccagtgaagttttgttcttgaaagaagcagatgtgacagatagttttatgaacaatggtacgagattctctacagtaatgaatatactggtcttccacctcaaatggaacctcctccccgttcaccactcgatgttggcgctgcgcctgaggttgaggtggagcttgtggtggagctggaggggtatgcttcttttgaggaaggtgaatccaggcttggttgcctgttcgattcgttgtggcgcccttgcctccggccttgccatgggctaagcctgttcgacccgttgtggtgcccttgccatgggctggtgtaggtgccacctctgacgaacgccgggcgtggccaccaccgaagaaactcatcattctctcaacagctgtcgtgatccagcccgagtcagtcggtggcgcgaccgtggccacctctgtcgacggcgacgtcacggccggctgcggtgcctccggcgcgcactcgcggcgctggtctgaggccgcgcgctgccgcctccttctacccataactcctctccggtcggcgagttgacggcggcggtgggcggcgctatttcttgtctcgtcgcccagcgcacgcgttcttggctcgccgacaacgggaacacggctggtggtggtggcgacggattcttgaagctgtgcagaggagctcccgacggttcttggcgtggcggatttcttggtggcagagtcggtgtcgtctctggcgacgcaggtgttgctcgcggcgatgtggtggatttcttggtggcagaagcggtgtcgtctctggcgacgcaggtgttgctcgcggcgatgtggcggatttcttggtggcagaggcggtgtcgtccctggcgacgcaggtgttgctcgcggcgatggtggcgcaccgacccacgtccgccggcgtgttcttgtagcccgacgcaacggttcttcgcgcggcggagctccccgcggcacgggtggtgtcgtccccggcgaagctcccggcggcgcaggcgtcagcccacggggatggttggcgcacgcgcacccgcgttcgccggtgggttcttggtgcaggggagctcccggcgacagaggcggcgtcttctccgatggttcttggcaccgcggacctccgagttggcgcgcgtggaccctcggtcgccggttcgggagttcttgggggaggaaggtgatgaaggaagaagatggaagatgacggcgaggttcttggtggcgaggaagcgggatgggaggagttcttggcgagaaggtggcggaggaaggcgatggattttgacggcgatttcttggtgaccacaagggggaattcttggcgagaagaagatggaggaggaagatggaagtcgaggccgaattgttggtggaggaagaagatgagggcaatgtttaagagtttatggagcgggaaggcgagagagccagggagggggagatggagtgctatttatcgtcccaatcccgaaagaatggtcggcttccccggcgccgtcaggtgttcgattgcaacctctgcaaactcaaagctccttggagcattctggttgctggaacgcaatacttattcgcccattgttccattttttcttcttttgaacttgtctaacatgcaactggacatccgcagcgatgtcatgtcttcttccttgttgccggcggccatgcccgaggccggagccagtacaggtagtccatcaccgtagagttcatgttgcctcagtgcctcctcgcctgagacggaggaaggcgagcgtggcgccggcgcgccgccggctcccgcggtcaccagcggacgagcgccatggcag

SEQ ID NO: 20437 - DNA, 9251 bp, Oryza sativa
gcgtggacgatcggtgtcggtgatctgtgggccgagtggaccgcacgtatgggctgtgggccgttcgctgccaaattcaaggcccaatacggagcagccactgcgctagtgcggtgtttagtcccacctcgcttgccaaacaatagtcttactaacttgactggatttataaatcgaagtttggagagtgcttgttctcgcaccgacttctaagagcatgagcagctccatagctccattgtatgtataaactgacaactattttagagccgaactcctttttttaagaaaaagcctatttacgatcgactttagaactctttttttttaaaaaaaactatttacgatcgtaaaaaaactatttacagccgaactcttttttttaagaaaaaatgtataaacattttagagccgaactcttttttttaagaaaaagcctatttacgatcgactttagaactcttttttttaaaaaaaactatttatgatcgtaaaaaaactatttatagccgaactcttttttttaagaaaaagcctatttacgatcgactttataactctttttttaaaaaaaaaactatttacgatcgtaaaaaaaactatttacgatcgactttagaaccttttttttaaaaaaaaaactatttacgatcgactttaccactgcaactattgaaatctttttttttaagaaaaagcctatttacgatcgactttagaactctttttttaaaaaaaaactatttacgatcataaaaaaactatttacgatcgactttagaactctttttttttaaaaaaaactatttacgatcgactttaccattgcaactattggaatctttgattcgtactttagagtcgaactctttttttaaaaaataaactatttatgatcgactttaccactgcaactatcgaaatctttgattcgttcgtctcccgtggtaggcatgagtcgaacggacaatgtggatgccctaacgaaacaatagctgtcgaactctttttttttaaaaaaaaaaaactgtttacgatcgattttaccgttgcaactatcgaaatctttgattcgttcgtctcccatggcaagcatgagtcgaacagacaatgtggatgccctaacgaaacaatagctccattgtctcctttctgcacgctttaattactttattttttgttacgtccagtttgtataattatatttttttacaattacaatgttacgcctataattaattttttataatgttacgtccagtttgtttaattaatatagaccacctataattatttgtcatccgttcagaccaattaattgtagacgtaaacttttttttcacactaataaaaaatatatatcactgggcaaatcatattttctcttactgccatcaaatgaaggccgatgaaaataaagtattttcataagtgggatcagtcgtttgcgaaaatatattatttcggtgacgggtatctaaagggcatcgtcagtgagaatcaatctttctaggcctttctatctatctgcacgctttttattattttctctacaaatttacattagattgtttggtattaatatagaccacttataattatttgtcatccgttcggaccaattaattttttaaaaaatgttacgtccagtttgtttaattaatatagaccacttataattatttgtcatacagtggaccacttaaattgtaggcgccaactttttttttcacactacttaaaaaaaaagcatatcactgggccaaatcatattttcgctgacacctagccctactgccatcaaatgaaggccaatgaaaatgaaaatagagtattttcataagtgggatcagtcgttggcgaaaatatattatttcactgacggatatctaaagggcatcgttagtgagaatcaatctttctaggtaggacgctcaagccactcaccacgaaaaatacatttttttcagaattctttttttttaaattttttaaatgtacataatttaaataacaactatgcacaagtttttataattctttaaatgtacataattctttatcaaataacaacggtatatttttcactcagatctaaattccttactttcttttaactttttgagaattcttgtttttacaggttggggagtgtaacgtcaaacatcttcacttgtttctcttccaatcgcccaggtgtttgacactggcaatgtcattcatttctctccttctctaccaagaggttaaaaaaatgggtccgatagaagcatcagattaccatacgtgaaagaactgtaccatttcgcaactgcaccaacgaataataaaaaaaagcacagaataaagtaagcaaggagttgatcccattattaaaaatcatgttattatctatttaaacaaattccgaaactctaaactacctgttataaaaaaaatagaattcctaataacagaccaaaatgccttatttttattattattttagattgtttttacaggctgagtgtaacatcaaacctcttcacttgttcctattctcatcgcctagttgttgccactggcagtgtcccttcactccttttttaccatgtctaaatatctcctcctttctcttttcctagaaaagagcccgtatgttacaccggagagaaagaaacatataaaatacagggaacaaaggcatgaaaattgagaagagagggcatggttagtactggtagaaaggttatgtgagatggtggtgtggaaagaggggggtaggcgtctaacggaagaaggaatttagctgtaatcggtggacaggaggatcctagtgaagtgaatctcatggtcttatgttgatctggaattagagaaagtttagggcttgtttgggtgcccgaatgaaatctggctagcacgcgctatcagtgggactagctccgatagacatgggaaaccgcgatccgggttgaagtaagtccttgatgggatgggagcagaccagcggtgagagacatgtgttgattttaggatgtaagatttgatgattttgagtcgttggatttgacgatgagaactgtataagatcataattagtgaactatagggtagataattatttttatcactctccattaattcctaattaatgccccacctttttagataaaagtttattatgtaaaatgttaaacacaacattctagtacaaggttggcttttttttaagagggaataactttaacctgaaacacattaataacacgcatcacctgtttgtaggatggttggaattgcagctgtgatctgtgctctttgcaaagccagaaacgcagcatatgtttccgaaataaaagaatcatggacccagctgagctaatacatgttgtgtgctattgaaacgatacttggtccgtcttgcacataatggaggaaaggcgaagaatgttgcaactgggagcggtgctgctaagcagagtggcagaagaagtatacaactcggcatatagatggaggttgaactcaaggcgtctgatgtgaagatgaagtacctgggatcgtttttactaccgtttcagcaccaccagttatgtgggggagatgtaggaagggcggagccagccaaaaaggacgttggggtcaactgtgaaatagtatttacaaaggctgtgtttagatcagttcaaagtttgaattttggttgaaattaaagatgatgtgactgaaaagttatgtgtgtacgacatgttgatgtgatagaaaaaattagaagttttggatctaaacacagccaaaataccaataaaaaaaaccatgaaaaccgcttggttttgtcaattcgctagttttagaatgtttttcattacagagttgatgaaaaaaaaatcatcgatagtttattagttttaattatttttttacgatgttacgtgaaaatcatcgatttttactagccagcaaaccgtatgaatcggacacgggccaaattttaccaagaaaagataacataaaccctataaatccctatatcttaacactcacatgtactctctccatcaagaaaatataaaagattttggttggatgagatatgtgctagcattgaatctggacagaggagggagggagtagcatctaataatgtatatataaaatattgagaagaaagtatggctccgttataagtttgcttcctgccaatttagtagaaacggaaaagttaaaacatatggagtactactgaagaagatattcatataagctgtgaacaacaaatattggtttctaatttcgttacttgaagttgtgctgaaagaaacatcagaccttacaagctgcatatacttttagtaaatcgtaataaaatcgcccttttatctgttggcttgtgggccttgtgtagttcacgtgggcaatcataccaatgatgggcttgcaaaccagccagctaatcacagagattttaatcagtggctgtgctcatacaagaaaaccagatgggttgaggtcagatcaacaattttaccgggttcacattcaactacaccctatttatcaagtggaatttagctccggtcgtcggtgtcctaggaccctgatccaacaacggtagctccgcccattaggatccctgcttgttttgatatgattgtcttgtgtcgtacccatgggaactgatggtgcttttgtttatgatggtgcttttgtttatgtggaaatgttgtcggaaagatgtaacagacttggtaattttacatttccttaatgaaatgggagagcttagctctcttaaaaaaaacttgtgtcttgctagcatcaaatgttccaactctgcaagtattgaagcaaaccatgaatttcaccttccatgaggggatcgatctatactcctatggcggcctgtagcatagccagaattatgaactttgggggaactagcaaaatgttccaaaaaaagtatgcaacctgctcttaagaattgtgtccatatcctagccctttctcccagtttactgaaggaagtggaaaaagatgatggagatcagccatcaatgacagagagtgttgtgacaaatttacgagagctgcctcaggacatcttaatggacccaagattgcctgaattaagattggacccaatgccaagccaagcgggcttcatcatttttctacaaataagtctactttgtttcccttgtttttatatcggaattaaattgcatataaactgtaagataagggttaaaaaaaaattattgtggttttgagagatatttaaactacgaaagtggacatgtcttataccttttgctgccgcgtccgtcgtgtcggcggtgacccatgaacgtgccccagtacttgaattagaaatccttcggggcacatgggtgatgtttgaatgttctgaatatgaagatgaagtgtttcacgcaaaacgtggttgtaataacatgtgattaattaagttttaattattctaaacttaaaaaatagattaatatgatattttagagcaactttcatatagaaagttttcacacgaaacgcaccgtttagtagtttaaaaaacgtgccacaagtatctaaaatttaattcaattttagttggagaaaagaacatggccatataaatcccagattttcacagcaatcaattgtatatgactttcaacaaactccattatttgtcttgaccttgtgtttaatttgatgatgtttaccttttcttcctgctgattttttttctttatcttctcccaattttcctcttcttccctagttttagaacattgtttcgtcatctttttcttgctccaaaggagtacggcaagaatataacaaaatgagtacggagagacaaggagctaggtgacccggtacggcgttacctcgagccgagcaagcggctgctgaactcaacaaagcaatagaaaaaaatacaggattctaatagaaaattaaattaagtataaaatgaagagttgcaaaaaaaaaaaacacaagaatgatcgttgattagacagcaggacaaacacagaaatcggatcaaagagatagtctcgaaggaatttttttaagaggttgaacctcttactaaattttctcaaaacttacatttaatgagccattccattgaaattttatatgatttgaaaaattccaattttttgaatcaaaggattatatagaaaattttcctatatgattttaatcctataaaatttctctgtaaaattctttgattcaaatggcccacagtatacagcgcttccagatttttttttcacgagagaacctgtctacacaggagcaataaactttgaccgcttcatgatgcaaagactgcgaaacgagatgcgtcatcatactttggactaagctccacgtctcacctttcctgtacatagaaacggtcgaaacatatcgttattacctgcatttactgtccatttgtcctcgtcaacactgacacttgtcacctgtacactcccaatcaaaagcgcactactccccgtagaacatactactacatcactttgcccccgctgcctttgccggttacaccgacagcgccggtagtccggtacacactacacaaagaagtcgttagggccaaaccatctgaattctctgataatccaatgggccggccaatccgaggtcgccatgcttgttgactctagatcgatcgatcgatcgatggatcgaccgcgacggcagcgaaagatgagacgacacgagacgagacttgccgatcacaactccgccgatggtcgctgtcacgcacgcaagcaccggattgccggaacatacgagccgatcgagaagcggtcgaagcggatcggagttacagtagctagccccacccgtagccggtgtatcatcccgttctcctttaattttccgatttgtttgttatccgagggatgcgatgcgagcctgcacttgcgcgcgcggcacgcgtcgccgtcttagattttctccccaactgatgggcaatggctacggtattcgccccatgtggcgggcgcgccacaggagggtctcgctctcgcttccgttctacgtaacggcccgcgcgcgcggtggaccggtgcatgcgcgcgcgggggtggggtgcggcgcagggagtggtgtggtggtgcgccgggacgtcatcaggcgtccaccatcatcgcccacgtccactagggcggattggctccgggtttcggatcccaatcgcgcgcggtggtagctggctctccgactccactctatacatgcactccgcccctgccggtgaatttgttcttttgattatttgttagccgaatgtttcttctagacctggagatttaactgatcgcccccactctttactacagatatgtttaaattactttgcatataacttataactagcatagtgacccgcgcagattgcgcggctagcatcactatattttctctcatataatatcatatatgttttctcaaaatatattaaaatgacaccataattttaaattttgtactaactttatgaaactactgatatgtaatatttatattatattttttatatatgtgttagttattaactatttttaatatcaaattttagttatttctaaattatattcctatatggactctagactcatctttcaatatttcttattttttaattccgaattttcattatctgtaaattgtatttctatatagactctaggctcttcttctaatattatttatttttaattctaaatttttattatttctatttgtatttctatgtggactctaaacttatctttcaatattctttaatttttaatttcgaattttagttacttcctatattgactttagactcttctttccatttttttaattttgaattttagttatttgtaaattgtattttttttatacggactctaaactctacttttaattttattatgcatattccaaattttagttagttttaaattcctatatgaactctatactctacttctacttctagtattccttatttttaattccgaatttctattatttcttaattgtatttctatatggactctatactcttcttctaatattctttatttttttaattctgaattttagttatttttaaattgtatttctatatagactctggtctcctcttccaatttttcttattttttaattctgaatttaaattatttctaaattgtatttctatatggactctgtttttctttttctctggttaatatgagaatttctatgccgtgaaagcgaacgtggaggtttctttttctattattttaataagttaatagattttatttggatgtgtgataggatgagctcacattttgtgggtatgagtggagcgtgcatgtgtgctttcgacttgtattaaaaaattgaggaaaatgatgtttcctaagaaattaatatgggtttgtaattagaagtgtaccttttgggttcgggttttctatgataaactattgagaacctggaaaacaatataaaggctacctacataaagaatgtatttttttacatatgagatatgcgcacgtgtatatattatatatttatatatagcggtcaatttagaaagcacacatattagtcagaggcaaaacccgcaagggaggaggcatgagggttatatgggctatggaatatccacaaatccacaagtatgttttttttagtagaagaaaagaaaaggtgttcttccacatttccattctacaaaagtcgttacaagaggggatagttaatttcctcttgtctataggtgttgctttctacaagatatcagttagttttcagtgatcacctttacttaattgacttctgctaacaactcaccggcacttagaagctaactagctgggccaaattatacacactagcatgatgcccttatattttgctatttaaccatggccatgctttctttaattcttcattatttgcgagtggtgacgacgaccattaattaggaaattggatgcttatcaactacttcagggagcgtttcagtaaccgaaaaatcaatatacacatttgggaggggcatggcgcctcatgtcagttatcagttggatcagaggggacatcaactttttccacttgccaagtgacagcgatcgagtggctggattagagggaaaggaaatgtaaacgtcttcacggtcctaattaagcaccacattgctagaggtgttagatcccatcaggctaggtacagtatgatcatccta

SEQ ID NO: 20438 - DNA, 20032 bp, Oryza sativa
gcattactttcctattttagtaaatttatacacctaaagtttgtgcacctcaagtttacacatctaaaatttatacacctaaagtttagagacccaaagtttatatatccgattcatatttgaatttgaattcaaatatttttatatatagtatttctatacatataaagtttatacacctaaagtttatagatccaaagtttagagacccaaagtttataagtcaaaagtttatatatccgattcaaatttgaatttgtattcaaatatttttatatatagtatttctatacatctaaagtttatacacctaaagtttatagagacaaagtttataagtcaaaagtttatatatccgattcaaatttgaatttgaattcaaatatttttatatatagtatttctatacatctaaagtttatacacctagaatttatagacccaaagtttataagtcaaaagtttatatacccgattcaaatttgaatttaaattcaaatattttttttatatatagtatttctatacataaatttctctaactttgtttttttaaaaaaatcccaatcaaagattaattgtgtgctactatcaagattcagtaaaactattgtgtcacacgcacacacgaggtgttagtaatttcgtaaagggagatataacgtcgctggcgcatggatcaattcagcaagctctcttaacctttcgtgactttgttatcacggtgagatcacgttcaaagatggtaggctggaaaaccggccgtgccggccggtccctgctgcaggaagagggctgaactccagtttgattaggtcgcctggccaccattcgagcgtgacacctcttgtagtgtacctgaagattcgttagttatcgccaggttttatggtacacatgtcacttttgcaccgttagttctcttgtttctgcgaataggtctacttgtccaagtcctctgttttttttttcaaatgcctggaaaacactatcgtccaaaagatatccggtatgcgacaaaagagaatttatattgacctttaagaaatatatatatatatatatatatatatatatatatatatatatatatatatatatatatatatatatatatatatatatatatatatatacacaccatcttttctattctagatcagttgttaatactacatataccagtagtttctaaattacgtagatgcgtggatgtacaatggtcaaaaggatatagcatttgttcgtgtagggtgaacttttctaagaacccgtgcgtagaagctccacgcacatacactttgcctcttatcatctgttgattgtcttattagctatagacaaatttaatttttaaactcaatttatttgcagttgattttggagttatttcatcataatctattttttccgtattggtttttaaaccaccaataacacataagtaatgttttacatgttactttctttttcttttttagctgatcaaagtttatttcatgatgcagaaaactacaatattagtacacgtagcttgattcaaaaccaggtacggtttatgataacaaattaataagatcacataggtaggaaaactatgtgcgcctatttgaagagatcaaacatttctacgtacagaaatcatcgcattatgtgtacaggctgacaactcaattccaaacattcacataacataaaatgtataaaaagaatacatccatgtggacacaacatgaaaaaattgaaatggaagctcaatgtgtaaaataattccatctagctgcaaccacagagatgaatagcatgatatatataaataccaacaagtcaatatatatctccaatttttaaagcataggcgatgatcggttgcttggaatcaaaggattttatctgcaatacggaacagggttaggccaacaacggttgaagctgacatgcagatagtacactcttgtgatgtatgttacctccaatagaagcacagcggacgcactcgctagctagctagctcctgagagaggagctccctctctctctcttgttgaccacaaaagcaatctaacgcgcaggaaaggaaacgaattaatttttgaaggatagtatattatagttaattaacctctgataggtagttgctgttacccatgatatgcactcgctatcacgggaatgttgactctgttataggtgctaaggcccaatcgacttaatatatactccttccgtacttgtaaaggaagtcgttttggacaacgacatggtctctaaaacacaactttgacttcttgtttatataaaaaatatttattgaaaagtgatatatgtatgcttttatgaaagtatatttttcaagacaaatctattcatataatttttacattttcaaattcaacaacttgagagttatttatgatttatattttcaaggtttgacttaaagattgtcctaaacaacttcctttactagcatggagggagtatatcagtgtgagagttacacattaagaaaattaattgtgtggttattaattcaaactaacgttctcgcactccgtatatttattcttgatagggagcatatatacaacacaaaatgtactctttaactgctcctcctattaaaaaaacatattgtttggacatcgatacggtttgtactagctatccaacatatattatacgatactagtgcctccgatccgtttgttttcaaacgtatgatcgatgtcgttaatttttatatatactgtttggctgtctatttaaaggtaacttgttttatcattaacgagtgccaatgtactcccctcctaaaagattatcatgacagttagtcaaagtcatattaaatataagaggttaaaatactactatgtacttcattaatttttaatatggagagaaaacaattagcatgaggaaattaatactattgtttgatgattaaaacaggaagaagcgtataaagtagtattaaaggttccgttgaacaaacctctaaaaccacgatctttgtaggataacatttttacgctaaaaaacaacggtcttttatggattcagggagtagtatttttatatatttacactaaatttcctaactagccgaatgcatggtcaaatgtcatgtaaaaaaatcaataatattgtggagtacattttaagagagagagagtaacagcattattgtattatatgaaggtactttcatgataaataatttagacatggtttaatttttcacatatccaattcaacaatttgaaaacgcgtacaatattaaagtttctaaggttagtttgggatataagaaaacaacatacatatttttgtgacgagagggagtactacaatttacagaaaggtgcatgcagcaatatttggtctccttaatttccatgccctttagtctttatccaatattccattaaaacaataaattgggtgcaaaactagtgctatatattcaagttaacagaatattggtagggcaggttttagcagcaatcctaaaacggtcctaaatgcaaccattagttaagttaatcagcactgtgtaatttgcacagtacgtttgacagttcgtgtttactgagcaggtattatattaggaactgaagataaaaacagattccgccatagctaaaataatccaactatcttcgattgatcggcatcaagtagcacatatacacgtggccagagctagcaactatttccacttactccctccgtttcgaaatgtttgacgccgttaactttttagcacatgtttaaccgttcgtcttattcaaaaaatttaagtaattattaattctttttctatcatttgattcattgttaaatatatttttatgtaggcatataattttacatatttcacaaaagtttttgaataagacgaacggtcaaacatgtgctaaaaagtcaacggtgtcaaacatttagaaacggagggagtataaactgctatacataggaaaaaaaagcactcaaaacagcaagacatatagggaagtagcggtatgtagttacaactcaacctacctaactgagcttaatttaatcaattaattattaaaccggagacagacacgattagataataaattacgggattgaccaggtaggtcgaggcgcccaaccagcacaggaaaacccgtaacaactaactcgctgtggctctcctcgtcccctacaagctgaaaattagctagggttgagcaagattatgagtaaattaggctatctgaaccgtagaagaacttaaccattctaggcatgatcagtgctcgtgtgtctaactgttccagaattgaaaaacattaatgtaagaagatagtatcttgcttgtgtagactcagtctcattaattatatatatttgccaatatgtaatatatagatagatatactttgtcgcatggtttgtttaactaattaatttgttcttgctagctagtgcatatatatggatgggtatagtacaggcacagggcatcgtcaatagtagttctgaaaactactgataaaattaactaacaagactaatattctgcgctgagatcattaattgacatataaggatgctcactgtgtactcaacttgaggcataaaattgggtctcccagtgaaggaaacttaatttattttaaggcacatgcagccataattaggtgtcgagttacattttgggggagggaagagtgattgggttggttaagtagacgttgtaggtttgacaacatcagagagatgttgagacctgaacaacagaattccccccaccaagcaaaccctactacagcgcatgcatccatacatgctgcatcaatatatccatcttaattatattttccctggcctaatctatcccaaattaatcctgaaaattattaggtgcacctagtgaagaattttcccttgcacacaaagatcgacagagctagcagctgcagcttgtgaagatcgatcgacaataacaaatgatctttctgaaaggtacatacagatcatatttaggtaacggatgaagcagcttaaataataagctagcaacagaagtagtagtagtacacagatcatcggttgaactatatatttggttgataccaaacatttttaccaattagctagctatacgtactactgtaatctgtttttagttaacccttcccttaaatactctgatgacatatatatattttctacgtactatactactactcatgtagttcctcaattgtcatgggtagttgcatgcatggcaccaacatgcatgcagaaatcatgcatgcatgctagcttaattaggttctgtaagtatgcagtttgttgaacaatttgtgtaaccggagaggagatataggtagttagttaattagttgatcttgtgtggacctacacggcgtgcgcaataactgacatttttctattatagttgcgcgagaagcttaacttacaaaaccaccagttagcccacacgtagcatcaaactaacctggtgtaaccatctcccatctcactgtctttagcttctccctaacgatcagcacaagtgcacaacgatggagagatgtagctagctagcttatagctaaaaaaaaaaaaaactgcccaacacaagacaccactttccctttggctagctagatgctggcctcctgtcgttctatatattcccttggccatcgtctctctcttgccttcttcttctcaccctattggtagctcctgatttagttttttgcttctcttcttcctcctctcatctgcatctccagtggcccagcctcgcatccgcggcgcaatcgtttatatatatgtcttgatcgatccctcgcatccgcggcgcaatcgtttatatatatgtcttgatcgatcctcgttcttgatccgttgtctgaattaaccccctgaaactagctaggagattcttttgttgctgcagcttatttccatgctgcaactttaggaagctattacacatatatatatacttgattgagagatacagctagttgcaagattatagcaaagctagagaaagagggggttgagagggagattggatttgcttaatttgttacatattctggtgatcgagatcgatcgatcgatcgatcgatcgggaggatgtgcaccaggggccactggaggccgtcggaggacgagaagctgaaggagctcgtcgcgcggtacgggccgcataactggaacgccatagccgagaagctccaagggcgatcaggtgtgccatcatgatatacacatagtagtacatatctacatatgctcaagaaatgatcaatcgatcgattgatatatatgtgtgttatttacttgagttcttgatcgatctttgggttgagtcggttcattgtacggtttgcttcttcgtggtgcaattcatccgagcaagtttatttgacttgaggctttggcatgtgttttagttcgttttatgatcagatagaattttaatttgttagagtgtcatgtcaaagaggtgcaatctacacagttcatcaatacatgatgtccactgctctgatgtgtatatcacatctatatctcttgtagagcaatatattccatctctcctgtcgagctagagctactactagaggtagttactaattgatttacaacctttcttgctctataattcatccgtgctttttaccttctcaatttatagcacaagcctcatgctgcaatggtgtgtcaccaatcgcttaaaaaaacattcatagtgtaaatagtttacatgcacatgtcttattcttttttatgcggcaaaatagtcaggactatgtgtctccagtaagtagtgcatagcatcggccggagccccttggcactcgagcatgaacaggtcctccttgagtagagccgtgcccctcgcagggggtggacggagatcggcaggctgttctcgggccgagaagacaagtgccgtcaagaaccactggcatgtgatcatggtacggcggtgcaggtagcggatttggctgtcgcatcgccggggcggtgcctccgccgccggtgctgcgaaaggcgacgagagcccagttaggattagcaacggcgagaagacggcgacgaggcctcctgccacgaatggcagcggcatggccatggcctccttgctcgacaagtaccgaagagaatgcggcgccgctggcctgtttgcaattggcagacaccataacagcaaggaggattattgttcatctactaatgaaggtgtgtttacagttaaacatacaacaatctcgtatgccaatagtacacatttaccattgatccattagttcaagtctataattaatagtgttattcttaattatcaattttactatatgctaatggagaattaattgttttgcagatacgagtaaatcggtggagttttacgacttcctccaggtgaatgcgagctcgagcgacaccaagtgcggctcgagcattgaggagcaagaggataaccgggatgatgatcaagctgaagggcaggtgcagctcatagatttcatggaggttgggactacttctcgtcaatgaatttatccacatacatatgtgtatttaactaggggatcaaatgatccaaaacatgcagcttgtaatgcatgctttgcagtttgcatgctgtgaaaggagagggatgctgatagaaatctaacaccaaaaattaaagtatatacttatagaggaagagaaatgcgatgacgtacgtatatatatgacatgtaatttattgatgtaattaaacacacatatatatctgttcgatcgtccatcctcggatcgtacatgtgaaattcctcatggtaaatgaggaattaattattctctcatctatttgtaaatttcaattaataatataaaatttaatttctgttttgttactcaattgcatttttttatgccggacggatcgatacttgattgggatataacttattgcaatacaccacttccctacatatactccaaatagttcctattggtctaatagtattaattaatattactacctatatatccaaaagagtgtatcttttagtactatttagctaaaagagtgtctaaaaatattactacctaattatccgttgcctagtacaatatgaaaatgcagcagcaattttgacattatcagtaatttgatgtataattaactatgtgaatacgtcccaattggacatgtgatgttgatgccatatgtgatggaagcagtccaccatatttatcgtctaccattttgtttgtggatattatattctgtttatgaacatatagtttaactaatttcacatcgatccatcattgattgaccccctggctatcctagcttttctttgttttggacttcatctatacagtataacgtacgcatgttaatttgattcggaatggaatatggaagatgcatgcatggaaactaatatgcatactatactggtgacgatggatagttgttaatttgtcacctttcaagtgcacaaacttatccgatccattcacgcttctttgtcgaaaaatcgcttttagagacttcacccggcctagagcagtgtaacggtgaagcctcctgttactatatgccatgacatgacatttaacaaacctggaagaactttcccatctctctcgtttgcggtgtgccaaaaggaaagaaagtttaaaaaaatgtattggtcgatcatttgtgatatttctataaatctattgcactatgtcgacgtgtcctttttactgcttctgttcgaaaatgacgataatatagaagttacgttttttcactactttctaactaattgacaaaagaggtcgaaacacatgcgtgtcaattactagttctcaaagtatttcaaatactaatattgtaacaagcactcaaaattttaccaggcatatactccttccgttttcaaattaatgataatgttgactatcaatttttcacctttaaccactttactcttgaatagatagactatgataattaaacaaaaaattatgtgcttatatttaggacgctatacattttttaaggaaaactacagtaattttttttaaaagaataacgagtggtcgaagtttaaaaataaacagtgaccggtgttaataatttaaaacgggaggagtataatcaaatggtcatacgagtgaaccactcttttctaacaattataaatacattcgtaatatatcttatagctagctagtatacaactatatatatactccttccatccaagaaaaaaactttagctagggataaatttggacaagtacttgttcagctagattcatgtctacaagttgttgtttttttctgcattgggtatacatccttaattagcaatatatattaattatgtatactcggatactccatatatacggatatgtatatattcatccttaggttgtgggacctataatcaaccaaagtgctgccctaaaggagaacaaattaattaagtgcactacccaaatttattgttatcagttctccagcgcgatcgacgaccccagctagctagatgcctagatatatagcacacttccatccatcattccataaagctattcattccaataaagctattcttcattccatcaggccggccggcagcagctaggcatggccaccatctcaagtctcaacacagttagttatggtgtacgtacttaccaagcacagagacgtcggcgtcagcagggcggcgagctgccgagtcgaactggcgtttcggtcccaagttagctagcactcgcagcgcccccgcacgcaagcgcgctgcaggccgggaccagatcaatcaaaaccaaatcgcccgatcgggtcgcgccctgcctgtgcgcgcacgacgtcgccgtcgccgcgcgcatgcagcacggccgcgcaaacgcaacacaacgcaaaaggcgtcgttttcgaacgagggggggagagagagagagagagaggagattctcccatccccagtgcgggagcgcgcgcggtggaaatgggagaggccaactgcttcccccaccacttcgcggccggcgccgttgttggtgggcgatgtgacgcaggcgctgtacgatcgatatggagctgagaatgagagattgtgagagagcggtttagtaacgggcaagtcggccgtttctcgcgcgatccggcccgtacgttttttttcgttatctcggctcgatcgatcatgcgcgttttttagaagagggaatcggttaatgtggggcatcgtggcgtgggggggatcgaggtcaggggtcgctggagcgacgtggatgggggaggggcgcaggtgggacgtgcgcgtcgagggttaatggggccgtgacgtaccagtttgatcatcatccggccgggacgatggggtgtgcaagtgcaacttaacgtcgattattcccagggtttagtttagtttaattaggccctgtttgggactaatctattagtctatctattttaatcactttcagttaaaaaaatccaaacaagggtgactaaaagagactaagggcccctttaaattggaggattgttataggaattttggaggatttaatttcctaaggattttttcctatgaaaccctttgattcatagaaaagtataggaaattttccttaggattgcattcctatagctcaatttcataggaaaataagcaagaggttcaacctcttggaaactatcattttactttgtttgtttcctatggtgctatcaaagagaccctcttcatatttcctgtgtttttcattcctataggattagaaaaacataccactccaattcctatgttttttctattcctttgtttttcctatcctacgtttcaaagaggccctaaaagtgcatattgggactaaaatccattagtccctcttggaggtactaaagtggcagcctctctctagagtctttagtctctagatccaaataggaccataatcttgtggtgtgtgcgtgtattagtggaagacaaaaccctctcatagcttgcagtggtcttgaaatccatcctacaagagggccgcttatggttttctacaagcacaacgtcttttgggagtctagtagaacccaacagccacccttcccttttcttaggagcgatttcaaatttagttccccctagcattttttggttattttttctcttgtgtcctcaggcaatggccgtctggccggttgcgtcgtttagttaaactctgttttcttctaatatattgacgtgtaatttttttgttcgttcgcgaaaagagatgattgcatatttggttctttctttatagaaaagtagttgtgtacgttgagacacatatcgggtacagattttgcaggaactactccctcagattatttgatcccttttcctattagaatttatgttgtcaagcattaatttgctattctgcaatcttttgtgtagtttttcataattttttccttgattgccagtttctatcaaaattttatcttctctctttgcgtttttcttttttctctctggtcccgcagaattttattaattccttttattcacattttatatgcttatcttcaaattatatatcagatattgtatgggccccataacaacagcgcattaggacgttaaaccaaactttggaccacagctagctagctccccaagtacacgctggtgtgtctctaacaaaagaagtacacacacttgtgcacggccacgttttgcacactatgcacttgcatagttgcattgcaccccacgcgctcgcatccggaagtccggatcaccggaacgctttgcgcgccgcctcgaccagacgaccacgtaagcgcgatcgagcggcgggctcgtacgtttcggcctggaaatcctccgatctggacctgtctgtgtacggcgtgggtttactgggccgtggtggtcgtggctaaaggaaagagtttgactcccttaaaaagtcacccgaatctaatccgtagccctcaatcgtaaaaccagataggatgactctctaaactattcaaactagtgcaatttgactccctcagcggttttgctgacgtggcggtgttgacccgatcttcatcccacgtggcacttatgtggcattacaattaaaaatattttgtgggacccgtctgtcatttacacacaaaatatactgtgggacccacatgtcatcctttctctctccaacccttcttcctcccccctctctctcccttctctctcttttctcctgcagccgcacccgctgaacatgccggtgtagttgaacccgtgcgccacctcgccggtgctggacaccacgatgagcccgatgaacccttcgtccagccgttccttgacgcagtagtcgatggcctcctgcagcccggcgcccctgtactccatcacggcggcgacgtcgcacgccagcgtggagcgtatgatggccttgccttcccccgacccgatcaacggcgagtcgccgatgcgcccggtcatcttgttcatcagcccgcccgtggacatggccgccgcagtgtggccgtttgagtgcaccactgcgcaacccaccatctccggcgtgggatacggcagtcaaactacttgtaccaattaatcacaggatgtcacggttagatgttagcaatttttataggcgaattggtaacatgagtcaatgcgctgatcgacgaaccaagatgctattggcctccttggcgagcttcagcatgccgacgttgtcctcggtgatgaagtagctattgtccacgacctcaagaccttgcaaacagtgaccacaaagaaaaaaaatcagaccagtccatgacctcaagatctgcaggactcgggtggaccacgctggtaggacggatttgtcctgcagctgctggtcctgccaaaattcgactggattccatggcggccgcgccttgctaccccacaccggcgctgcacttgcatctgctaggcaacgctgtgcacatgcatgttctccgagcagaaagaaacagaggcggcaccccctgccggcgcagaccgggaggcacggctagggccggcggcatctcaggtttcgccgtctacattagccctcccgttcgtcccagcctggcgcggcaccatcatgggggaggccaccggccagacgcccccgccttctccagcgagctgaggccgtcgccgctccaccacctctcctccgactctctgccgtcgccgccgaagccgccgctcgacccgctcaagttccttccttcgcgccagccctcaccctgccgccgccgccgctccagattccgcaccgaatctggaggaagagaaacatacagagaagggagagagagggggaaggaggatagataaaggatgacatgtgggcatcgcaattttttttcatgtgaatgacgaatggagcccatatagttttttattttaatgccatataagtgccacatcaacaacacatatcaggtcaacatcgccacgtcagcaaaaccgccatccaaaaccactgagggagtcaaattgcactggtttgaatagtacgggaagtcatcctatccggtttacttttgagggtcacggattagattagggtcacttttaagggagtcaaagtggacttattccgtggataaatggggctttagtggtggaatgggctgtaatgtagcctgtggccgtcgaaaagctgcgtcaccgttgggctttcgctgacggcctcgtagcgccggccgcccgctttgctcgctcgtgttgctatcaagttcacgttaggtccctatatttgtcgtccaatctgattttcatccctgaaccgtaaaaccggatataacacatccctcaacttacaaaaccagtgcacataacatcctaaggcggtttgaatagtggttttggctgacgtggcgcctacgtggctggtttgactagttctccgtcccacgtggcattgacgtggcgcttacgtggcaattatatctcgaaaaaataataaaaccgtgggcccacatgtcagctaaaaataataataattttaaaatggtggggcccacgttggcccacatgtcagttacaaaacaaaataaatagggtgggccacacgtgtcagtctgtagcgatttctttctccccacttgaccatctcctccaatctagcaatccccatccgcggacggcggttgctgcggtgctggcagcgcacagcacacggagggtaagcggaggggagtgggggcgtggccaggctctcggcctccggggcgcaaagctgccgcggcgtcatctgctccgggcagcgccgcggcgtggctagccgccagggcccaggggctcagccgctcaggcgagcggccacgcacgcgcatgagcgtagcgcaggcagagcagaggaaggggcaagcagggcggagggcacaacagcagtgcaaccgtgcagcaccaagcagcaacaacaagcaagctaactagccactcaagcagattgaaattgtgaactaatagctctgtatcttattaacctgaaataatggactataattcgatgtttgcttcaagaacctacatccacacctttacatactcaccagcgagcgacggtcaaagaggcggggctggtacggtggagccatggtagaggagcggcgtgcgactgcgactcggcggcaaccggctcgccggcctcctcttccccctctcccgccagcacagccggccgccgtggtatcctcctcctcctccgcggtggcggcggtgggcggtgtcgagctcccgtccgcgcgccgctgcgactcggcggccggcggagccaagcggagggcgccagcctcgtcgtcgtcgtcttccggcgcgcagcggcgcgaagctggcggggcggggcggagcgggcgggcgaacggcggcgcgaagccgacgggacggagtggggcagcggcgggcggacgcgccggcggagtctccttgaggtcgtcgtccccggcaccgccgagaccgtggccagagaggggataggggaggaagaagagatggggtgagaatgacatgcggggcccacgtgggccccaccattttttattcatttgtgtgtgaaactgacatgtgggtcccatggggtttaatatttttttttatcgaattgccacgtcaccgtcacgtcaatgccacgtgggatgaagacctagtcgtaggcgccacgtcagccaaaaccgcccttcatactgtcgagggatctcgtttgtccggtttttgtaagttgggggacgggttgtacctggttttgcggttaagggacgaaaatcggactagccaactaatagagggacctaaagtgaacttattccttcgctagttgccattgaactactcccttcgtactgtaatataacaagcttatattcatagtactagcttcaataacaacatattctatgttttatattttagagtgaataggataaaggggacagataggtaagggcatgtttagatctctaccatattaatccattaatagtgctaatatctaggtaatctttggcactgttaatgaattagaatgaattagtaaggtagtattatcagatcatgtttggattgggattaatataaagccaaaatttgcgaagtgatttagttcaactggttcgatttattgtggtggaaccaacccaccggggttcaaatcatagatttgacacgagtgcttacatttacggataattattctttcggtggtagacaacgtacccgactacccgtcgaacgcccatggtgacttcgtcaatctcaagatatgtcgacctaatctttcggagatgctcgtagaggtagggtgtgcgtgtgtgtttatatggtgagtgcacgcgcattgtgggaacttgtatttgttctgtgtttcccgaaaaaatcatagtgaagaaacttctagaatttagctaaataaaacatgggcactatcaatttggttggccttaatccaaactagcacatttactatttatattgctaaaaaaatggttttacacatttaggtatcaatccaaaatgtccccaagtcttttgtcgtttatctcacttgtatatttcttcttcgattttttatactgccaatgtagaaaataaacttagtaatccagttcaatatggacagtgggattgtctacttcttacatcgaactctagttatctctgcaccaacttattctaccgactaaagttgctcagaaattgattctcgacactccttgggatgcatggatatgtaagagtaggatttttttatgagttggaggagagagaggaagagagagagagcatgagcatgcgactaaccagtcgcctgtgatgtccacacaaaagtctttccatgtctgcttccttatcgtcttcgatgtggttgcgaaaaccaagttttttagctagttaccataacaaaacgagaagtagatgtaggttttgggtgaagggacttccacagtgggccaaagtggagtttctattgatgaggtgaatgtatgtgcattttcgaccatgtttagtagggtttcaactcctaaatataactttaggagctaagtctatagtggagttatagagcgttccgaaccccaccctatctctctagtttatttttttcggatcactctagtctgctctgctttcttttcgagtgaaactaaagtcgtttggttgggttcaactctaagagaagtggagctaaagctaaagctttgtcaaacagacctttcgttaccctcagttaggggagagcaacaatggattcctaatagtactccatgtctaaatgcattgattatgaaagatcacagggttagataaaaacttggtaaaaatgaggtatgatgtaagttgtgaatcaaactgaatattgactagatataatataatgctaatctagacaataacattgaacatgaaacaattacacatacaacacagatacatatgacatgcattcgattgctttctatagcgggcagcgctttcggtaacaagcaaccaagcatgttcatactactgataatatattaatttgttttcactatgaatgatatgtgacatatatccaaacactcgtgaatcaataatgagatccattacctctctaaaatctgaacaggcatgcacgtgtgattgtcattccgaatcaaagtggtttctgtcaaacggattcaccagaccaattggcagacccctttagagcatgtataatagcagactataagacaaccagaaacactaatgtgcgattgatcgctaccgcgatgggtagcgatcaccacccctcccccctccctccctccacgtttccttttttggtaccgcattactttcctattttagtaaatttatacacctaaagtttatacgcctaaagtttatagtcccaaagtttataaatcaaaagtttatatattcaattcaaatttaaatttgaattcaaatattttttatagtatctctatacatctaaagtttatacacctaaagttgtagacccaaagtttataaatcaaaagtttatatatccgacttcaaatttgaatcgggtatataaactttaggtctataaactttaggtgtataaactttagatgtatagaaatactatatatgaaaaaaatttgaatcagatatttgaattcaaattcaaatttgaatcggatatataaacttttgacttataaactttaggtgtataaactttagatgtatagaaatactatatataaaaaatatttgaattcaaattcaaatttgaattggatatataaacttttgacttataaattttggtctctaaactttagatgtgtaaacttgaggtgtataaatttactaaaataggaaagtaatacggtgccaaaaaaagaaaaccaggtggagggagggagggggaggaggggggcctaccgatcgctaccagatcggtagggcgatcgatcgcccattagaactaccctaagacaactataaacacattttgagaggataaaataaaagagagaaaagtagcggactacagatttgttgccagctgtagcacgaactctaatatgcatgtgtgtatgataggtgagtccatatattaattgtatagtatatgtttatatatagctatggtataaattggctataaaattaactataattcatttggagcgggtagttggccatacccttgctattatacaaccctaacttacactccaactaccacggtaggaaccaatcacaatgaggggcttacataccggacccacaaaagatagcgcaaagaaaaatgggatcaatcttgaactgacaaagagggcccacatagcagccagacacgacttgtggactctgccaaacttaaaccccagcaactcggcttcctcagccctgcgctgcgttgcccccctcctcctccgccgccgcctcatcccaccactcgctagtccaatctcggtctctccccgcgccgccgccgccgccgcgccagccgcccctccccccgcggaatgggcgcgcaggaggcgtcggcggaggaggcgctgcgcaccgccgcggccgaggtctccacctgctcgacgacgcgccgcctccgcctgttccgccacaccctccctcatctcctcgccaaggcgtcaggtacctacgccgccatcgcctccgctcccccctatcccctggatcgcgcgtgctccccccttccgtccgcggattagtctccccgtgcgcgttcgcttgctcccgtgctcctaccccccctttttttttctgcgatcgagaaaattctcggactctgatggcggatttgctttgatttgtgggagctagggctcatcgtcccgcgttgcgcgtttgcttgttcgtgtggttgcccaattccgttttacttgtagcggatcgtagctcgttagcttcactcgtctgtgaatgtggtcgctatcctgtgtagattgagaataatagtgcttggttttgctcctcttttgcatccttgtctcgtgttatgccatgcgatctgtagtgttattttagttgcttagattacagttaggtcaggactaagcagctacgtagcttctggagttgcttgctgttgtttcatcctgacatctgtttagtagttttgaaccaagagaatgcttgtatacattcgtgtgaagctaagtctctgcttgcttccaagtggttccgcaaagcaccattgttttgtatgtatctcgtgttggtctgatctgcaattataactgaattgcatcgcgcgttagtcctgactgcaagggaagttggttcgtgtgcactcatcatctccctttttctactatctgaccaaagcttttattatgataagcgattaagttcacagatgcatagtgtaatctgagcctcccttgaagtacctgcattcctgatgcagagcgccagagcatatgcttctttgtgttgactagatttgatagtgatatgtcactctaagcttaatacgttggacatgcttgttgaatataccaaaagtgaatatgatgctacaactgcatggtctctgttaccatgcagtgtatatgtttatcacacacacttatgttacggctgttcatgattctctagaaaacttgttgcaaacaaaccaaggccgctgaactgatgtaatagatccctacaccaccaccactaataagttaataacacacacaaacacatactttccttgctacgcatctggctgatacaccttcatttcattatactattccatgtataagatcgatgcaaagctgtttttcttaagattgctttgtcccccctgcagagtcaccatcagatacaacattgttagttgatctcattttccagacattgcttatatatgatgatcgggcatcgagaaaagcggtcgatgatatggttatacaggctcttggtgaatctactttcatgaaaccctttgctgcttcacttgttcagtgcatggaaaagaatatgaaggttacaagtcctcttgcatgctt

SEQ ID NO: 20439 - DNA, 758 bp, Oryza sativa
gagctccacatactcgcccccacaccccccccctcccccgcaatcggcgttgctgttgggatggaagggcgcgagggtggggagctcgggtcggcgtacaaggccgccatgctcaacggcgtcaccgtcgccgtgaagcggatgcgcgacatgaaccgcgtcgagttcgaggagcacatccagatgctcggtgacctccgccaccccaacgtcctctcccccgtcggctaccattatcgcagggaagaaaagctcatcgtctccgagttcatgccacgtggcagcctcctctacgtcctccacggtaataataatgacagcaaatactagtagttcttaatcaactactaatctcgattatagtttgctaattacgatgtgtttgtttgttggttaaggtgaccagcgcccggacagggtggtgctggattggccggcgaggatgaggatcgccgtcggcgtggtgcgaggcatggcgtacctccacgagaagctggggatcccgacgatgaggctggtgagcatggacggcgccgacttcgacgccatccactcctgccgccgtggacatctcacactactcgccgtctgaggtctgcaccgcctccacattgagctgcccaccggcgagctcggcatcgaggacggcgtgctcctcaagtggaaggctgacttcggcgtacaaggccgccatgcgcaacttccatcccaacaacaatgccgatcgaggggggggggggggggcgggagtaggtgga

SEQ ID NO: 20440 - DNA, 768 bp, Oryza sativa
ttcctgcaccccatccgctccctgcaccgccgcgccatgatcacatgccagtggttcttgacggcgttgtccgtgcggcccgggaagagcctcgcgatcaccgcccaccggttgccgtgggcgcggtgcgacgcgaggaggagctcctcctcctcctcggtgaaggggctccggttgattcttgggtcgagctggttgaaccacctaagcctgcagcttttgcctgaaaaaaaattatttgtcattttcaggttagctctttacgctatgtagtttttttttgtgcttggtgacacaccattgcagcatgaggcttgtgctagaaattgagaaggtaaaaagcacggatgaattagagagcaagaaaggttgtaaatcaattagtaactagctctagtagtagctctagctcgacaggagagatggaatatattgctctacaagagatatagatgtgatatacacatcagagcagtggacatcatgtattgatgaactgtgtagattgcacctctttgacatgacactctaacaaattaaaattctatctgatcataaaacgaactaaaacacatgccaaagcctcaagtcaaataaacttgctcggatgaattgcaccacgaagaagcaaaccgtacaatgaaccgactcaacccaaagatcgatcaagaactcaagtaaataacacacatatatatcaatcgatcgattgatcatttcttgagcatatgtagatatgtactactatgtgtatatcatgatggcaca

SEQ ID NO: 20441 - DNA, 3199 bp, Oryza sativa
tatctttattcacagtttttttacaaaaaataaaagattttctttattcacaattctataatcgatcttttacaaaaaataaaagattttctttattgtgaatgaaaattgtaagtagatagtcatgtaagaaaaatgttgtataatatcatgtagtaaaacttagttagatccaaagtttattcaagcagtgaatgttctataaataaatttaacataaaccaaaaccttattcaagttcttaagcggaaatataaagtcgcgcaaagcgtgactatatggctagtaccattgcaccataaagtacttaaagaggtttacttaattaaccgcaagaatgagatcttaccggatccaccagagaactacagcctgctgtaataacagtcaaaactgtcatgacgtacattagcgcacccaagggttgttccttactgacgtgaaaatgtagatctatcagatagataagaatgggggagcacacaaagaacaggaacatcgagataaccatctgcatgttaatggcagaaagaattgtatcagacaacagatttccctcgaaaaaaaaaagacaacagatttcactatatatggacaaggagtatttttaaactacgtaccagaaataatcccacgcaacgaaatttttgagaactcttccggagtcccaggaggaacagatacaccgtatccaaaacaaatccagccacgctaacaaagagagtagacttgtgctcttcggtgttaacgacgaacaacaggtgaaacaccagcaccatgttcagcatggctccagagaagacagaaaagggtgactgatatttcacggctgtttccaatcttcgcaataccaacacaagaaccctaaagaaacaatccagtattgtcacactttgaatttttccgaatttgatcttaaaatacatttcttcaatttgctaataaccaaaacaaatttattatgcaagcaaaacagcaaataaaaaaactaaggcatgccccacaccttctttctcccattggggcattttatcccagtggttattcgttcttccaaagagttcctacgatttataccggctcctcattcactcgccaatcaccagatgtgtcaatttgctattgtcagcaaagttcaagactcatctagaggaggtaaatcaatagatacggggtacgcctagttgaagcaacccctatacttctatgggttgttccagcctctactcggtatcccgcaatactatcgcacaatcctttagaatagtcaggccatactcttctagattgaacttggcctcgctcaagcaatccatgctatgcatcactacagtgtgcttattcatgctggcttccaccacaatgctgaactgctccctctggaaaaccaagctcttctaagcggacaatgtattatttgaattgtaaaaacctattcttgcgtcaccttctacttttagaaatggcaatcagtcctagattcaatagcagggggcagctagttcaacagttacttaccattttagggcttctttcgaaccacatgatttctaaaatgcgggaataataataaaaaacataagaataggatgtcacatactttgaattcctaggaacacgaaataagtagatacaaaaatacatttggatggttcacaggaatcttaaaggaaataacatgtggaagagagagcagagagagagatacttagcaagtgtttgaccaatttcacttacagtggtgcgaggtcgataaacaatgatacaatgtcgaacacaaatgaaactcgaccaatttcttcgacggcagagccatgcgagtccatctgtaaacaacatcgtgagtgtattagcacgcaagaattaaaatgatgacaaattatgtagtatgtacatttggattgagtgctagattcagagcgcaggtaggcaggtagcgacgggatagagttcgtaatttcgtaaatgcacaagagctaggttggtcatccatgaaagaataacaccaacataacaataaaatacacgcgtggaacaacataatattgcattttattattattatttttcattattacatacatgaaggtcacacaagtcaacacccacaaatcacaaatgtgcattctgatacgtgctaaagaaaaacagagaaaaatgctactaatattgatgcgtctactaacgcacgctcaaaaatacgaaggacaacaccactaaaatttaactaaaatctattcagagtgcacaatattcaagaaccccgggatcttgatgtcatgagcgttgcgcgcgacaaagcgagtgttgtgcgcgcttgcgttgctctggttcaggagatgcgctctgctctgcaccgtcacgtcacgagcaccacgccggcatcaccaagacctcctacttcggggttggattctaatagctcgagtgaacgtccacccgtttattgcatgtcaactaaatggctacgaaaaattttcaaaaaaaattggcaagatagatcaatatgtaatatatcactccacaaacatgcaagttaaaattcaacttctacaagttgtaacaaaaataacaaatttaactgtaaatatacatatagtaatttgagttttgtttgttatttatattataatctgtagaagttgaattaacttgcatgtttgtggattgatacattacatattgatctatcttattcatatttttttaatttttttcataaccatttagatgacatgcaataaacgggtaaacatccactcgagctgttaaaatagtttcccctcctacttcgtgcgcccaacgagctcctcccactcccaggactgctgatccaccgcgtcgaggcgaccgacgcgtgggagtacatcgacttcaatcctacccagtggccggcggcgagggcgtcgacacgacggaggccatgtactcgcggaacaaggagggccgtgcacgtcatgacacggcacgcgccgggccggtgcgacgcggcggcgaacgcgtgaaacgtcggcgtcgggcttcgctatgagtggagcaagttctacgcctccatggcgcatcccgcatgctaccaccttgactgcgacgagccggacgttcgacgtacccgccgggacgccttgccggcgcctcgttaccccttctcccccctctctctctctctctctctctctctctctctctctctctctctctc

SEQ ID NO: 20442 - DNA, 4488 bp, Oryza sativa
gctcccgacttgcaccgccgcggcgttctaatgcgcgcacgccgcacacacggagacacctcgcctgctcacaaccccccacaccgcgccaccacacgcgcactctcggtctcgctactcacacaacccaacccaccaccacggcgccaccgctcgcgtgcgccagcggcgcttcgctctcaaccggcggcgcgaaccgcgtaagagcgcagagcgctccgagttacccatggttccatcactcacacgcagagcgttcgcaacttcgcacacggtgcaagcgagagaggggaggaggaggaggagacgaaccttcttgcctcttggttgatctggaagcggaacggatcggagagacgaggccggggaggaggaggaggcgccacggcaggatccaagcggacgaaactgcggttcacggtagcgccggccacggcacacgctgcgcttctgccacaagagagagacggtaagacaacgagaagatggcacggccgagaagaagaagagaagcagaagatggagatcgaattcgaaccttcaccaagcgcagatggtgtggtggccgaggcgcaaacgcaaacgggcacggaacctcgttttattgacggaggtgaaggggagaaacgaaagttggaatggtttgttatgcttttcagagctgcagtggcagctttggcaggcccagtgattccttgtgttaattatactgtaattcaaaaaacttcttgtatttttttctctctttttcagtttgaccaaaaagttaatttctggttttacattttacctctaaaataattatgcctaaacaaatattccctttgtttttttaatagataacgctgttgaattttttagcaacgcttgaccatccatcttattaaaaatttatctaaatgttatttgttttcttgtgtcatgttttatcactaaagaaaatttaaatattacttatactttagtacatttacactaatttttttataggatggatgaatgatcaaaacactgcttaaaacaatcaacggtgccatctattttaaaaacggacgtagtagaaggtaagaattatatatgaactccaattctactctactacatggtggtctcattggcaatgacgggatggttaagctggtgatcgttggggtttgtgccgccgtcgacgccgacgaaactagcactagttgattttgtcggttctgagaataatggtggtggcctgggctcgcacggtcgcatggtcttgcgtcagggtgccaatgctcgctcgcttgcgagccggcctggtcgctcaagaacgccgcgccctgcgcccgacagacatattctgtggcgtcgtgctgctagtctgttagacccctgtgcttgtgcgttcgggccggcgcggcgagcacggtgttctctgcaccccgaccaccgtacgccgcgcgaggtgtgtatgcatgctctcgcgcgcgctagcgtagctacgagccgtgccgacgtgccgtcccccgcccccgtacggttcgccgcgcggtcgtggtgaaagctagcgtccgtctttgtaagacacaggaagagagcgcggtgagcgtcgagcgccacgatcttggcagccgcgcgctctgctcacgcggctttcttccacttccaccagcgcgatcgagtgtgcatcccggggtgatcggtgcccccgcgcgcgtggcgcgcatggagcagtttttcgctgtaagaaaggggaaattccttgtgcgcgcatgcaatcttgcaagctcacagggtaagtagctggcaaggaataacggatcccgcgcatgcgatcatgcaagctccaaaggtgcagtcgacgaccgcgggcgcggcacctgtcgcgcgcgcgcccgccacgccgtgcgtccaagtcggcgcaggcaaaattcccttcgctttctgcggcatcctgccgaggccttgcatgcatcggctccggtccggcgcgagatcctcggccaccgccggcgtcattggtcatccccacttccccagcacaccagttacaccacaggcgcacaagttccggctcgccgcggcgaccgccgtctactgaacggtctcttctacgccaagcgcgcgcccgatcgtctgcctcatgcacaacgtacctgtactcgcgcggtggcagctagccaaccagacaagctgcagattttctcgccgaggtcagttcgcggaacgacgtactcgcggaaacatgggcgccgcgcgcgcgctcggcgccatgcgagcatgcatgcatggcttttcctcgcgccgccgcgccaacgccatcgtcaacttccattgcacgcagagtccgctccaagtagtcttaacgggatcgagcacaaaacgtcgcacaccgcccgcccggccgctgtctcttgctgctgtcatctcgcgtcgtcctcgggtcttggcgtctcgttgccatttcgatgctcagcgtgttgcaacgtaccgttttacgaaaaaatttaaaaaataagtcataaaataatattcatgttttatcatctaataacaataaaaatactaatcataaaaaaaatcaaataagactgacggtcaaacgttggatataaaaacctacatctgcacttaaaacgtgatggagggagtggtttttagagtttattgtctagttgggtttcgtttttaaaataatatattcatgatttacagaagtcctgtcaaacgtcaccaatgcactcctctacgtcccgtccgctgcctcatctctttattatcattgggattttaaaaatcgaacataattattgtttatgttttttttattttctagaagtcccaccaaaccgtcagcggtttcgccactgtactcttctacggtccgcctgctgcctccactccttattatcgttgggattttaaaaatcgaacttgattatcattgtgatttatttttactttctattaagtcccatcaaccactgtaaccgtgctacttaatgatatgcctatcgttcctcctcttagtcgtcattaggattctatttggggttttgtttatagttttagttgttccatcaaccaccaccactcaactcctttacgtgtgttttgcttctcctatctttattgtcatttgtcatcgttgtactctggatggactattttttaaaaaaaatcaatatttttattccattttttttctaaattgtattcctaattgaactcctataattatttttctattttcagaatttattttatttgttattccaaaattttattaatttctctagatggtcacttctttcaatagtcattatttttatacgaattttagttatttataaaatttattcctagttttacattttttcttttctaattttagaatttatttttttttgaattttaattaatttatattgtgctcaatatgggctattcttttaatattccttattttttattttcaatttctacttgaaatctttttttattttcttattttggattgttttattttttattcaaaattttgataaatatcatatttggctcttgtatggactcttttatttcagttattttttttattcctacttgaactctttctttttttctaatttcggattttattttttttatttgtaattttaattaatctcatattgtgttcttatataaactcttcttttaatattgcttatttttaattctgaattttagttacaaacatagtactcctattacaatgtttaccctacccagaaatcccgaatatagaagcagctgcaagacctccaacaagacattattctcaggaagattccacaatacaaattgaaacaagtttagttgagtctaccttccaaaatataaaagtattatcgtgtcaaaaccatatggcacaaaggaaatatgtgtagtcttatatgcatatatgcatcataaaaaattgggcttgagcctgttattaatgtcacttcaaaatacatgatatttgttatatgaaacaattgtaatatcatgttccttggttctcgttgtcactcgaaaacagtctcctgacaaaacttctccgcggccttcttgatcttgcagctgaagcgattaacaaagctcagttagtaatctaaaagtacaagaaagtacggcatttagctatttatataggataatgtgacgccaaatgtgatatagactgattaaacaactggaagtaaagttaccttttagtctcccagacttcaacaaagcttcctcggcaataggcttccattgctgagcacatgagaatctgaggcccatcccaacagtcaacccacgtaaaagttgtatagttcgaagcactgaaaatagctcttcagggaagctcttcaaataaaagaatagaatagagacaccatttagtaagcaattctggaagtcaaatagtaccaacaaatataaaccatccatctccataagaggttgcaagtaaatggaagaaaatatgttctctaaattttg

SEQ ID NO: 20443 - DNA, 13752 bp, Oryza sativa
  unsure (1)..(13752): unsure at all n locations
cattacagtgaatgatttgtcaagaattttgatatttttactttcacaaattttgttgatgggacatagggacagcacaaatgataaagtagatcacacacttctagaattagtgctgcattttcaataacatttactatgtctggtttcttatgctaactaacttctgcacttccagttacgaattaggagcgcttgttgctgaagattgtgctgaaaccacttatgaagcagaaaagcagaagcattctaagaggtcaagagagtacatcccctctgctaaggctggctcacggcttccacatatgctaatgagagcattgtctacttcaaacgaggtttgctcaattcaccacctatttgatgtacacatttttagctaatattctacatgtgtaaattgtgtactccaatgggctctttcagggtgtgttctcaactctggatctagtaaatggggacaagcctgagtttgctcttatcattgccccaatgaaagtgtcatatgagcttgctcgtgctatgctgaagatagcagatgaactcaagttaccaaccaaaatttgtgttatatggccacaaggttcagttgatgctaaagtgaaagggagcagatcggagttggcaccatggacaaactatgttgatgtcgaagaagtacctagagctcctgttaattcttggtgggagatgtgccagataactagtaaaagtgtaattttggttaggcctgacgagcatatagcatggagaacagaatctgacagggtgacagatgcagattcagaagttaggagagtcttttctgaagttctatgtctaactagccgcatccagtaattgtcatcatttcagtgacaggagctaagtgtagttagggatctcagctgctcgatctgaactgccatgcagttcagtgttgcttgctatgacaaaatgccctgtccatgaccaataatttttgtttgtgtagttcttacgtacgctgattaccttgaaatgcatatgatcttaactcagagatgttatgtcaacgtgagtgattttctcttcgttaaaaaatgtggtaaataatttgattgtgtgatttcttgtttatgataacagcatttctgtttttcgaatggtaattttcagaatcataatatggtaacgaattattgttttattgaatagatagcattaatatcaaatcaaagaactgaatatcactaagtacaatgcaatgaacttaccaaatataacaaaatggtagatcaacaaccatcactgacatactcacattttagatttcaccagaataatgaagttatcgaacaaatattctgtacaaaaatcctgagaagtacatcacctgaacatacatgtatcacgtgccgtcaaaacttcaacagcaccacaacatctcattgttacaaatcttaccaatacctaagtgacaggacactggacaagcctcttcttcttcttctcaagtccccttcaaatgctagcaattcccatccaccttcaaacacagcatcatacaaaacctgatactacaaggaacatttgccctgctgttgctagcatagacccaagcaaagctccagcaacaacctggaacaagttttaacacccaaagaagttagcagcatacaaaatagatttttttttttttttttttttgagatagcatacaaaatagttggccatgactgaaagaaacaagaagatggtagcactgctgacgaagctgcatgatgtgacgataactgataagcatggggtgctaggtaaaaggggatctgatgacattggcacagccagtttgtggttcagttggtatccacgtaatcagcacaatcaatatgacatcgctttcgattggtgcagtataataaaatgattagtgaaaatggcatttgagcaaacctgggttggagtatggcctaagagttcacgcaatggtcttgtttcagacaagggatgttcagaaggaagttcgcagactatttgattcaacacctgaatatagttagaaatgagatacagttcagtataactgcacaaacaaatatctttctttgtgtcattacaatagaggcaaatctaatacatggtgttaaaaggtgtctcatgatgatattagcatgttcatattgatattaacacataaagaaacagtaactgcatacctctgcttgctttccagcatgtaatctgataccagaagcatcgtacataacctgccaatcaagtcacaacagaaattatgaaccctcgagcctcatcttttcgtttatgcttatgcttatcagccaaaatttgaattttcaaccttaaatttgaagttgattttagggtttgttcatcgaagtttatttttcagcctttgcttttagattgctaagaacacgtatataaaagttttattcacaatttttttttcgtttgtaaatatgaacaaaatctatgtccttcagtcaataagcgaaacgatggggactacatgtttaataataacaaacaggaaatcaacaaaaactcttgcacaatgcctacactcaacatcatggtgtccaagtcgaggcaagaaattgagtccaagcaacaccatcaatgctcgttgtctttgtcagaacaaaggaactcgattgaactaattaaacaggatacgagatggataacctaccacacttgcgaatattgctgctgtcgcaaatagggcacagccaaaaccatcttggaagccaatcgctacagctagtgctgtaactgtggcagaatgtgacgatggcatgccaccagaaccgataagctgcttaggatcccatctgttctccttataccttaatttcagaacaaacacacattaaacttgttgcaatattttctatcataaaaggacataatgagaactaagtcacaagatacattgctcatcttgcatcaggctgatgtcaatgaacaaaatctatgtccttctacccgaattaagatatagttaagatttacaatgcgcgcaaagaaaacttttttatacaaagaataaacaatgcttttgtatcctctgcaattggctcaaatggcacaacaatcaccatcgagctacttgctaatccaaagtggaaatcggataacaaaacaatgtcaagcaagaaaattcatacctataattttctcacttgtgaaagtactccaatttctcaaatgcacacaataacatgtcaaattgtcgattgtagtctagccatgaataaaacgcacattaaatctaagcaaatctaaatggcacctattctcctttaaacggttcttaaaccgaagagatcaccggcaattcctttgccccccatctcaaactccccgaaatcattcgataataaatctatacggaatcctaacattctcaattccaccattcttctaagcaagcaaaaagaaaaaaaagaatcgaaaccgattgttctgacggccggatcagatctccgggagaggaaaccggagttccaccgaacatcatccgaatccccccatgagattcgaattgaggtcgcgaggaggagggggcagagggcgtacgaaccgggtgacgaagaacttgatggactgcgcgacggcgaagcccagcaaggcggcgacgagggggtagttgtggaagacggcgaagtaggagaatcccgcggaggaggcgccgccatcaccaccaccgtcgtcgcccatggctctcccttctccttcccaccccccaaggtgcgtcccttccctccctccttccttccctctcctcgcctaatcccgggtcttccctcccctccccaactatatttatagcccacctcacctcacctcacctcctccgtaaaatgcttcctctttctctctcttctgcacaaatggcgatcttgctccgctcgattgatagacggattcgagatttttttgatgcaacagttgccttccatactggactgtctccctctcctcgctctctctagcttgcagaaaactactactctctctttcggagtacctcgtggacatgaaggaatcggaatttggagggggggagcatggagaagaatatgccgaggaagaagcaagttgcggctgcttgtattatggatgatgaattattggcgcgcttttatttatttatttatttattttatttttatttttttgtccgtgctgctgcggcggcggtagatccgggcttggttcaattcatgtttgcatgcacctcgttcgcgccgcaaaaaataaaattggcggaatttaccgccacgccaatatggtgaatctgtgggtgggtgtgcaaaaacagtttaaattcaaccgaaaaaaatctattatgatttcagaattgtcgaaaaatgttgctgtctagcccatagtttactctactgacagtttaaaatacaataattttcttaactatgtttttttctcgaacgcaattttcttaactatgtgagtaattaagcgattaacaagacctgcatggtggcgattcgtgtaagggacattttacgagcggccattttttttttggcacaaacttttgcagttacgcaactaagagcaacttacacaaagcttcacgtataaaacagactgccagattaattaatatcctaatggcgcaattaatcataacaaatgtagacgtagttaacccgtctggtgttgatcaggtccacaaaccatagattagccaataaacgaggagttcagatgaagaacgccaaagtcaggtcaacgaagacaatgccagatcttttttttccccttttatgttgcttcattttttccccagttggagagggttgacttatgttttctgcattaatccacatagcctgctattaatccaagcaatcatcctgtaattgcagatttgcagagctttttttttaagctgtgaagtggagttcacggtggattttccatgctaaagtcagtcaatttggattgctctgacatagactttgaaattgttggctaaactcctctttcactttccaataccaactgaattttgcattcttcagaaaaccatcacacataaaattgccaaaattacagctttgaacaggtgaccaagcaaacagcatagcctctagcagtctagcttcaactgtggcttcatccagggctatgccaggcaaagcatattgctggtctatcatcaacagtgttacatctcctacaaaatttgcacatacaacacccaaaaaaagagctactatgtctaaatcatagtgtgcctaacattctaacctgtcattttgtgatgaaacaccgattgtgtggcgcctggggatccatcatcttcttcaagtcaaggtccatctcatcctcatacttctcgtcctcctcctgtggctccgatgccttcctctgcctctccctggcttcagcggcttccatccgcaccttctgccggacatagtcgtcgtacgacatctcgcaccatttcttcgcgtctccgataacctgctggttgtgaagctccacctccctctctagcttggtcttctcggtgttcttgggctctccccagtagtcgtagcggtacataggcttactcgggtcgtagtaatctttgccataaacttcggtctcatccacgtcatatcgcccaggttcgtcgacaggaagcccaaatgctttacggctgccaatttttgagttagtggatatacattcggtggcatcaaatttgtagcagtagtaacattagttgcaattaccagcatatgtctctgataagagcttcccgctcttcgaaagaacggcgccattgcattaaatcgtactcatccatttctttgtttcgtcggagcttccctactttgtattcctctcctctttcctctgcttcctttcttagtttttttatcagctgcagaaattaaacttcagtatgttgaaaggaaatagcgagtgatcaataaagaattgtcctcgctatgagggaaagggtacctgacgctcagcacgagcggcatccagatcaagctccttgatatctatattctaacagaagagttcagaacacaaccagaatgtcattgggggatcattgtactgtaaaaaaaacaccctacgataattgaaagctagtaatcagtagctacgtatgactgcgtaccacaacttcctttttcagcagtgtgtctttgaaatacccttcagtatgttgaactctattttcttcatgaacaatggaactatcaactgtggactcatatgtcgtatccttgaatttatctggattttcctcctcatggtctaaaatcatttgctctgcattatgccacagccaaagctgcaaacaaaaaaaggatcaatttaatacaggaatagaaggaaacaaggcatgaaagctgccagaggatgcttatataggtggcgagaggcatgataagcatgttatcatttgagacatggtcaagagataccgtttcaacaaaggggtggtctgataccaaaggttctttctccatatctttcaaaggttttttcctaggaataggtggtcttccaccttcacgctgtcagtgcatatacgagtcagatgcatgcacagcacaatactgaagagtatgcatttcattaggcaaaactagtacgtgagaatgcacaaattattaagttcaacaaaattatggattcaggaggacagaggtcacacccacaactgctctgggttagtatcttccttgcggtgaaatattggtggatagtcgaacctattgaatctgcggttagaaagaaaaataagatgacaaacagttagtcaactaaaaacaaactgaagaaatgcacaagacacagggcactgaaacctccagattgtcagaaatcattggcacacgcatttcaaatgatgatactcacattagatgatcaatgttaggatatacaaagcgcatttcgagtgggaaacggaagcggtagggatctcgtttggcctgcatcatacagttatacaagctccattaattaattaaagaaatttccacaactcaggcaacaaaggaataaaactttttctatgaaaaataaattcattttcagttaatgcaaattgaaaagacacaattggcatattcacttagcaatgcgaacttcttaaatatttccttaatcttttgtattgctgccatcatatcattaaccactgtaagagtgaaatttgagatcactaaccagaatctctacatggacttccatgccaggtctgatgtgatgacggatccaataccaatcatttccttttattggtacccacctaaacaaataatgagatgtaaatggcacgcagaattctttcacaaataagtataccaggtccacaattgtatatcagaacaagaaaccatacccatcatgaacacaaccgatgtccacaaaagctccctgatagaggtgaacactgatcactcgaccacgacagatctgcatgagatgcattcaaccaaacaatcagaatttaagggcgagaacagtcaacaaattgctgaagaatgagagtacaatcagaacttctagcaaacctgtccaggatagaagaacgggagttcaagctgcataaaagcaatcaagacatcaggaactaataatatcaagaaattaaaattgaccaggcagtgaattgtcaagaggtaatgaacataccatgtcctctttgtagtcctcacctcttttccgtctgccagggtagtaatcctgatcaaactgcacgacaaaaatagccaaagaggggtattaccgcctagaacactacaaatactcttaaagatgacaagtgagactcaacccctaaactaaaggtctaaaccaacaaacaaagcttagttacaggagataaaatcaacccatggttatctgacgtgcctctctctgaagagagcataaaacagacaataccgagccactcaaatgaataacaaaacaacttgccaacatcgaacctaagagtttaggacacaggtgttcatgacgtacaaggaaataggcatctgagggggttctgaacaccataacagtttttttttttgggtcgaaaaggaactttttttaagtgataagaaaatacaataatagtagagggccgctacaaaaggggatcccgttgcaacgggatagatatattaactattctcttgcacgagtatcacaggtatcaggtcctaggtatcacaggtaccgggtaacaggtatcacaggtatagggtaccatgcagctggtaccacaacaggtattaggtattaggtaagtctcatataagggtatcccgttccaacgggataccgttgtctaggttttctgataatagtagactgttcatacaaatgtaaaatacttttattaagatatcacaaattcacaataaaccactgcagtaatcactaaaaaggtttattttcaactatctagttattaccagaataatgattttggactactgttacattctacaggtatttcttccatcctttgtgaacttatcacctctgataattatcatagtaattagcagcatgccaacacgttccataaccaatgtgaactgaatcaattggtctgcaaatatctaattacaggcacagaccactaaagcatgaacacttctacatctaactaacacaatgcacagtcaaacgcaaattcccagttaaatcaaaccatcacacaaatgatcgaacaaaattaacggctttaccttgtaggactcctcctccaacctgtcccgattggcttccacccattccttgtactgcttcaagaacatcttgtatcgatccagccccagatcatccggcgcgttctccaccttgtccacgtgcgtcacccccttggccgccaccgccgccatgtccagcctctccgtgaactccctgtgcgcctccctgatgaactccagctcgccggggtccacctcccaccccggcggcggccagtcccgcggcggcacgagccggagcgggagctcgccggcccacgaggtctcgaggggctcgggcgtgtcgcgcgtggcgaagaggcgctcctcgtacccgggctcggactccaccttctcccggtacgccggggtgagcatccggaacgcctcctgcgactccggcgtctggagcggcacctcctccccttcgttgaggctgtgccgcgcgaacgcgacctcgggggtcatgatctcctcccacggcgcccacccgtgctccacccagctccggcggcgggcgacgtcctcgggctcggtgttcttgacgaggatcgaggggatcaccggcgggtcatccgcgggggtctcgtcggggccggagggggagacggagacggcgatgcggcggaggcggcgcctgaggaggggcttggggcggaggccgaggtgcgggaaggtggcggtggccggagtggccgccattcttgctcgggttttggggacgacggcgtcgccggcggtggcgacgtcgaggggtttaagtgagctgaaacaggagaggataaggcaggtcgtgggccccacatgtcagtgagagattcagtccttttgctacagtataatggcccatgagatgagaaggcggaggcccaactaggcccaccaaaatttggatttccgtccgattgggccttacaacgaattcaccacggcgacgcagaccaatgccgccgccgccgcagcggcggcggcggtggcggcggcggagagagagcgagacagcggcggtggaacgcgcaggctggcggcggcggcggcggtggcggcggagagagagcgagacagcggcggtggaacgcgctggccagcctgctttcgcgttcggccgtgcgtgcgggtccgtgggagggaggggagctggagctggtgggggagggcgaccgtgtaatggagccgtggggcgttttcaagtgctcgccaactgttcgaccttttgcctcgcagggcgtacgctcggtatggactccctcccaacccgccccgctgtttctgatcgtagcatttagggaccatggatttgtatttccaattactttctgatctgccagcttcggcgtttttttaatgcatattgtgcatcagtgcttgtggagtagaaacccggtattcttaaactggtgggaggagctgtaggcgctgctcttgatatgtttctgttacctggaaattctgatgtgctaaaaaccgatccatgtgttatttcagcaaatatggtggcatggaaataggagctatgcccctttttgtttacaaaatcaaactatagggtggcatcgtactgtgacaaccaatataaaaaataccccggttatccaaacaaatcaacaacgaatgatttggtgaatataattaaggctacaatttattttgatctagtagttggtggaaaagaatatgaatctatctaagatcacttgcattgccaatataatatgaacaccattcagcaactgtccaattggtaagggctagatcaggaaaagatcagtatctaatgctagcatagtcttcacttaaaccaaaatttccttctgtacttctgatgcctgctgtccactcgtaaaccttcttcatgccctgttagtttcaatgttgataaatacaagtctagatggagttaagtaggttggtggctgcttgatatctctatgttaactctggttgatgtctaccctatgatgatcttcccacgaattccatcaccagctttgagaaagctgatgattcatctctgaggagattttctggagaatcaaactctagtatcttacctgcagtacgaacaataaaaaaggtacttccatcgcttaatatagttttttataaattagaattgcttttgttgaaccaaaggaaaaacatgggttattcgtggatatcttttaccttcacctaggacaagaacaaggtcactgtcaatcacagtaggaatcctatgtgcaattgtaataactgtgcaattgtttgtctcttgccttatagtcttttggatgatattatctgttgcggtatcaaccgatgctgtggcttcatccagaacaagtattttcttcttcattagcaataccctggccaagcatacaagttgcctttgtcctacgctccagtttcccccatcttcaacaactgcaacatcaaactttagtcatataacttgtccatctcgagcaaggaatttggaacgtgagaattaaaactgctgcaaggaaagatagttcttcatacctggtgcatccaacaatctactgtcttctctcacaatctcctcaaggcggcacttatgcaaaacctaaaagatgggggggaaaaatcagcactagactcgataaaggaagctgtctttaaattgttaactgctttcttgaaaacctataacagctatagacacttaaagaaatttcatttggaagagcatcttcacagcactatattttatagattgtttacctcccatatttcagtgtccagatgctgctgtagaggatccaggtttgttctgactgtcccttggaaaagagtcggttcttgtggtataacacttaatcttgaccgcagatcatgcactcccaaaagcgatatatcaacatcatctatgagtatccgtccttcacatggttcaacaatccgaaacaaagcgtgaattagagtcgatttcccactccctgtcccgcctaccaccccaattttcctttctccgggaattgtgcagcttatgcctttgagcaccattggcatgtccgggttgtacctcacttggagagaatcgatctgaatggttccacaccagggccatgattctcttggtctacagtcctcaatgactaaaggggcctcacttgttatgtttgagaactgcaaaattctttctactgaaatcattttgttctcaacgttgcacagattccatatgacccatgcttgtaacacattaaggttaaggccataggtagctgccagccctgcgaggcctaaacaaggagaaaaccaaaatgggttagagtttatagccatgtaataatattgtgatttatcaaagtactgtagagttacacatttagggtttctgaaaaacgtaaaatacaccacatggtttctctgtaaatccttttttttttttgtaacaacaaacactgttttaccaaaaagaataagcaggaatgcaatgcaagactgcagatctaattatagtgttagatacgatactattttttcatgggaacgcttacttggatcaatagtatttcgaggcattgagacaaggatgactagcgtcacaaagaagacaaggttgaagaggaagttgatgcgaacacataaccattcaattgttgctgaattgtggaaagtgatgtgggagtagtcatcaattagtgcaagactcttcctgaagaanttctctccatgattaaagcatataatagttgatgctcctgatacagtctctgaaaaatggtggaggactggagcttttcttatgccaaccatccttgntagttctctagctgaacagatgtaatagctctgcatgaagtttttacaaattactagcattttcaaacctgaggaaaacatattgcaatgaatgaaggtgtacctgataccaagtagagatggcaattataattatgaatagaatgaatataggccaggcaatttgagacatgatgaaaataatactgaggagctgaattaatgcgaagataagccctgcaagcctgtagggaatgtctgtgtcaactgtgctttgatctgttgaagcctgcaaagcagaaaactaagccgtgagaactggaagtaaggggcgtttttattacgatattcaaatgaagaggtagttggctcaccctattgaggattctacttgatggagtggagtcaaagaagttgattggtgctcgaaaaatactcctggtcatgcgtaagaagaactgatgagcagtttcaatggcaatcgttgaaaggacaatagctcttcccaatataaacacagaacttccagctgataacagcacaaagatacctatcatcttctccctgcttacttgttcctgcctctcagctgcccatgcaatccaatagttgctacatatctgcaatccctggaaaaggacttggcatgcaagaataacaggaacgagagctccgccatatgcagagttgacaaacttgcgataaatatcccatttaactcttccagattcgcgctcctcctcgcattccctgcctattacattgtgatctaattctatttctgtgagctcagtctgccttctcttgtgactcttatttttagtcaagacatgtgcttttgcaggtgtgacctgactaagggattggttatgtgcagccatttgcattgagagttctccattcctgtctgctaccaaatcatcatattttccggattgaacaatccttccatctttcatgacctacagttggacatttgcaatcatatgttagaccatataactctacatgtatgttcttagtaattattgcaaaaatgaaatatgacagcttgtgacaggtttgaaggatacaaaacccacccacttagtggttcgcttcccatttagttggatgtttattttgcacgtgtggcacttgcattaatggtcaagcaaagggactaggatgcatcaatgggctgaccaaagtccaatatgacccacttgcatccctagcagctgctcaaattaagatatttacaacaatatagccattttatttgacctaaagctaacaattacca

SEQ ID NO: 20444 - DNA, 3797 bp, Oryza sativa
atgccgctgcctcctcttcctgtgtgggctggcttttagtccagcggtcagcgccccgcaaacgcagcggccgtatgttgttgctacgttggttcgcgcgggcgcaacttcctctacgagctcctctacggccgtccgttcgccggcgccaccaacgaggccaccctccgcaacatcgtccgctgcctctcgccttcccctccgcctccggctcgtgcggccccgccaccgccgacgccgacgcgcgcggcctcatcccgcctcctcgccaaggacccgccgcccccctcggctcccaccgtggcgccgccgacgtgaagtcccacccgttcttctagaccctcaacctcgcgtccgcccgtcgtccctggcaccggcgccgtgccactgcaccggtcgcagtcgggcaaggcggcgccgatgacgactaagccggcctgcccagtccagagtacagacagaagagagagaaagagaggaggaaaggagaggctggtcttacgttgacatgtgggacccacgtaggtctcgcgctgactccgccgccacgttgaacaaaactaggttcaaaaccgctgagagatctagtttatactagttttataagttgggggatacgttgtatctggttttgcggttagaggacgattttatagctcgatgacaagttaagggaacttagatgtactttttccatttcgtttcttcccacattcagatgggcttggatggcccattggagctgcattgtcacctgctgcatggctgtatggcccatgatgctgcacgagcatgcaagcaagtaaccgcgtagagccatgtacgcgccgtggtgctcgctcgaagcttcgccttgaagttaaaagttttaaattttggtatgactttttttcagaaagttttaaattttatttaaaagtttaaattttacgtatagaattttcaaatttgtagtaataaaaaggaaacaatgttcatggaaaaagagaaaaagaatagtcaccgtaattcaaatcgtgattaatcaaaacctgattacgctaatctgatcttatctgctgcccatgtgaacgtgagtatgtccggatgtccccacctccctgcactgcgtagctgtgcaatcgcgtgatgggctgggacggaaccgcgcgcgactttcgctggcgcagacgcgcgctataggtaattcgcactgggggatgcgaatgcgatgcgatgcgatgcgatcgtgtgaggcgggggcaagtataaaggcgacacgtgtcaatcaattagagggaacaaatggaccaattagctggcaaaatttttactccatattcatattttaatgtatgacgccgttgactttttaacaaacgtttgatctttcgtcttactcaaaaaatttatgtaattataatttattttattgtgacttgatttatcatcaaatgttctttaagcatgacataagtatttttatatttgtatagaaattttaaataaaacgaatgatcaaacgttagttaaaaagtcaacggcgtcatacattaaaatacggagcgagtaccagcttgagatagatagatagaagcttgcgggatgacccgccagctttagtaaaattcgtacttctgtcgagcatctttatgatattttagttgttgtggcagtagtattggttttttatccattgttttcattcataataattattttagacctttgattttttttcataatacattgtcaacaactataaagttaaatcatagaaaaatatagttaaatataaatattccttttgggttggtaatatttatcgtcttagacaattacacggtctccaaaaaataactgtaactgctaatttttattacaatacaatatatatagaaatatcaataaatatatgattttattaaactacttttaagactaatccatacgtttgctctgttatttaaaaatttgaccatagctttatcgaaaacaacaagtattaccggcccgaaggaaaggaagtataatgatactacatccaactttaaattttagttcaattattagttagagtttttaaatttgaatttcctaaaaccaaaccttatattatcaatgaaggattaaactcctacagttccttttgaaagtgattgtttaccatattatcattgtggattgtttatttaattaacaggataaattaatatttaaaaaaactaattcacaaatagattacacatgtggtcaaacaaatgcattagaagaaagttgttttagaatgtatttttaaaagcatgtagcaaataacccgtttcaaaaatatggaaacaaatctgaaaagaaccggcctagctagtgccctactctctccataaaaaaaaaacaacttctcgagataaatttggacaagcatttgtccaggtttattcttataagttattgttttccgatgtggagggtgtgcatgcatactccgcaggcaaagagcagatgaatcaacaaacgacagtatacattgctcgtactggtaccaggcaagtatatgtagaagcacccctccctctgcgtgtagctgtggatcaacaagtgacttttgttttggaatttgcaacacacagacatgatcccgtagatttaaatgaagtggtggatgcatgcagattaacacacagcatgctgattttcgtagctggcatatgttctgaggaagaaattaagcttgtaattaagtatctgctaactgacaaactacaatagctcgatcacacatgatgatcagtaacaacttgatcaattgagtcaaatatggtgccgtctattaatttccaagctgttagcaaattaaatgaattggtggatgcatgtacataccagttcacttaattacattggagaactcatacaggcgtcctcgagtggagaagatgatcagtccgatctcagcatcgcagagtatggcgagctcgtaggccttattcagcagaccgttcctatgcttgccggatgtcacctgacggcttgtcttcctctcgattctccctatgtcgatcaatcgatctcccttcacaaacatatacacaaccacaccctcctagtcctctatttgcagttcattacagaagacattcagcaaaacagagagagctgcccgacgccgctgaagcttggaggagaatattcattagctcgcggcaacaggccgcctgacaacgacgctgtccgtcaccgcggcagctggttcaatcgccaagtagccgcaggcgccattatcgccacgcgcatggggggcgaaccgaggggattcgtgctcgcgtgtgctgatctcgtccgccgatatcaggcaagtgaagggacggctacggagatggcgtcacgcccgcgcgtgggaggagagggcctcgccatcgtcggaactcgtcatatatgttgggatatgcgtaggctacgataacaaaaattaaaattttctatcgcgtaaaccaggaaccatgtaagtattagatcatatatcattaccactcgacgcattgtgcagtggaagaaagcgctaagaagtcaaaggaattctcgcgaagtagcgcgcgtcgatgtagaggaagttgtcgatcgcaccagctcgaccttctcctcctcgtgcgttctcctcgttgtattcccactccaatcagcaccgcaaaccagcggcgcctctacggtatccacacgtacagggacggaacgccacgcgcagatgtgctagcacccgcgcgcggctaaggttttgctcggggaggggagtgacggctagggtttctcacgtaatgcaatac

SEQ ID NO: 20445 - DNA, 5788 bp, Oryza sativa
cacacccctcactgtgaaacagtctgttctattatcctgaacatgagatatacatgcatgctccagtacttgcgcatgttccagtacatgcgacaatagagatcactgggatatggttcattaggataaggagattatctccaaatttgtttcaccttcttatccattgtaactgaatactgtaagccatggtagaggctgtttctaccactatttaacagagatgcggcccgaggcaaagggttcaacgcttcacattttatcacatggtatcagatcctttttccacctcgatagatcgcatctttcatccacatggcgtcgtcgtcgtcttcctcaggcacggcagccgccaatctcctccaaggccactcggtttcagagaaactcgggaaagccaaccatgcattgtggaaagcgcaagttagcgctgcagtgcatggagcccgattgctgggctacctcaacggcgatatcaaagctccaaacgccgaaatctcggtcaccatagatgggaagaccacaacaaagccgaatccggcatttgaagattgggaggccaatgaccagcttgttcttggctatctcctgtcatctctttcaagggatgtgctgatccaagtcgccacatgcaagacggcggctgaggcatggcggaacattgaagcactctactccaccggcactcgagcaagggcggtgaacactagactcgccctcaccaacacgaagaaaggaacaatgaagatcgccgagtatgtcgccaagatgcgagcgctttgtgatgagatggctgccggcggtcgtccacttgatgaagaaggccttgtccaatacatcattgctgggctaaatgaagacttcagcccgatcgtctccaacctttgcaacaagtccgatcccatcacggttggggagctgtattcccagctcgtcaactttgaaaccctccttgatctctaccgcagcactggtcagggaggagctgcttttgtcgctaatcgcggcaggggcggcggtggcggcggtgggcgcggcaacaacaacaactccgacggcggcggcggcggcggcggcagaggcgcgccgcgtggacgcggtggcggcggccagggtcgcggtggccatgggcgcggcacaggaggccaagacaggcgccctacctgccaagtttgtttcaagcgtgggcatacagcagctgattgttggtatcgcttcgacgaggactacgttgcagatgagaagctcgttgctgctgctactaactcgtatggtatagatacaaattggtatattgatacaggtgctacagatcacattaccggtgagctagagaagcttaccaccaaggagaaatacaacggcggcgagcagattcacactgctagcggagcaggtatggatattagtcacattggtcatactattgtgcatacccctagccgtaatattcatctaaataatgtcctttatgttcctcaagccaagaaaaatcttatatctgctagtcaattagccgctgataattctgcttttcttgaacttcactcgaaatcttttctataaaggatcaagtaacgagggacgttctgcttgaagggaaatgtagacacggtctctacccgatccccaagtcctttggtcgctcaaccaacaacaagcccttggtgccgccaagttatccctgtctaggtggcatagccgtctaggacatccgtctcttcctattgttaagcaagtcattagcagaaataatctcccatgttcagttgagtcagtcaatcagtctgtgtgtaatgcttgccaagaagcaaagagtcatcagttaccttatattagatctactagtgtgtctcaatttcctcttgaacttgttttttctgatgtttggggccctgctccagagtctgttgggagaaataaatattatgtgagtttcattgatgattttagtaagtttacttggatatacttgctgaaatacaagtctgaggtttttgagaaatttaaagaatttcaggctttagttgaacgaatgtttgatagaaagattattgccatgcagactgattgggggggagaatatcagaaacttaattccttttttgctcaaataggaattgatcatcatgtgtcatgtcctcacactcatcagcagaatgggtcagctgagagaaaacacaagcatataattgaagtaggcctttctcttttatcttatgcatcaatgcctcttaagttttgggatgaagcctttgttgcagccacttatctcatcaatcgtatacctagtaaaaccatccaaaattctacacccctagagaaactgtttaaccaaaaacctgactactcatccttgagagtgtttagttgtacatgttggcctcatcttcacccttacaatacacacaaactccagtttcgctccaaacagtgcgtgtttttgggttttagtactcaccacaaaggatttaagtttcttgatgtgtcatcaggccgtgtctacatctcaagagatgttgtctttgatgaaaatgtttttcccttctctacactccactcaaatgcaggagccagactcaggtctgaaattcttttgttgccgtcccccttgacaaactataatacggttagtgcagggggaacacatatagttgcaccagtggctaatactccattacctagtgataatttaatttctaatgctgctgatgtgacttctggagaaaatagtgcagcacatgaacaggaaatggagaatgagcaggaaatagagaatgtcatgcatgggaacgacgtgcatggggacgcggcatcgggacctgtgctggatcagccaactgctgacagcagcactgcgccggaccagggagctaacaccagtgacgcggtctctggcgcagcttctgacgcgggtggagacactgccaccctgggagctggagcagcaaatggcgcagcagcaggtggcgaagaatcccagccggtgccgcctgatgtgacgggtacagtagcggctacagtagcccctgcatcgagaccacacactcgtctgcggagtggtattcgaaaagagaaggtatacactaatggcactgttaaatatggttgtttttcttctactggtgaaccacaaaatgataaagaggctttaggagataaaaactggagagatgcaatggaaactgagtataatgctttgataaaaaatgacacatggcacctagttccatatgagaaaggacaaaatatcattgggtgtaaatgggtatataaggttaaaaggaaggcagatgggacacttgacagatataaaactagacttatagcaaaggggtttaaacaaagatatggtatcgattatgaagatacttttagtcctgttgttaaagctgctactattagaattattctgtccattgctgtctctagaggttggagtcttagacagttagatgttcagaatgacttccttcatggattcttagaagaagaagtatacatgcaacaacctcctgggtttgagtcatcctctaaacctgattatgtatgtaaattgaataaggcattatatgggctgaaacaagcaccaagggcgtggtattccaggctgagtaagaaacttactgaacttggttttgaagcttcaaaggctgacacctcattattctttcttaacaaaggagggataattatgtttgtcttggtatatgttgatgatataattgtagctagctctacagagaaggcaactacagcacttctgaaggatctaaacaaggagttcacacttaaggatttgggagacctgcactacttccttggaattgaggtaactaaagtttccaatggcgttatcttgactcaagagaagtatgcaaatgatatgctaaagagagttaatatgtcaaattgcaagccagttagtactcctctttctgttagtgaaaaattaactctatatgagggatcacccttgggtcctaatgatgcaacacaatatagaagtatagttggtgctttacaatacttgaccttgacaagacctgacatagcttattcagtaaacaaagtttgtcagtttcttcatgctcctactaccagtcattggatagcagtaaaaagaatcctaagatacttgaaccagtgcacaagtctaggacttcatgtacacaagagtgcttctactcttgttcatgggtattctgatgcagacggggcaggtagtatagatgacagaaaatcaacaggaggatttgcagtatttttgggttctaatcttgtgtcctggagtgctaggaaacagcctactgtgtcaaggtcaagcacagaggcagaatataaggctgtggcaaatactacagccgaactgatatgggtacaaaccgtgttaaaagaattgggaattgagtctcctaaagctgccaagatttggtgtgataacttaggagccaaatatttatcagctaatcctgtgtttcatgcaaagacaaagcatatacatgttgattatcattttgtaagagaacgagtgtcacagaagctgttagagattgattttgttccatcaggagaccaagttgctgacgggtttacaaaggcactgtcagctcgacttcttgaaaattttaaacacaatcttaacctaactaggttataattgagaggggctgtgaaacagtctgttctattattctgaacatgagatatacatgcatactccagtacttgcgcatgttccagtacatgcgacaatagagatcactgggatatggttcattaggataaggagattatctccaaatttgtttcaccttcttatccattgtaactgaatactgtaagccatgatagaggctgtttctaccactatttaacagagatgcggcccgaggcaaagggttcaacgcttcacattttatcacactcacgaatatataggatctatcactcgggcctccaaggcccgtaggactcttattcggatccctatccgaattaagctcatattagatctccatccaatccctttattccggcccattaaacatgcgaccctgtaggttcatgtacactcggctataacccgaaaacttcttttcggtccacgcgtcaacagcggcccctagcagaacgtattgacccaccgggcatacataaatatcatattggctgaacctctagtgtattcttatatgaaccttcacgatatcgattaagctcaaggctagatatgtgtcatcctctaatagctcaatcattcactcgaacctattgatagattatataacttgtgattgactcctcaatcacctttggtatgaccatacacttccataatctacaacatcgagggcccagagatatctctccataggaggggcaaatcccatcttgattattcatatcccactatatgtttcatagcatacccgaaaactacttttataactacccaattatagagtagcgtttagtagtccctaagtaagctactatacatgttgagaactatgataatttcagatctaaggattcaacaccaacactaaatgagatcactgatgacacaacacatatggctcttgcagtgtctcatgttgggtctatccaacaacatattccccaacatgtgtccacattattaatttggtatctctataccatgatccatgagacatgatcatcaattaatacatgtgttgatcatctaaacatatttgctccacatatgatatttgatcagggatcctttagaaataggaacaaacaacataaaaagtctcat

SEQ ID NO: 20446 - DNA, 8381 bp, Oryza sativa
tcgtcgcagccggtgagtcggtgacaataaatgttgtggaagcactgatggtctgagagcaggtacaatagcaggctataagccagctccaaatatattttaaggagataaacaaggagagagaagagcagcaggctacagatttgtagccagctgtagcgcgaagaactccaagacacagtgtctgtatgacaggtgggacaagatattaatagtgtagtatgtaactattgtatgaacgagctattaaattggctataaataaattggagctagtaaacttgctctaatgcatactcatccgggaagcactgccagcaacctgggcttcagatggaaggagctagatagacacgtggcagaattttggaggtgtctaacttaaatttttatggcgccacatggcccaatcggaggcttgattcttgaccctcaaatcgtatatagagatatgcagatactgtcgaatccctcacgctgatggccggtgcaaggtgcaaactggaggtaattaaattgatgactacttgattcagccctgccctgtgcaccaagtcattgtgattctataatccacctcctgttttaattaataactctgatggttgatcaagtttgctgctcgatcttcatcagcttaacgccatctgctttgtaggtttctttctagccaaagcaaaaacaggagaaaactcccctcgctctggaacacctccgtgcagcaaacgccatccctcgtctgttttgtactcctaaaacggaacgactcattagctatcttttttaaaaaatcagattaatatatttttaaagcaacttgcataacactctgtttaataatttgaaaagtgtgcgtgcgaaaaataagaaatactatgtgttgagaaactgaaccaacaactcagcgggtttacatcgtctaccgttgaggctgacggcaaacattgcaattgcattcatccgtgcgaccgtgccacacatcctcctatcaacagctgcgtgcagtgatcccaccattatgattaattagggcctactaatcagcagaattacttatttttcctccaaaaaatcagaaaatagaatatgcaccggtggcaaaacacgcaagaacaaaagcagagtagattgttttttaagatttgatgcattccatttttctaacttatatcagtttatatatgtgacatcccagcctagggcttaatagaattaatagaatactcataagttacaacttcttttctggaagccaatcttcatataactctgaggttaaacgtgcttggcctggagcaatttgggatgggtgaccgatcgggaaattctaacctcgtgcttggcctggagcaatttgggatgggtgaccgatcgggaaattctttccgggtgcatatgactctgaggttaagcgtgcttatcgggaaattcttcccgggtgcatacgagtgaagacaacatatgcagaatacgagtgaagacaaaatatgcagaaaagacttgtgttaatctgtgaggatagtcaaataaatggctgtgagttgtattctcaaggattttgtcagtaccttcatttcgctactagtttttggatgaaaaatactatatctaagacatagtaatagtgcaacaatgctgtttttgtcaaatgaatacttcaatattttataagatactcccccgtcccaaaatataagcatttttggaacgtgacacagtcttcgagatactacttttaccaacaatatatatatataagtaagatgttttaaataaaagagttacatattatgatattttgtttaataataaatctaggaacatcaattttatatgattgatattttttaatttttttttctattaatagttaaagttgaaaatgtttgacttgtcattatgctaaaaatgtttatattttgggacagatgaagtatgtacaattattcgagtatttggatagctcttagtataaaagaagcttgctttgctgtagtattatgctctgctttacttctgtgctcgcgcgctttgctgccgagtgcgtattctatttgctgattttttttaaagagaaataattaattctactgattagtagtccctaattaatcataatggtgagatcacttcatgtagctgttgataggaagatgtgtggcacgaataaatgtaaatgcatcggcaatgtttgtcgtcaacctcaacggcagacgatgcgaacccctgctcagcctaataattgacactggatgagtgaaaattattctaccatattgtgccaatttttaatctaattttctcgcccacgtgtaaactctgaatgctcactgtcaaacaggtgattgttgagctcgctctgttgtacttacaaagttaaaaacatcatagtaaaccaaataaaagaactccgtatcttatatttataaggtgttttacttattttctaaatcaaaccatctaagaaaccaacaatataaaaagaattcaaaggtcggttttttagcgtatttttataatataatattataagttgttttgactttagtcaaaattaaattgctttaagtttaaccaagtttgtaaaaaaatagtagtaatatttaagttaatacaaatatattacgaaaatatattcaagaaaactaatataatattataaatattactatatttgtctataaacttagctaaacttgagttagtttaactttgatcaaagttaaaacgatatataaactaaaacggaggaaatatttgtttggacttgattaaacttatgaaaaaaatccattttgttttactacgacgtggacaacgcggggtctggaggcaacgaggtacagctcgtccaaagtctccaatgccaccggctaggatggagatggacaacttcggctcgccgtatcagcaggcgtggccaccagcgcaggccaccgtcgacgtcgcgggtcggtggagacgtacgtcgcgcgttaggaagaagaggttctagccttctaggatgttcttgtcagctgcaagcagaaggttgaggccttggaggctatagagacaccggcgaggcggcgacagcgccgcttcgggaaggtgagggtcagggggttggtggtgacggtggcggaggaggggaggagctgacgggatgcagcccgcgcagcttctggtcgcctgcgctgaggcggtggtgtgtgctgcgaccgcgcgcaggcggcaacgctgtaggccggcgcgcccgtgcacggcacggcgttccagcgcgtcgcatacttcttcgtgcaggagctcctggaccggcgagcatccgccggcgttgggccctgcgagcatggcgttctgcatcctgtagtcgtcgtgcgcgcgggaggcgcgacggcttgcgcggcgaggcgttccgtacctgtggttcgcgcacttcgtggcgaacgcgtgcacgctgcaagccttctagggagagagcaacgaccacgtggtggacctgggcatgacactgggcctcgacggcggaaaccagtggcgcggcctcctcgacggcctagccgcccgagctagcgggcgagagcgaagatggattctattaactcagagtggacgttcacccgtttattgtatgtttactagatggttacgaaaattttttaaaaaaattgacaaaatagatcaatatctaatatatcaatccacaaacatgcaagttcaaattcaacttctacaagttgtaacaaaaataacaaatttaattgtaaatatgcatatgtaatttgagttttgtttgttatttttgttataatttttagaagttgaattttaacatgcatgtttgtggattgatatattatatattgatatatcttgttcattttttttcattttttttctcataaccatttagatgagatacaataaacgggtggacgtttactcgagctgttaaaatagtttcccaacatgaatgatgaatattactacgtgtcaagattatgaataccacgtacctaatagtagttgactaaatctcggcaggacccaccacatactatgtcttatacgaaaactaacctcggatatggagggagttccggataaagaaagacaactagagttctacatgaaaacgaaaggactactcaaattgtatccatattagtttccctagttctacttggacaaggggacacctataggtataaatacaaggccccctaggaggacaagagacacggaacaatagatcaaacacaaaatcaacatacaagccaacatacgtcaagacaagacgccggatatcgacttcagagataagcatagctagtcccctacggtgtctatggatactgtcagaagagacatagcgttgtctttgatctcgccggatgcggattcgaggaggaaggctatcctgttgtcgactacgagtcaacacttcagaccgccaagtcgacaacagttagataggctaccccaaatattgtattggtgtgattatggtgaataagagtaacgaccggcttcggccaacaggatgtagggctattacatgtaagataaggggcccgaacatgtataaaaatccctgtctccatctcttttgcctcaatctcgcatataccatggtaccaacgatccccataccatccagataccatagtcgcgatatcaaacatcgacactacgaatgtggattttcatccctcgagggaacatccctccgttgtttgcatgtcatctaaatagttataaaaaaatttgaaaacaattgacaacatagattaatatgaaatatatcactctacaaatatgtaagtccaaattcaacttctacaagttgcaacaaaaataacaaattaaagtaaaaatagttattgcacattcacaactatatttgttatttttgttacaatttgtagaagttgaatttaaacttgcatgtttgtggagtgatatatttcatattaatctatgttgccaatttttttatatttttgatgactatttaggtggcatgcacgaaacgaggatatatcccctcgagggatgaaatgactttccctattactactccctctgttttagacagagcaagtttaatagtatagcccactactagctccaaatcatttatagccaattcatataataatagttacttactatactatcatacctggtcccacctgtcatacacacatcacgtcttggagtccgtgctgcagctgactatagatctgtagcccgttgcttttctctctcttcctttatctctttaaaatatgtttatatatagctggcttatagactactattgtacctgctctgagacgttttgatgatgctgttcagagcaagtttaatagtatagtccactactagttccaaatcatctatatctaatgtaatagccaattcatataatagtcgcttactgtacaattaatacatggtctcacctgtcatacagtgctgcatgtagcccgctgcttttcttttttttatctctttaaaaatatatttatagctagtttatagcctgctattgtatctgctctctaagccggtccacaacggtactgttcatgcgacgaccgcgtcggcgtcgatatcgagggttcagtattccgtacatccccacagtcccttgacctctggatcaatcgatcgatccacgccacgcatgcggagatccgcgcgaatctcggagcctccggatcgattccgttgcagctgattagttataaacccgtatctcaactgaaaaaaaaggatggatgtatacgggactgctcgcttatatgtagaccttcctctactcgttggtaaacaatttggttatacgtctccgcgttcttctctcatggcggcggatccatccccacagatgcataagacgaagaaactagtcagggtgaggaagcaagtagaggtggtgctgccagtagaggtgctgccgccgctgccgccgttggccgtcatctgcaagcacaaggaacacgtatggatcacgcaggacgattacacattcaggttgttcgatatcaacctggtgctcaccttggctgccgtcgggtgcgccgggctaggcttcttcctcttcccgaggaaccgggccctcgggatggctctcgccgccgctttcttcgtgggcttcttcgcgcacgccaaggcatcgatgctgctccactgggacgtcttcccgcggttcgtcctcgccatcctcgaccggggccgccggcttatggcggtggcgtgcgttgccatcgtcgtggtttgcgttctccgcttcggtacccaggacggcgtccgccgtgccaccttgttcatttggaccgtcgccatggcgctggccgcgctgaccggctgggtcctccgcgtcgagaggcgcgtctccgccgctgcggaattcgttgaattggacggcgacacgagcctttggaacatccgcaaggatgggcgtctcgccgccgttgcagatatcgaaggagacaccacgttttatttgctgacatctcgtggaattattccaactggctacgatgtagtagtacatactgccaagccatgtgttacatgtgtatgatcgatcaggtgatcgaatgattgattattagcgccgttaatcaaataagttacgcctctctgtttccggtctactggcctgtacgtggatgtctgggtataaatgtttggctagaattcttatgtgtgaaaagaaacttcagatttgctataccacattcgcatgaaaattagcgcaaaaatttacatttgtttttttgtttgtatgatttgtgctgcgatcgtgtgctttggtgtgcttctccttttcatccagcgaccagttaagattcggtgtagagggaggctgaggcggcggcgacaggagaggcgacagtggtggcaacttaatgggaagcaacggtggtgtgtgaaaaaacggttagggtggaagatgggcaatggtggagccacctcctagatctggctgcatcgttgcagtttggctaattcttaatagccgctcgggctcaacaatgttgctggcactattaccgaagatgagggaatagatggtttgttgacgtataggaaaaatggttggccaatgagaaacgccattagtagttgaggatgaaggaagggatggttgtcattgacgtgtggaaaaaaaattactacctccattttaggttgtaagacatgtttaactttagttaaagtcaaactactctaactttgactaactctatagaaaaaatagtaatatttacaacactagcataatttcattaaatctataattgaatatattttcataatatattagtcttggattaaaaatattacttcctccgttccagaatataagaagctttagagttggacacggctattaagaaagtgtaatgccgcgcttcgagcaagacattaaagattaatttaataaaaacctatccgcgaaaagtttcgttctttgtgtgcgagtctaagtcgtgccatggaatctcaaattttaatctccttgatccctctcatcgacatccaaaatccacctcatcgaaatttctcttccaattcaagtctccgaaatcaaattccaaatgtcaatcgcttcctttgaatcctcgtcaaatacttgtccccgttaccaaaaatatcaattcccattttgatttccccctctttgactccaccttatgttcctaagaccaagtatcaaagttagatccaaatccttctcaaattctctccaaatcaaaagtttctgacgaaagtctaattagggtccctcttgctctgtgggccgattttctcttcccggcccatctctccctctcggtccgtctctctctcgcacgtgtgtcgctcgtgtccaggagcaagagagagcgccgccgtctccttcctctctcactcgattttgggcctgttcactttgatgccatttcaaccttaccaaattttggtaaagttaccaaaaaagtggctacatttagtttgctgctaaattttggtaactatataagaaatcctgccaaaattttaaaaattttggcaagttgccaaagttttggtaactatgccaaaattttggcataatgttttttttggcaacaaagtgaacaggccctttctctcccggcgccgacttcccgccaccgccatctaaatccccaccaccttcgctggctcccgccgtgtcaagccctggcaccgcccgtgcccacgcccggccccgctgcctctgcgcgcatccatccaaggatgggaggcagaactccctgcctcgcctcctcctccttcgcctttttcccaaatcggcaagagcaaagctccccttttctccctactttttcatttttcctctcccggaccgatgccctgcc

SEQ ID NO: 20447 - DNA, 18945 bp, Oryza sativa
  unsure (1)..(18945): unsure at all n locations
ggcgccgtgctaagaccgcgtgcaggcggcaacgctgcaggccggcgcgccgggcgttccagcgcgtcgcgtcgttcttcgtgcaggagctcctggaccggcgagcatccgccggcgctgggccctgcgagcacggcgttctgcatcccgcagtcgtcgtgcgcgaggcgtacgcggaggggttagggatgtacctcgagttcagaggaatcaaccgtggcctcgagagcctccacatcgacgacctcggcgtcgacgccgacgaggccgtcgccatcaacagtgtcctggagctccactccgtggtgaaggagagccgcggggcgctcaactcggtgctccagaccatccgcaagctgtcgcccagggcgttcgtgctcgtcgagcaggacgccggccacaacgcgccattcttcctcggccggttcatggaggcgctgcactactacgccgggctgttcgacgcgctcgacgcggcgcttccgcgctacaacgcgcggngggcgcgcgtcgagcagttccacttcggcgcggagatctgcaacgtggtcgggtgcgagggcccggcgcgcgtggagcggcacaagcgcgcggaccagtggcgccacagcatgagccgcgcggggttccagtcggtgccgatcaaaatggcggccaaggcgcgggagtggctggacgagaacgccggtggcgacgggtacacggtggcggacgagaaggtctgcctggttcttggctggaaggggaagccggtcatcgccgcctcgtgctggaaatgctagaccgccggcatccggtggccggccgccggagagaggtagacaccgatgctggacgtaaataaagagctcgatcgagcaccattgtccgaccatggatgatgggcaaacacgatgctgttcaagccattatatgagcatgaacacttgtataaataaggccactggttagaggcttgttgttttacaattttgtgtaggttcttattgtttaattagctcatctaacaacatacacttatattgtccttttattttctgtcaaagtgcaacatgacacatcaggtttgtggtgggctgccctgaactttgactgaagacgttttgtacactttgagggagatggttggattttatgatggatgattagaagatgttcggggggatacaaattgggtttcttttgtgtgtttggtaaaaatttggctatcttaaccaaacccttcgtatggattcgtttgtgggcgagccaaaccctatatcctactccctccgtcccaaaatataacaattttagcactcaggatttgtcccaaaatataataacttatccatcaacattctcttcacaaccaatcacaatcctccaccatttacttttctcacctatctccactactcatccaatcataaccttctgccactcacttttctcacctacctccactactcattcaatcataatcttctatcactcatttctactctcttaataaccgtgtacaactttaaaacttcttatattcttgaacggagggagtaattggttagagccacctttgctgtcactagagttcatagaggttgatggttgcaaaggataagcatatcggagcatagatcgcaacacatatcatatgaaaagaaatatgtaagattttgctcaccgccatcccttccctcattcttggtggcggagctagtcgacattgtcaagccaaagcgaataatagcgtttctaattggctggcctgtcttttccataagtcaacaaacaaccaacccttctctcatctctctggtggagccaatggcgtcgtctgtcttgagcaactaatggcgtttctaattgtctgatatttcttccacatgtcaataacaaccatcccttccttcatcctcaacgactaatggtgtttctcattggccaaccatttttcctacacgtcaaaaccatctattccctcatcctcagtaatagtgccaccatttttcctacacgtcaaaaaatcatctattccctcatcctacacgtcaacaaaccatctatagtctattccctcatcctcagtagtagtgtcaccatttttcctacacgtcaacaaaccatctattccttcatttttcatacacgtcaacaaaccatctattccctcatcctcattagtagtgccagcgacatcgttgagccccagcgactaagagttagccaaccatgcagcctgatctaggaggtggctccaccattgcccatcttcctccttatccgtttttttcacacaccaccattgctgggttgtggccaatgggcgatcgacgatcgatccccatcccccctatacgctctctctccccccttcctcctcccattcttctcttcctactacaccataaattttaaaaaataaaaaataacaaagttggaaaaaatatgtatagaaatactatatataaaaaatatttgaatttaaattcaaatttgaaacggatatgtaaacttttgacttataaactttagatctataaactaatatttgaattcaaattcaaatttgaatcaggtatgtaaacttttgatttataaactttgggtttataaactttaggtgtataaactttagatgcatagaaatactatatataaaaaatatttgaattcaaattcaaatttgaatcggaatataaacttttgatttataaattttgggtctctaaactttagatgtgtaaacttgaggtgtacaactatagatgcatagtaaagtaatgcggtgaaaaaaaaaagagaaaccgtgcggaggagaggagagggggccaatggccccttagcaatctcgaccattgcttcccattacgttgccaccattgtcgccgccgcctcagcctccctctacgccgaatcttaactggtcgctggataaaaagaagcacaccaaagcacaagatcgcagcacaaatcatacaaacaaaaaaaaagtaaatttttgcgctaattttcatgcgaatgtggtatagcaaatctgaagtttcttttcacacataagaattctagccaaacatttatacgcagacatccacaggccagtagaccggaaacagagaggcgtaacttatttgattaacggcgctaataataatcaatcattcgatcacctgatcgatcatacacatgtaacacatggcttggcagtatgcactactacatcgtagccagttggaataattcggcgcacccgacggcagccaaggtgagcaccaggttgagatctaacaacctgaatgtgtaatcctccggcgtgatccattcgtgtaccttgtgcttgcagatgatggccaacgacggcggcagcggcggcagcacctctactggcagcacgacctctactttcttcctcaccctgactagtttcttcgtcttctgcatctgtggggatggatccgccgccatgagagaagaacgcggagacgtataaccaaattgtctaccaacgagtataggaaccggatggtctacatataagcgatgtatatatccatcctttttttcagttgagatacgggtgtataactaatcagctgcaacgaaatcgatccggaggctccgaggttcgcgcggatctccgcatgcgtggcgtggatcgatcgatcgatccagaggtcaagggactctagggatgtacggaatactgaaccctcgatatcgacgccgatcgacgcggtcttcgcatgaacagtactgtcctggacgatgggctggccgtcttgaacagcattgtcaaaacgtcttataacttaaaatgggagtagtaatattcatcattcattgttctctgtgtacgccatttaggtttgtgtaatatgttctctgtcatgttgcactttggcagaaaaggagcacgatacaagtgtatgctgttagatgagctaattaaacaataagaacctacacaaaattgtaaaacaacaagcctctaatcagtgggcttatttatacaagtgttcatgctcacacaacggcttgaacagcatcgtgtttgcccatcatccatgaacggacaatggtgctcgatcgagagctctttatttacgtccagcatcggtgtctacctctctccggcggccggccggccaccggccaccggatgccggcgttctagcatttccagcacgaggcggcgatgaccggcttccccttccagccgagcacgaggcagcctttctcctccgccaccgtgtacccgccgccgccggcgttctcgtccagccactcccgcgccttggccgccatcttgatcggcaccgactggaaccccgcgcggctcatgcggcggcgccactggtcggcgcgctcgtgccgctccacgcgcgccgcgccctcgcacccgaccacgttgcggatctccgcgccgaagtggaactgctcgacgcgcgcccgccgcgcgtcgtagcgcgggagcgccgcgtcgagcgcgtcgaacagcgcggcgtagtagtgcagcgcctccatgaaccggccgaggaagaatggcccgttgtggccggcgtcctgctcgacgagcacgaacgccctgggcgacagcttgcggatggtctggagcaccgagttgagcgccccgcggctctccttcaccacggagtggagctccaggacactgttgatggcgacggcctcgtcggcgtcgacgccgaggtcgtcgatgtggaggctctcgaggccacggttgatgcctctgaactcgaggtacatccctaacccctccgcgtacgcctcgagctcccgcccgatcgctctcatggtgtccatgcgcgcgccgacgccggtgacccgcacgcgcgccggcttgccgctggcgcgggcggcgaggccgtcgaggaggccgcgccactggtggccacggtcgaggcccagcgtcatgccgagatcgaccacgtggacgttgctctctccctcgaaggcttccagcatgcacgcgttcgccacgaagtgcgcgaaccgcaggtacgggcacagctcgtaggccagcgcgagcgcctcgccgcgcgcgccgtcgcgccccgcgcacgacgacggcgggatgcagaacgccatgctcgctggccccagcgccggcgggtgcgccagcggcagccggtccgcgagcccctgcacgaagcacgacgcgacgcgctggaacgccgtgccgtgcacgggcgcgccggcctgcagctcgcgcagcagcgccgccgcctgcgcgcggtcgcggcacgccaccgcctcggcgcaggcgaccagcagctgcacgagacgcatcccgtcagctcctcctcctcctcctcctgcgccacccccgccgccgccgccgccatcaccggcaccgacccggaacgtcgccgtcgccggtgtgtccatagcctccatggcctcgaccttctgcttgcaactctcaagaacgtcccagaacctcttcttcctgacgcgcgacgtctccgacgacccgacgacgtcgacggcggcctgtgccggcgaccacgtcggctgatacggcgagctgatcatgtggtccatcctggtgaccttggagaacctggagacgagctctacctcgttgccatcaaacgccgcttcgtccacgtcgtagaatcggtagtaataatcaagttcttgattagtacaaataatcgttgaatcttgttgctgtgtcagagtcagatgatggctctgctgctgggaacagtctgagatggagttgcatggctcaggggacatgcccatgttcatgtgaggtttgcaagggcaaatgacctaacaaaatttgttacaaggttaatacatacccggtatatatagacttgtagagttcattagtatagtgtttcattagcttaaaaacattagcattgtgtttaagctgtctgacatctcaggctagccgtttgcctgtctctcttttcgataagtagtagtgctactagaaccctagctaatactagtgttttttatttggttaattacgatgctgtttaacttgttaagtaagtacaatgcagataaaactcacaatcagtctgtctgacagtgaacattgagagattacacgtgggcgagaagattagattaaaaattggcacaacatggtagaataaatttcactcatccagtgtcaaaaaaaaatcagaaacatgcacagttcagaaatgcatctctatcgtctgtgctattcaattagtagatgagtacaagacagatgagggatcgcgtttgttgcacggaggtgttccagggcgaggggaattttcgcctgtttttgctttggccggagagaaagctgcaagcagatggcgttaagctgatgaagatccagcagcaaacttgatcagccatcagagataattattaattaaaacaggaggttgattgtagaatctcaatgacttggtgcacagggcagggctgaattagtctcttcgttaatcgttaggagcaaagtggttatcaatttaattacctcctgtttgcaccttgcaccggccatcagcgtgtgggattcggcagtatttccatatttgaatgtatttttatatttagactgctaatcttcgccacttcaaattcatagtgtcaattagataataacaacataaatttcagaaaaatctcatggagtgaagttcggtacgctgttgtgcaataagggacacagtacaaaaggcaaatgctcgccggcaatagccagcaaagaaagaatacagcagttgattacagctacacgcagagtgtctgaattctgcagtctgaacgcatgcatgcaagattgattccactaatcaaacagctaatctcgatcaattaagtaaatgcttttgctcatctctatgctcatggagaattaaaatagctggagaaattggagcactttcacccaaaacgtcactgtggacgccactctctttcgtctgaaccgcagtagcacgatcaggctcagctccgatcgagggccaggtatacattcttcctagttcgagcgttaaaattttagttgccgtatgattagtttgtgcgttaatactccttcatcgacaatgcgtgtgagatctagatgattgacaagtgcatgccattatgtcatcatgccaaccataaacaaattaattatggtgttactgatccaattaatatcttgctaagtcatgagtgtaacgcgaaaaaatgccgtaatgatatagttcttaaccataaaaaaatgtctaacatcatgcagattatcttcgtgtgttctaattggctttactcttattgtatgatgctttcacagaaacaacaggatactatacgcaatggtgctacacgcttgaaattggtaaccaagtaacttttatttcagtttggatagcgtagtacctacagaatctcatggtagaatctacgtgattttaaaaacattattttagtagatcatattatcggtagaagttgggggtttgtcccatctcgtcttttttaagctcttttctattcacttctaaactttttggctgtgtgtctacgagcagaggccggagatgtaacccatttctattatcttaaaaaaaattgagtgtaacgtgaatgaaatatctctagcagcttaatgcgaaatatgaaaattaactagctgtagtgaatctatggtttgtaaatagttcggtactactgaacatgacgtacgcatcagaaaattcagtactatttttaaaatataaattggttcaaaatatatatcgagcttgaagtggttctgaaactgaaacaagtggccttgcattgttcgttccgcttaatggtattctaagatacgtggattgatgattgatcaaggcaagaagactgttgtgcttcctttcgctttcaaatgaaatttgaaattatatagcatttcgctaatcgctagtcatgcctatgtacatcatacatgagccctctctacagtagtcagtttgtatctgaattggttttcaacttggtcggcgcagctaatcatggacatttggaacaccagtgtgctagtgcccatttgtttaattttggcggttcagattatacagagtggtttttcttgagatttctcccggtcccaatccattcaggagaagacaggctatatagtgacatttttgaaagggacaccaaagccagataatttccatgttatgtttggtccaaaactggcagcagcggtaactaattactagctaggttaccccgatgcacgatgcatcttacttaggtaattttttacattttcgccgaacatagtggagatgaggctcaactttctccaacttgtgtagctctgagaggaagcaggcgtacgtacgcatgttttgcagttgctttcgtgatatacacgcactcgaaaggttaaaaaaagtaaaaaaaaataaattggtcgatttaattgaagtactttttctgaacagatgtatgtccagattagtaataataagatatgtcacttttaaaactgttttttccgtcttataaaaaacgaatttagaatccgatatgacacatccgatattatattgattttttatagtatggaggtataggtaatgcgtattccttgtacgaggagggtgaaaccatcgtacgattagtgcgagattcgtcactactgacgatcgcaaagcaggaaccatgcggcgaagtggtccaattctcggttaattaattgcaaatggtagttaagaccgatgttgcatcgatgagatgggagcgccaacgggctaatatttatgcctactttgaacccatgggtttcagaacgaatttggatgatgaattatcgccgaatcagttcgattttgctggaatttgaaatttgggagtgcctagcaatcattcgaatgatttttttcattcatctcactcggatttttcaacatatggatgtgcgccacgttgcagagggaaacggtctagcttaatcgtaagttctaacaacggacccaatctaatagttataagtccaaagaggtttaataaaaaaaatgtcatcaacatatgcattaaaaagttacactgtaattttagtataattacactgtaattaatttgtaagtagtatgtaagtttgttctttggacacaaaacaatattggttccttgctcagttggtaaaaggcctttgttcggcaacaagagatcgtgcggtcgactcctcgcttacacgtgaacacacacattttattttcccacccggtccaaaaatcgaatgatatgtaacaaaaaatctgtcgcaagatttatagcaaaaccgttgaaatttttcgaaacgacgccttacatgcaaagccgaactgctggggttttggtaattctccatgggctaacagctgacatgaagcttaacttttattgggccaagcccatttgtgtcataaatgggctagcgagtaaaagttgccaagtcaacccggcccatgtgcactagtctacggtcttcttatacgtgtaccagcgtgcgatgaggaggtaggcggcgaagttggcgacgcagagcgcggtgagcagccagaagaagtagtcgaggtggccgcggttgatgtcgtcggggatccacccgggcgcgccgcccctgcgcgccgccacgacgacgagcgccgagctggcgtagtcgccgagcgcgaacgacgtgctggagagcgccgagcagaggctgcgcatggcgtcgggggcctggtcgtagaagaactccatctgcccgatcagcgtgaacacctccgacgcgcccaccaccgcgtactgcggcacctgccagaacaccgacggccgcgcgatcagccggcggcgcgccgcctcgagcgcgccggcggcggccatggcgacggtgaggatgacgaggccgacgcccatccgcgccagctgcgtgaacccgccgtcgtggcgcgtcacgcggcgcgccagcggcacgatggcgcggtcgtagagcgccacccagagaatgacgctgagggtgtggaagatggagagcgcggcggcgggtaccttgaagcggccgaggctgcggtccagcgtgtcgccctggaggatgaaggtggtggtcacctgggtgtacgccgccgcgtagatgatgccggtcgcccacaccggcagcagccggagcacgcacttgagctcttccacctgtgtcaccgtgcacagtcgccacgggctctgcgccgccttctcgccggcagtcttcaccgtagctctgtccaagaacctagatcaacaagcagccgagttcatgaggcaaacgatttgaataggtgatttagggcctgattagtgagcttaaaattctaaaaaatagttagtcggtaaccagtttctaagaatttagaaaagctcggttttccagcttttgacttctagtttattttctagattttacaactacaacttttcaaaattatgaccaacgctaaactttttaagggagtttttaattctagaaaaagctgcagcagttagaagctctccaaacagagccttagttgcgccatgacaatatgacatgtcatctcaaagaaagggtcggcaattaaaagttgatatatattattctaaactagctgaatttttatgtgcagtgcatagagctaatatatgttccactaaagtaaacttttttgtttacctccctttgataataaatatttgacgtttacttgcaaatgttccactaaaagaatatttattagtaacatctcaaactttgaactttctttgtttatttttgtggcaatcatggtttttatatctcttagtattaatgcgatggcttgtacataaagaaagacttttaaaaaacttgcatttattatacttttgtcgaagttgaattaccttgagttacaaataaatttgatgcggagtgagtgtaacttaacttgttggtttctttgtggtgcaatccgatcatccagattcaagtttagacttggcgtgagtgctcgcatttgcggctaattatttttttcagtggtacatgacgtaccccttgataccaagacattcgcagtgaattcgttagtatcaaaatatgttgactcagtcttttaaagatgctcatagctagaaataggatgtgcatgtatgcatttataggggtgagtatgcgcgcgttgtgagcgcatacgtttgtactatgtttctaaaaagaaaaagaaatatggcatattatgtgtttatggagtgatatttcacatattaatttatattatcatattcattttaaagaaacatttgagtgacatacgagaaaggagaggatgcccgcttgagaccttgttcgttcgatccctacaagaataagattgagaggaattaattccacatctcataataggtatgaaattattcttcttcaaattctcttgtgggtgggattaaaaggaaaaggcctgaggcggaaaatccatctccttatagactagactggacgattagtactattaacacaagaatttgatggtactaatatttggggttaatcaatccacatgatttttagcaatctcaaatcattttttcctccaattcaaagagaaacgacaaaggcaattgcactaactggaaatgcatacgcttgctcacctaaactgaccggtgtggaggagtcggcggcggccatgtatcgccggcatgccatcgacggcgtcgctctcgtacagcatggacgagtccgacggtatctccacgtcgaacttcctgaccgcggcgaccaccacctgcgcgatcctcgtcagcgggctgccccccggcggctggtcccgccggtacgtggcggtgccggcgaggaacacggcgacggacagcgcgctgaagatcgccgggacgccgtacccgaccccccacccgacgctggtctgcacccacaccagcacggtgccgccgacgagcgagccgcagttgagcgagaggtagaaccagttgaagaaggagctctgccgccggccgcgctgatcgtcctcgccgtcgtcgaactggtcggcgccgaacggcgccatgatcggctccagcacgccgccgagcgccaccaggtacatcccggcgtacagcgccgcgctctccagcctgatcaccgacgcgctcgccgccagcacgccatagccctgcatgctcgaaaaagaacacgcgatgtataaagcgtgagctagagctctctgcacacatccacgacgtacgccggcggcggcgacgaacgtaccacggcggagatgaccatggagagcacgatggtccagtatcggccgaggaaggcgtcggcgaggtagccggcgacgagcggcgcaatggagccggtgccctcccagttggtgacgttgttcgccgccgacttgctgccctcgtgcagcctgtacttgaggtagttcaccaggttcgtcgacacgccgaagtaggccatgttttggaagaaattgttcgctgatcgaccaacgcatgcaccaaagcacagaagatcgatatgcaagtatgcaacacgttacacgtactgggatatactaccaaaatgtctgaatttacgagcgtgttttactttaccgaggatgaaggtgcaggcccaccgattccggcgatttgacttccggcggtcggcggcggcgccgccgtgccggtcattcgattccacgccctccatggtttcagcaattcagagaatcagagatcctggaaaaatggctggaaaaggatgcagggttggtgtatcagagatgctgcgaggctgaggtcgaaggtttcgaaggctgctggagctgtacagctctatcttcgatacacctatacgatctcaatatcttggcccttttacttagggaatggcttatccctcagggataagccttatcgtttactacatgtcatttaaatagttataaaatatttaataataataataatataatataatatttgatatattacttcgcagtctagtagcatttaataaaatgcaccatttttttatttaaaaaacactttcaattaatggacttgcagatgcaacttatattctactgaatgcaagaagcaaaaccaacatgctagaaacagagctaacatgcaactagtactagtaaagaaagaaataaaggaacttaacaatctatgagccgatttcaaaacgggaagaccgccactcaacaatgctaatgaggaaacactatactatttcaaaagaaggaagtttggaagcaatccaaggagcagaacaacatggatatgaaaaaaatataatccactacttggggaagtgccgtataagtgtaaagcaataaccacaaaaaggaggattatactcaaagagtcaatgtctaaagaaataggagtatattcctatgtccaaatcaactaattcaactgagcatctaagtttaaattctacctatgtaggttgtaaaaagacagtaaactctaattaatatacgtttttgttttattgtaacttgaagaagtctaatctgggcatattattgtaaaaaagtcataaagataattatcaaatgcttaggttttaaaacaacagtacacataaatttgccttcaaatattattataacattataattataagtttattgtattttataaactcctaatatcaacagcattagatattcatgtcttcatcgataaagggtagagatggaagatcacatcgaaatgccttaaaatttcatagtggcatgtattttaataaaaataaataaatggtagagcaataagtaatttgaaacgagcggagtatatattggtagtgtttagcaatatctataaccagtagagtattcattagagttcaaaaagaattcctaagcactattatgtactccctccatctaataaaaaacaaacatcacattagatgtgacacatcctattataacaaatctaaacataagtttgtctatatttattataataggatgtgtcgtattcacgagattagtttattttgtgatggagggagtacgacattattcatcagtcacccccgaaggtactagcatacactgaaatataggctgtatgttgaccataggggtgaaaacggtaacggtaattaccggccgaccggcgttcgttttcgactttctaccggccgagccatatggaaatggtaatcgaccgaaacaaaaatagaaatggtaaaaaatatggaaatgaaaacagaaatggttttgctgttataccgatcgtttccgtatttaccgtattctcgtggaaattaccgtttcttataatatggtaattaccgtattctaaatatgtcgatattataggacatgtctatacttgacccacagcttatagattgaatgactcttcaataaaatctctaacttttgtacatggctaaaatgaagttaatttataatttatatagtataagcttgaatttatgtatatatatatatatataacatacttatgtaaagttaaatatatgtttttatagtttaatgtttccgtatttgttaccggtttccgatctgtaccgacatgtttctgtctgtattgttccgtttccggttttccgatatttccgatatcgttttcatttccgactttaccgtttccgatttcgtttccgagaaaaatatggttacggaaatggttgaggctgttttccgatcgtttccgactgttttcatccctagttgaccatcataccctctattcagtatgggccaacatatatgtagcccactccgccatacaaagcccaaatccaaagtgatgtggcctattgaagcccagcccaacactgctgatatacggtcgatgcaagtacggcaaaccttacggtttagggtacggtgggccccacccagctaatctacggtcttcttgtacgtgtaccaccgtgcgatgaggaggtaggcggcgaagttggcgacgcagagcacggcgagcagccagaagaagtcatccaggtggccgcggttgatgttgtccgggatccacccgagccgcccgccgcgcgccgtggcgcgcgccacgacgacgacgatcgccgagctcgcgtagttgccgagcgcgaacgacgtgctggacaggccggagcagaggctgcgcatggcgtcgggcgcctggtcgtagaagaactccatctgcccgatgaacgtgaacacctccgacgcccccaccaccacgtactgcggcacctgccagaatatcgacagcggcaggtaccccccgtcgccgtcgtcgccgtacaggccgtgccgcgcgatcacgcgccgccgcgccacctccagcgtgccggcgacgagcatggcgacggtgaggatgacgaggccgacgcccatccgcgccagctgcgtgaacccgcgatcgtggccggtcacgcggcgcgccaggggcacgatggcgcggtcgtagagcggcacccagagcatgacgctgagggtgtcgaagacggagagcacggcggcggggaccttgaagccgccgatgcgcgggtccagcgtgtcgccctggaggacgaaggtggtggtcatctgcgtgtacgccgccgcgaagatgatgccgctcgcccacaccggcagcagccggagcacgcacttgagctcctccacctgcgtcaccgtgcacagccgccacgggctcggctctgccttgtcgccggcggtctccacggccgccttgtccaagaacctgtgaatcatgcaacaaaccggacgaggaatggctaatttagtcaatggactagttataaaactttcgaaagaaaatttctctaaaatctttcaaatataactacactgtaactgtagtgtgtttgtattattactcaagtgtaaatcgaatgtaactagtaaaaaattttacaagtcttgtaacagcgcaagtggctagcttgcgtggcttgcgagcataggtcctgagtatgattgtgcaagcgcacaagcaaatccaacggacgaaaaatggaaagttttttttaccctattttctgtccacgtaaatttagcaaatccgtttaggggaatagatagatcgtcttaattacttctgttccggcgcaaacgtaagagtgggatgttgaaatggtcacggtgcatgcgaaaatgacttcccaagttctcattcacctctacccaggtcagaaccaaatggaaaatgatgagaaatggaccagacacgagtacgacaaacttacttctcattcatctccacccgtaatttccaagagaaaaggaccacatttatatgcgctcgacgactccaagtcaaccaaaagtattgcccggctacaaactttctcttgaaaaatactcgtataagcattttgaaagataccccaaattttgtacgcgccttatggttgagaacgtctttctttacaatctaatcgctagtctttctttcactaaaaaaaataccgtcgatgtcacaaggaacagtacgcaaattaggtgcaccggtagactaaacactgtcactagagtcactagactactataaactttttttaaaaaaaattcagagaaactactgagcaagtgagcagtgtgacacgtgtcccaatttttaaggcgatgcatgttacgcctactcacctaaactggtcggtgtgcacgagccggcggctcccctgtatcgcggacatgccatcgacggcgtcgcagcactcgtgcagcaacgacgcgtcggccggcacctcgacgtcgtgcttcctggcggcggcgaccaccacctgcgcgatcctggtgagcgggctgccccccggcggctggcaacgccggtacgcggcggtgccggcgaggaacacggcgacggacagcgcactgaagatcgccgggacgccgtacccgatcccccacccgacgctggtctgcacccacaccagcacggtgccgccgacgagcgagccgaagttgagcgagaggtagaaccagttgaagaaggagctctgccggcggcgctcgccctcgtcggcctcgtcgaactggccggcgccgaacggcgccatgaccaccaggagcccgctgccgagcgccaccaggtacagccccgcgtagaacgccgccgcgccgccgtgcagcagcgccggcgccgcggcgctcgccgcgagcacgccgtagcccaggacggagatggccatgaagagcaggatggtccagtacctgccgaggaacgcgtcggcgaggtaggcggcgacgagcggcgtgatggagccggtgccctgccagttggtgacgtcgttcgccgccgacttgctgccctcgtgcagcctgtacttgaggtagttcaccaggttcgtcgacaccccgaagtaggccgtgtactgcatgaagttgttcactgcccccatacgtgacagcatatgatgcatccatccacatcaatcacagatgcaaaatcatctcgaaataatgagataatgagtatgtgttttgtgttaccgaggatgaaagcgctggcccacgtggtccggcgatccttcttggacgtccggcgatcgtcggcgtcggcgtgccggccattgcaggattctacaccttccatggtctcagcggtttcaaagaacctggaaaagagttgagacgatggggacgatgcatacaagacgaaggctgagggtgaaaggtttcaggaaacggacctctgcactgaaccgtttggagcgatcgatagagctgtgaaggccagctgctctatcttcgcattcactccagcttcacgctacgctctcggtatattcgtcgcgccctttaatagacactctcgtagggtggttggatttttcacattttggtccttttgaaaaacttatttcgtaagtagacccctagaaaaacttatcccaaaaatggtcctttttggggcgccagagtgcctggcgccgtcattcaacaggacggcgccagcctctttggcgccgtccccctgccgacgtggcggggcgatgctgaggtggctagggggagtgcgccagagtggctggcgcccccccgaatttttttatttttgttttatttgtttgatattttttcacgcttagggacacacaagaaccaaccatagaaaaattgaactcaaatggacgtaatatgtgacatgtagaatttttcctctcctctcctctctccgaactagtgcagaggagaaagatgtgcaacttttttatttttattttatttttttgatatttttttcacacttaggaactcacaggaaccaaccatgtaaaaaataaactcaaacggacgaaatatgtggcatgtggaattttccaaagctccaccgaaaaacttctctcctcgaaaacacaatcttgcaagcggaatttggaggttttaatatcgccgaacccggcaaagctggagagaatcggatgtaactttttctgtagatgcccgtgcatatattatttgcctgattccgtgtccgtatgagaaagttacgcctattttaatagatgacatattttgtccgtttcggtagagttttggaaaattctacatgtcacatattttgtccgtttgagtttatttttatacggttggttcctatgttctcctaagtgtgaaaaaaatatcaaaaaatgaaataaaaataaaaaattacatctctatgtactgtttaacttatatagagattaagtaatttcatatagtggtagagtgcatatagtggtaatattttgaattagattaagtaatttcatatatagtggtagagtgcattatgtttaacatgttgatcaaagagttttactaaaggagttatggtctaattttagtgaaggtgcaaagtagactaagtggtatgctagatattttcagacttagctaggtggtagttcgagtttaaattttttttgtggttggttgtatcgtgatcctgagtgtgaaaaaacatccgaaaaaataaaataaaaatgacaccgttgcaactccatatagagaaacaggaatggaggcggcggcgcca

SEQ ID NO: 20448 - DNA, 6665 bp, Oryza sativa
tctggcgccccaaaaaagaccatttctgggataagttttttcaggggtctatttgcgaaataagttttttaaaaggaccaaaatgtgaaaaatccagctctcgtagaactccacgattttgggttttggtaatttgctctgcgtcacatataattggttatgtcgccacttgagctagttgcagagttgagaatgagagtgctgagggagggacctctggagtactgcatgacatatggtcccatagatcatcgttgtcttgcatgtcaatctgtagtatgtattgcatgtgcagtactacagaggatctgaattggagagtgctgcgtgcattgaactactgatatgtgcgaatggcaaggggcaacgttgtagcgggtacgctttcctaattaagaaaaggccaggtcaagtggtctgcatttttcatgataaaatttcacagaacttccagcctcattgcttgcccatatttcctgataagtcaaaatggctgcccatattccctgataagtcaaaatggcttattagaaaataaaaaataatttataggtaaatcttttatatatttgtttataacaacttaaaagtcagtgctaaaagaaaattatatatgttgaaaatatcttaaaatcaacttcatatgcaagtttaaaaatttaaattttagctatcgctttaatttattaggccaaccgttggtgctcttcatattttagggcactagttactttcacaaaaccctatattttgaggcttgtttcagcagaagaatcaatcctgtcaattctactgtcaacacgtggttacagtctgccccaagacacgtgtggttcactaaaacaaacctcgaagtatatgattttgtgaaaccaattacaattaaaatttactcatttttcatgccgcataaaagacgacaacacatacataataggccacaaataaacttccgtgataaatcgcttgcaaattcacactgaagcacgggagtatatatgaactccaagatttctgtaccgtcatggataaagtcatacacgcattaactctatatcataaaaagagtttcccaccgaattaagtatagtttaactggttaggtttcttacgttgaaactagtctatccggattcaaatcctatatttgacacgggtacttctattaagggctaattattatttcaatggtagacgacgtatctgtcgacagtgagatacttgtgatgacttcgtcaaacccaaaatataccgatccagtctttcagtggtgttcataagtgtgtaaggtgcagggtgtgcgtctgtgcgttcattacgaacaggggcggattcaacgtgggtgggtggggggggcttgagtccctcctacaaccaccagactcatggataccccccgagtcccccctcaattttttttgtcatggttggtaagatagaagttgttaaaggtctcttaatagcgttttagcacaatttaatactgagatgatgtgtttatactggtgtactagcatgttgagtatcctaatcttttgtttctgatccacccctgattacgaagagtgtacgtacgttatgaacggctgtgtttgtattttctaaagaaaaaaaagagctggccaataaaagcaagtgaccgtggcggctgtcagtgcacaaacatgtgcaatatgcaatgtgacgtactacgtggccgtgcttctaccagacaaacggagccgcaccgcacgaagaataggcaacggccgcgaaaacgcatgtggtttcctttcactgtccaagccctcccatgcatgcatgtgtccgtggcacattggtcagctgaaacataggcccacacgagaatgatggtgcctgcatattttagtaccagtggcctcattggttcccctaaagcgaaactatattaaaaatatcttaaaaccaacttcaaaaatatattttaaatttgaaattttggctttagcttatctttttttaagcatagccgatggggctattaagagtaacagggaatgcgtgatggtatttctctgaaattgtccgggagcatgcatggtgtggactctggagactggagtggatatctaagccatagctaggctttggcctttgcccgatcctagctagtggctgctggtgacgatcgatataggccattatctcctatcacgaattcaggataggcagtagtgctctagtactactccggtttactatctccatcctactagtgcgtaccaattggagccaagccagctattgctatctatcattaatactccttcacgtttgcgtccatctcgatcaccctacagaatataatgcatatacggagaattttctcgtgcttttcatttggcttcaccgtgagcaggacatgacacaaaaattaaccgtgcgcggtgtccagacctttggtccgccgcgcttgccgatcggtcggcgtgttacgggaaaacggacacggtgcgtgtgtgaatgagcgttgtggtggcttgcgcgcaaacgcacaaaaccgtggttccgaaggatattagttcatccgtgtcataaatatgtttatcagtatcaggatgttagttatatttagaacataatattataatatacaggtaagtagtttaattattggttattaaaaatcgtcggtgttgtatgacactgacacaaccactatggatgatccgaccgaaacaaggaggcgccgagcgacgcgcggcctttgtgcagccggatgcaatgcggcgcgcgtacgtcacacgaaccgccgagcgcaacggccggtgtctgggtggcggagcagagtgaatgagtgatgggtggaaagcaaagcgcgcggtgccacgccatgacgcggacggaatttcaggtttgggatgagatgggaaggacagtgagtggtgtgatgtggtgtggtgcggcgttggatatgtttcttttcttttccttttttatgtatcagctcgatctcttttcactgctaataatgcagatcaatcagcatgggtgtaagtgtgcaagggcgtagacgagcaatagtggcgacaggtcatgtgtaccgtcaagctcgctgctgccttttccgtctttttctcatgctgtgtttgtcaccgtgcgcgtccaccactttagtccgtgtggctctgttccgatgtgcatcagttcatgcatgagtgcacggatcacggatgcacctatcgatcccaggtatagccgccgtataccagttcctacttcctagtgcaaaatcatcataccggggtccatctcattctcatgcaccaatgcaatcagtctactattgcagtagtacgtgctcttcgtctgtctatagatatatattgctcccaaagttgcatgtcgctgttgatgccgtcggctgtcggggatccagccgagccgagccggcgccaagccccttggcgtcctcgccggacggcggggcgcgctctggtgattgggcgcaagcatggatggcgcgcggattgcgtcgggcagtgaagcgcgggagcggaggacgaggagatttcgaattaaatttttaaatatacattatttttctcaattttgtgtatacgtacatacatgcttctaaaaattttacagaaatatacgtcttccgctggttggggacgcggaaccgcgctgtcgacgcggctcgaagacgtgggatcgactggagggggcggttccgcagcttcaacacgtgtgaccgggacggtcccgcgccgagataatgcggcaccgctcaacccgcgactaggccgtgtggcaccaacgcggtaccgatgggagcggacgggagtgacggcggaatgcgtcagactaggtcacggtcccgcggaatggttaagcgggtccgccaaatgcaaacgatcaaacacataatcaaataaacttttgttcgtaatgctgctaatgcatgtgtaatgtgctatatatgctaatatgcatcactgtgctacactgatcaagcggcggtggcgctgactgatgacgcgggaacgcccgcggtgccgcatgcctgttctgcgccaccgccaagcggtggcaggcatgcacccgagcagcggccggtgcggcggccgatgcggtgccgcaccgccccggcgcgggaccgccccagtcacgcatgttggctggaggaggcggtgccgcatcaccagcctgcgggagacgtatatttatgtaattttttgacgtatatttatgtaattttttcaaacacatgtatatatatacaaaatcgaaaaaaaataatgtatattttaaaatttaattccgtggatttcgtggagagacaaccgtgcgcggtggaacgcgtccggcggcggcatctcgatctccgtacttcaatctcggaacaagctgggaggctgggacggaccagattggattttgtgggcctagttgttccgctggcacgaggccccgtgccgtaatactgggcttcgtcaaaagcccgttgtatttacggatggaataagttcactttgactccctttaaagtgatccgaatctaatgcatgaccctcgaccgcaaaaccagataggatgactccctgaacaatttgacagcggttttggacggcggttttattgacgtggtgatgttgacctagtattttttttgaatgacgaatggggcccacatagttttttattttaatgcctcctaagcgtgacgtcaacaccacagaccaagtcaacatcgccacgtcagtgccatgtcagcaaaaccgtcgtccaaaaccccaaaggaattcaaattgcactggtttgaatagttcggggggtcataccggttgtgcggttgagggtcacggattaaattcaggtcactttttaagggagttaaagtgggactggttcctttacggacacgggacataggcgagttttgggccatatagatggcccgcataggatctctatcggtaccaggctgacttctccagcccgtacggtcaagaagcggcccaagtaaccagggtcacgtaggcggcaggccagctggccattccagatagacaccgacggtgaaaagaacggcttgactcggttgcgttgcagcctgcgtttttccactttgaaccttcgtgctctcgcccgtcgcgtctgactggttactattactcgtatatacgtaatacctccgtattttaatatatgatgccgttgacttttcgactaaaccattcgttttattcaaaaattttatgtaaatataaaaatatttatgtcatgcttaaaaaatatttgatgacaaattaagtcataataaaataaatgataattacataaattttttaaataagacgaatagtcaaacgttagacaaaaaatcaacggcgtcatacattaaaattaaaatatggaggtatatacgtcatacgtatattgtacctgctggattggtcattggcaacgcgttactacatcttaccacatgattacttataccccgtgccgccgtgcgtacgtgcgtgccgttgaaccgttccggttaatcgatcagctgcttctcacaatcaaaattctccgcggtctagttgtctatagttataatcgccgtgtcgccggctcacacgtactatgcgcacaagtagcacaagtacaacgacacggtctttgcgacgagcgaattggctgcaggatgcagggggtatcctccgccgctcgtggcgttgacggcggctcgctcgcgggtgaggatttgttacctcttcccagaaatcgcctgacccacccgcaccgacaacacatggaacgtgcgtgatcagcaacccctttttttctgggaggaggtagagaacgtgaccagcaatcttgggagtgagaactggatgctgtgtactagtactaatctcggatacttggccttgtgaacaggctagctaattggtctcgattgcgctttggttagactggttaaaacggttgacacttacactaacccgtaaacatacaataatttcagaacattctaacggaattcaccatgagaagagaaacagagggaggcgggggtttgaattgaaaaaacacggtcgcatttgggagcgggcgttcgcgtcggctcggctcggccgcatccacggaatcaaatcaatccaacgagcgagcgagcgaacgaaccaaccccttcttcgcctcggcttcgcttccccgtcttttccttccgcctcaccaacctcgtctcgtctcgtctcgtctcgcctctcgatccttccaccccacgccgccctctgccatcatcgtcgtcatcccatccggattgccacccaaccaatcgccatttgcttctcgctttccctctcctcccccaaccactccatcatcattcgcaatccaatctcgctcttggttggcgtcgattttgacgcggtctggttcgtgaatccgacggagccgggtgatctgcggcgggacttgcagatccgagcgggcggggcggggcgggttcgctcgtcggatgtgtggatcctggtgaggtgaggcgatgccgggcgtcggcgtgaagatctacagcgtcttcttcaagttcctcctccgccacaagctccagtcgctcgccgcggcggctgcggcggcggcggcgggaggggaagaccacgcggcggcgttcggggtctcctgccgcgcggacgaggccacgg

SEQ ID NO: 20449 - DNA, 4672 bp, Oryza sativa
gcccccgcccgccaccgccaacggcgggagcgcgccctacaggggctacctcccgcacgccgtctcctccccgcgcgccgcggcgtccgcgcggcggaggctgcccatcgtcgtccagttccacggcggcgggttcgtgtccgggagcagcagctccgccgccaacgacgccttctgcaggagggtggccaagatgtgcgacgccatcgtcgtcgccgtgggatacaggcttgcgcccgagagccgctatcccgccgcgttcgatgacggggtcagggtgctcaggtggatcgccaagcaagcgaatctcgccatgatgagcaaggtcggtggcggggtggacacgttcggtgcttctaccgtcgagccgtggattgctgcccatggtgatccggcaaggtaagatttgttcaatccctcttgtttgtacttgtgttaatcggtagtagtactgtattgcagtaaatgggtaggaacttaacactgcattggcaaatgaggcaaacaaaagaattgagtgaagataattgggtttttctttcacaaccttctatctattgatctaatagttctaatttgtcatccactagcatttcttggtactgtacatcaaaattgctctagtttggtgaccatattagaagggatgagtaaatacttggtctgttggagattcaaatggtaataatattatgaatgtgttgagttccacaatagtttccatttctgagtggtaccagatttaaaatgtgcgagaatgttcgctgagacaggttcaatgtttagtgcccgttaattaggcttgttcgatatgtcatgtgtaatttatgttgtatcacgccatctgcatgcacttcagcttttcgtgtggattgtgatgatacacaggctcacaacagtgtgtagctccagaattaagaataagcattcaaaaaattccaaatgccagcccaccaggactgtactccagatggttgttggcatttataatacattgtgccattttaagattcgtttgacttgtggcatgtgtgttgactttttctttggaaaaaaaatgtaagtttttatcttgttgggaaagctctattcatctggaagctaaatgttgagtagatgtctgttaatggtctctccacaatgcaattgctttaaatgcaagcaaaattacatgttttcgtattgatgtaccatcttcacttcaacctctgtcgattgatgttgcaacttcctgggtgtagatgtctcaacgttcaaagtgttcacctaagttcaatttccaatataatatgttagtctttaccacgccaacaactattcttgtcttgctggtcaatatacctgatcatttatagttattccttttgttctagttattgagcattactattactgtaatctgaccatgcattctgtcttttgattgaacagatgtgtactacttggtgtaagctgtggtgccaatattgctaattttgtcactcggaaggcagtagaagatggaaagctatttgaccctatcaaggttgttgcacaggttctgatgtacccattcttcataggaagcgttccaacacactcggaaataaggcttgcgaactcatacttctatgacaagtccacatgtatacttgcttggagattatttttgtcagagaaggaattcagcctggatcatcctgctgcgaatcccctggctcctgatagaggagggccaccactgaaatgtatgcctccgaccttgacagtcatcgcggaacatgactggatgagggatcgagcaattgcatactcggaggagctccgcaaggtgaatgtcgatgcacctgttcttgattacaaggatacagttcatgagtttgcaaccctcgatgttttcctcaagacaccgcaggcccaggcctgtgccgaggacatcgccatatggatgaagaaatacatatccctccgaggacacgagttctcgtattagtagttgtagcaaatatatcagaactgtgaaatagacttacgggaaagcatcaacatgttctttttcacctggtaatgggagcaattgcaaagtggaggccaggaacctgttagcctaatgtgagtgagtactgggctttttccccccatttattatggtctttgtgagagagaatgtagtgtgcaaattgtagactgaactcaaagacgatgctcttccccctgtagagctcaattctttaatttcttttgtaccctttgtgtaatatgaaattgttggggcttgaatttaccatttttgagaaggcaagtgtcattgtccaatgatcaatttaaagaaaaagcgttgatataccatcgcgtctgccaatcaactcaattttcttttacttggttaacctttacttgttttggttgtaattttgataccactcaggttttctaacgcaaattccagaacaatattcaaatggaagttatctccaacttgttttggttgttaattttgataccactcaaaggtttactttgcatttcacccgtttacttcaacctcaccttcattttgcaaggtttaaggcgacacattgcttcgtgcttacaccaacagatttcaggcctaagtttcgtatgtcttccagcttcttgtttaatccacatgcatgttcttttgacacatgtatgctcgtatgatcttttcaagtttcagcatcgtcaatgaagtgaagttaacttcacccccttttcccagttgctaattgtacaataaacggacattgcactacatggctgaaacttgagggcagctccgatgtgagaaaaatgactgctcctagataccttgtcactgcaaaagcattctcgttgcagtaaaaggttgaacaaacgaacagatcataatcagatctcagcactaactattccctcagagaaaaaaaaataattcaacactaattaaaccttcaagggttacacgatctttcacagactgttcctcgttcggctctgaatgaaagcttgcaatgatggttctcgtccaaggtagtcagatatgatatcaaggggatttttcgagcctcctggagccaatacctgaataatgaaagcattttagaacaattgccatgagtcgatgatggaaatacataatgcctcaggagcactagtcagtaccttatttctaaaccgcaaccccgcatgctgatttagcaagtcgtctttaaattttgatgcaaacagatcagccgcaaacacctgcattgtaaaagtgaatgtgctttactaatggtttaaaatatatgatgagtgtaatatgcctttggagttatgcttagatcagacctcactccatatgtaactgtagcacacagcatcatagccaatagcaatacgtggaaaacatgaagctgggctattcccttccaacaaaggtatacctagcattacctgaaaaaaaaaggagcattacaccttcagttgtccatgcaagtaatataaataatgaatcagttatttacaatgtacctttggatgaagatccttgattaagtcatcaatgttcacattttcgcctgtatgtattatctgatcaacaaggcctggtaacagcaaaagaacacgtattagctagcactaatgaacatgtcaaaaagcatataccaggttgggattacacatataaaaacagtaatttattcagtgaataggcggaaaacaagggaagtaagactgtttttcttttgttcaaaatacaggtcttaagaacgacaaatgagtttatttatcagttattgtgttgcacaattagagaaaacgaagtgctggggacatcaatcgtcaatgtctcatagtatccgtatctcactatgttgtcagagtatcagagatagtactgttgagaaacaatcttcccagcaaaatgactcacacaaaaggatctcttgtttcagtttcaggccagcaaatatgtcacgccttcttttcagtgattggcaagcctcactagtgatagacttcgtaatgtcctacaatgataagaacagaaactatttcaagtgcaatttgaaacaagtttcatcaggtcaacactaacttgtctaagtctaaaaagcctgtatcaccaatacaattttttttatgtgtcatcagattcacttcatgtcataaacaaaagaggaaactattcccagttcatatactgctttcttaatctaaacaatgtttttccggtcatgcaaaaaacatccacttcttattcataagcttggttgttccattgcctaaaataacttggtagtataaaaatctaaatatctcctctgtagaggcagtgcacaatgtttcaaatattatttcggcacataaacatcatgctaacttgcatcacctgatggaagccagacatcatttttagagaaatgttctcatagcacctgaaatggcaaatttcatcttacacatcagaaatgacagcttccaaagtgttggtatgttactgaagaaacacagcaatacctaccaattctcaagtaacagacttggaatttcagcaaaatccccctccagttgaagacccgaaaatctagaaaaggtggctctgttggagatatgatggacctacagaatattggagaccaatcaacgcagttttatttgatgttcaacagcggaagagataatcagcaatctggcattggtcaaa

SEQ ID NO: 20450 - DNA, 2535 bp, Oryza sativa
cgggctccaatagaatccacatgtacatttcaccgattatagatatcacgactcgtgagaaactgagaaccgcagagtcgttttctagcttgtaaaattttgattgtcttaagtctccagtagctttgctttagcaagacaccctttttacactactttgaataaccagtcctttcaattgagccgattcgaacaattgatcatgctctaactgcactagaaatacatgaattctctacattacctttcttgtgccattagaacacaggcatctattctgaagtgccacgacgcaggtatgtgcatattttccttccctgggaataaagtcaagtagttcatcaaaattactttatttggtcgcaagtgcaagtggaagtgtgcatttttttcccttgtgatttgtgtttccatgttatgctgtttatccttaatgtttctttcatgtgttctgtgtctgcatttatcaagataagattttatcctaagagaattggctttcagaagtaatgtttcaatatgcatgctcaactagatttctaaatagtagcgtgaggctagcaaaattattaaaacttcaccagcatgcatccaaacaaacctggaaaagatatccagaaaaaagtaacccaaaagatcacttgaacttgcatcccagacagaaaagagacgaactgtatcgtgccaagtctcagcatccttcatttcctcaaatcgcagtgctgccaaaataagatgagagtaaaacacatccagtcatattttggaagaggtatatccagtcgaattttatgaataatggggggttatggtttattctctgatgggtacatcttaccaaacagatcttgaaacatcttcaatattcctgatatgaccaggtcaacagggaaaaattgtttaatttcaccaatatcaagatcaaccttgagctcctcagctcttttcatgtagtataacaggtcttccacgctaaattgagcatcaccctcctcctccatctgaaattagaagattgactatgagtttaaattgttaataaaaagagtgtaatcaataaaaagaaagagagagatcaataagagctttgtccaaaaccttcagatctttgagtacgctgagctccctattagctaggccatttaattgttctgacatctcctccaaaaactccaagacctgtaggtacaagtcctttagagcatgagtgggtcttggtatcatatgcaaatttaggtgagcatgtgaaaggggatgcaaatgaaatggctaaacatcatcttgttggaaaactgatgatctgagagtaattatatcagtatattgagacaaaattaagaatgcagatttagctaaaaaaaatctctagcagatctgcataatgggaaagtacaaaccttccttgacgtcctcggcattctaggttcaatagcataatcagcataattgggataccccagcaatctagcaagccggtgtcttagctggacctattattatgttaaaaggggggaaaacacaacttgtcagctgctggtttccattatgaactgagattatgcatctaaaataagcaattgctttaccagttaagaaattaaaacattgtaacgcttaagtcaaataatgctcataaatgtggattgcaccctagtgcacctctacagcacaggttggacgtaaaataataaaatcctatttcaatgagctataatgttacatatctttcctgggtaattgaccaactgcagcatagaacttagttgtgcgaaataaatgaaatcatgaatcgaaaggtataagttccttatgagtttacagatatgaatatttggagttaccaatttttccaggatggctatattctcttttccacctttctggccataagcaacagcaatcagtttcctggtagagccaaccttgaaaacaagaaataaattagaccagttagcgattatataaaagaattgtagtaaaaagattctaatcttaagtactccacagcatataatattaaatgccttatgcagatgtgcatgaaaagaagcacaaaatagagctgaccttgcaatgctcaagaattggagtaacatgataactggtcagcagaaccttccacttcccatttgtattttccagttcctgagttgaacagtcattgtaatgtaggatcagatagaaatagtatcatccttttttctcttatcacacttcagttcattcgtaaagtccgaaaatagctttcaataaaagctgagtactcccattttttaacagtccaatgttcgcacattgtagttcctaaaggtaaactcattaaagaatgatattggatggatcatggatgtgtgaacattcggaagtgtgtatactgcatcctcccagcttacctttaagaactctagtggcatcccagccaggtcttcctcgttcaatagaagaaattttgtggaatcatttaagctttgaatatacttcaaacttaactcatcaatgtgagatttcagtttctccatctccattttcttgctt

SEQ ID NO: 20451 - DNA, 5577 bp, Oryza sativa
aacagattcataagtaaagtagctatacatccactgtctaccttcaactttgatctatagctaaaaacgaacagatattaatcttttaaagtcaataaatcataggtgaaatgcaaaacgaacaagaaaagatagagcacgcacaaaggtactccctccatttcatactataagtcgttttaacttttttcctagttaaactttttaaaatttgatcaagtttatagaaaaatatatcaacattttcaacacaaaataaacatattatcaaaatatgctcaatgttacatttaatgaaacaaatttggtgttaaagatgttgctaattttttctataaatttaatcaaacctaaagaagttgactacgaaaaaagtctaaccgacttataatatgaaacagaggtagtacatcggatgaagaaaagatacaatgacaagggacatctatagagctgcgtgatcatagcatcattcagagaagggaatcgtctaccatgcactggacaaatcttgttgcttcaaggcctattctttcacctttctgtgtgaatgcctttatgacacgatacacatcttcacgctgcctggacaccttgcacgaaaaaacaaggtacttatactagagtctcaacaggaatttattagatcggaaaggtcaataacagggaattcaggttattgttttatttgaaacaggggcccttgttttattaaggaaagggaattcagattctattaagaatgtgttttcttaaccatatcacttcatttaaccatatcaacaatggaaaggaatgaatactggaatgatgttatgtgttacgaatgctcactgaattggttatataataatacaagtatcgtggattcttaagataccaagataccaacctatgtgcatggtttcacattatttatcaacagtgattgcaactctgtctggtagatgtataactaccagcagttacaccgtgtagatagaaaaggaaataagtaacaagttgcacctgcactgctggaagtgagaatccaatcgtttctctgcttctgcactggcccttcgtacatcatcagacggtgagaccattctaggaagcacacaggcttgaaccagtgggaactgctgagcatctaattccgccagaggtgcaatgacattagagaagctgacctgcaacagaacatatcatgtaccaaaatatgaaacccgtgccactctttggctttatgcaggcaaatagacagtataggatgaatatatcctgccagtgttgaggcatttaaaaagaacccacacatttattcatgtcacattatcaacttaatgaaattaagaaacaacatactgtaaagcgtacgtgtttctgctgctataccacaaaaagcatttcaacgtaatggtgggatgcaaatgaaataatgcagcatatacacattccaaaacaatgcctaagatttgattgaaaaggtatattccataaaaaatgcagaggcagcagagtgttggatacatactttatctaggggaaccgcagccacagcgtcgtatgtttccttcgacttagaaacgacgcgatcagctaatctcttgatgtcagcagctgagaggttgacttgcgcagtaaaccctgggagctctgcaaccatccaacacattcaaacattcaatcacgcgaaaactacgccactaaatcttcataactccatgccccaagagttaaattcctgcaatatttattgcgatcaaacacatatttctacatctcacgcgtggatttgcggacagaagggcaacattatgggggccatttttccactcttcacgccccccccccccccaaaaaaaaaaaaaaaatcaacagcggatgctacattgctacacaattgagcagaagcaggagaggcgtgcacagcttgaggaaaaagtagagcgacatgaggggagcatcgtaaccaaaactccgggggggtttcgggcggcgcgtacctcgccgcttcctgcggcggtgggcggcgacggcggaaaaggcgaggttgaggccgacggcgacgagcgccgccgcgccggccgcggcgatgacccggcgctcccgcctccggagagacatcggggcgggaggaagcttctggaaggttctggaaggcgcgccgcgggcggcgaagaggagagagaggggaaaaaaaacggaagagcagctggagcagcgggcggctgagagctagagctaagcgagcggaggtgacgatgatatgcgagatctggccgttggtatccgcgtggacggctggatttaagggagatttttgcacgcctctatagctgtatacagaaaattgatttgtacagtactttctactttgtttatgctggttgatagcggattaccagctacaggatcagcattaggattaatgctaaagagatggaaagcttgtccatcaggtttttttttcaagccaaaagtcactgttgagctatagagctaaagataagatcttctggatttgttcaaatagagtttcgttattaaaaaaatagagttttgtccctatctttaaacattggcgtagtgaattttaatcttggttttaaggatgtgtttgagatgagaggaaatgagacgattgagatgatacacgaaatgaggtgagccgttaccatatgatttttttataggaagctgttaacatatgattaattgagtattaattatttcaaacttgtaaaaatggattaatatgatttttaaagtaactttgctatagatattcttttaaacgaaaagacgtaccgtttagtagttcaagaagtgtgcgcgtaaaaaaaagatagacttttttctcttgatccaataccatttaacatagacttaattaagcaatgtaatatgattagcttatagcttaagagctcatttagaacacatgatttagaaaataaaggaatagaaaaaatatagagataggatgacatggatgttgaatctaaaaatggtccacatgagtttgtaacaaatgtcttttggcaaaaccaaagaaaaaaatatagtaacttcatgactctagaaagagagagcattaggttagttttcctctgaaaattttatgaattgattattccaaaggaattttaaagaattttgtggaaatccagtcctttgttccaaaggatcaattttcatataattctaattctctaaatttcttccatttttccttcgttccaagggtgtattctgtaccctctcaacttctatttttttttgtcacacgcatacttctcaaactgctaaacggtgtttgtttaaaaaaatttatatagaaaagttgtttagaaaaaccatattactaccatattttaagtttatttttactaatattcaattaatcatatactaatgtgtcttttcatgatcgcagcctaaagaggctcgtttgtgcagtgcccatcggaccatctctaaatacaagcccatgcctcggcccacaggcccatgtgcatgcatccgggccatccggcgcgttgtgaaggttcagatcatgagcgagtttaatgcctgtgtgcgtacggaatcaagttgcacattgccagtcatgacaaaaaaaaaaaggtgtacaatgtagactcgtatactagccgtcgattcatcctctcaaacatgccctgatcccgaaaaggttgtccaacacactgaaattcctgtgtataattatccatgttcttgttgaaattgaacgtgcgttacacgcaccatgcatgtcaagttgatttttttttaacacgggaaatggaagactgggttgatggtaagatatatagaaagaaatttaagcaagcggtaatcggtgaaataactagctctaggatgatatcttatatttcaagacacattttgaatgtttaagcttcatatatttggggacgaagatactaatagataacaccgctccatgatggtgtgtctgtttatacctctgtggttaatatagttagagaaaatatagtgcaaatcacatatctagtggaaaactagaaactactcctagattgaaaaatgaacatataggattttttacgttataataagagtaaaacttttattcaacaatagtttttttattttcagtgcacttgtttttcatatagataatccatccgtggtgtttgaatatcctacgcaaaatgaggtgataataacgtgtgattaattaagttttaatttttacaaacttaaaaaatggattaatataatattttagaacaactttcatatagaaagttttcatacaatacataccgtttagcagtttaaaaagcgtgccaggaatatttataacttaatccactttttttaagtggaaacgaactgagcaagaaatgttggtcctgcggcttagctgttcgtggcccgcgtgccatcaacccgtactctctctgtagaaaaagcaaatcatgggttttcgtgtccaattttgattgtttgtcttatataaaatttttttataattcatagttttattattattagataataaaacatgattaatattttatgcgtgacttatcattttaatttttttcataatttttttaaaataagacggatgcttaaacgttgggcacagattttttttttatttttttttttttacggagggagtacgtcgtggtgcctgactggcgactgcatcttcatggtggacacgctgggtccgtacgcgcgtgaaaccgactgctcacgcgcccaaagtacagggcaagctaagctatagctgtactaggctactggctagctagtgctaccgtggtccgtggatgtgtacgagcgctgcaggcaatggcagggggcagcgtcatattcacgtggcagacgaggatgcatggaccgccgcccgccattcgctcgccggagacatgcatagcatacgtctttctctcgccggccgccacactattatgtcgacacgctgtgcacacacgcacgggtacatacgtccaaatgtaggcgtttgcctttaatttgcgagctgaccaatccgagagaaacacgttcaaaattgggtgggtataccatactccctccgttgcgtaaaaaaaaacattcttcctccgtttctaaatatacaccattgatttttagcacatattttaccgttcgtcatattcaaatacttttgtaaaatatgtaaaattatatgtatatatatataagtatatttaacaataaagcacatgataggaaaagaattaataattacttaataagaaaaacggttaaacatattttaaaaaatcaacagcgtcgaatattttgaaacggatggagtattttttcaagtataaaaatgctatatataggcatatatatatatatatatatatatatatatatatatatatatatatacacacacacacgtacatatacgagtgatgttgcgtgcgtctgtctccatggcggtcttcatacgtcttcttggctgaagcattcggacgcggctggtcactagttaaaaggctatgtagatgagaagcagactaaatattaaatattaatggtatacactatattttt

SEQ ID NO: 20452 - DNA, 1508 bp, Oryza sativa
atggtattttggtgccagcaggattggtttccgggtgggtgcagcactgatggtatccatttatcagaaatccctggtgatgaagaactcaagcacagccagggggaaaattgtgaaattcatagatgtagatgttgagaaggttagggaatttttgtggtaagtacatagaatttggtgctacccttgcaaatatccttggcacttgccattttctaccgtagccttggtgcaatggcctcgctgtctgcagtccttgcaacagttttggttatggtgagcaacacaccacttgcaaagtcacaggagaacctcaacatgaagatcatggaagcgaaggactcacggataaaggctatggctgaagcaatgaagagtatgaggatattgaagctgcatgcatgggagacagcttactttgacaagctactgaatctaagggatgtggagaggggatggctcaggaaatatctctacacatgttcagcaattgccttcctgttttgggcctcaccgaccttggtgtcggttgtcacatttggtgtatgtattcttgtggagatgccattatcagctggaacagtcttatccgccgttgccacgttcagaatcctccaagatccaatctacaacctcccagagctcgtttcaatggtcacacaaaccaaggtgtccctagatagaattgaagagttcatcaaagaagaacaccaggggaagccaagtcgttctgacaataacactaggactaaggacctgtctatgactggtgcaatggaaattgaaccaggggtatatggttgggaaattgacaatagcttgaagaagacaaaattcatgcttaagattgacagaaagctgagcatcagcaagggtcaaaaggttgcagtgtgcgggccagttggttctggtaaatcaagcctcctttacagcatcatgggggagatcccaaggattaatggtgcagaaacaacagtttttgggtcaagggcatatgttgcgcagagtgcatggattcagactgggacaattcaagacaatgtgctctttgggaaggatatggacagaagcttctatgaggaggtgctgcatggttgtgctttggatagagatttggagttatgggccaatggtgatatgactatggtaggggagaggggcatgaacctgagtggaggccagaagcagaggattcagcttgccagagcattgtatagtgattctgatgtttacctcttagatgatcccttcagtgccgtggatgcacacaccggagcacatctcttcaaggtacagtacatgagaaatctgcaacagtttagctgtaatgagcttcaaatgaaatgtacaataatgttacagcacaaaggcacaaagcaagaaccataatcaaaacaggaaaacacaaaagtattccacccattagacaatctgcaaattatctataagcaatcaagtaccaaatctaattagtaaccgcaaatggcttactcactgaatcgtgagat

SEQ ID NO: 20453 - DNA, 3822 bp, Oryza sativa
tagtatccagattttttttttgaaagaacaaaatcaaaaaaaaaagaccaagttgtcagtcaaagtaaaaactgtcctgaaactaactatacaaagaaggggtataatagaagaatattacatggatttgcttagctagctagttgaggcagtattccatttccacctagttggtgctcaattagtggacctagcatgtttgtatataaacttgcaatgctagtcatagatgcttatttaactgttaataaagggttcagctttaatttcttcgcacacactctatatgcatacctaacttaacagttcacaagttgttacataaaagaacagttggcatctccccttctagatatcaaataaaaatgataaggtcacttgccacagaatcacagaagctgccagttgacataataattctccaattgtggatggaacctaacaaacatattaaatgtgtgatactctaccttacaatttgcagctagagtgacagggaaatggtgttacggattacataatattttccaaaatattcttaggcacattccttggtcactgtatcgatttttcagtgttagttttatccatccacctgttcttaaaaagaaattatgatcgtaaaaaatatcttagaaccacatgttataccatagcataaattactctagttcctagaaaaagaattgccttcggtcataaatattagacgttgagaacaagattttatcaaactctttaaacattgatcatcaataatttcttaaaattatttgtttaaaagaaaaaaagttgtatgtcaatttgccttgaagggttatacatttatactacctccattctaaaatatatagtaacctattattggacatgacagggatctagtactaggttgttatatattttatggcagagataatatatcataatttcatagaacctaataaaattttatatacttattttaatacgagactgattgttaaagttttaaaaatttaattaaataattatttaatcacgagccagagatgagggaagataaatagacttcgcctgagaaatccttggcccaacctactggcccaacttggcctgcgaacaaaagtgacggacgcgaaagcaaagcaccggctccgcctccaggctatgccgcgtaagccgggggctatgtattggcggcccatctggctcggaccccgcaccgatcaatccgggctcgtgccaccgcatccatcgccgagcgcgaggagagctgggtttttcccgtgagcgagagcgagtgatggcggcggggaaagggaaggggaaggagggagagtgcgacatggcggcggcggcggcggaggcggagaagaagggagagggctcgacggtgtcgcgcggagcggcgggggagcgggtggtggaggacagcggcggcggcaggaggacgatccacctcaagagcaaggatggcaagcagcatgatgtgacggaggcgtcggcgaggctgtccaagaccatcgccgggatgattctcgccggcggcggcggcggcggcgccgaccagtgcatcccgacccccgacatcgaccacgataccctccgcgtggtgatgcagtactgcgacaagcacgccgccgacgacgccgacgaggaggatctcaaggagtgggacgaagacttcgtcgacgagctggaccaggacgccctcttcgatgtcatcgcggccgccaactacctcgacatcgatggcctcctcgacctcacctgcaagagggtcgccgacacgatcaagggcaagacccccgaggagatccgcaaggagttcaacatcgtcaacgacctcagtaaggaggaggaggaggagatccgccgggagaacccctgggccttcgagcagtagtactcactttctttctcttaacccgtagtgtttctcgtcgtgtgatggcggttgtctcgtagttgtgtgtgttgtgtctctctcgtagattcagatcgaatcggggagttcgtgcattgcatcctgtccaagaagaacagagtcgatcggctgtgtcgttgaatgctttgaactgctggatcgcgatcgcttgcatgaagtgaatatttcgccccgcaaattgtttgctgcgtgcctctctccgcttggttttcatgcagtttgaattctgttgtgaattgaatatgaatagagaagggaaaaactgtctgaaattctgaatgctgcatttcgtttcagatgcatggactgatccatcagttctgacgccttagtatttcagtatgttgtttggctaactaaagtactaaaccaactacctgcatgtctgaattcttctacacctgaagcatttcgttcgagtctttgaaatatgcatgtggactgatacccaccagtatgttgcattcttcagcatctgaagaatttcatttcagatatgtgtggacttactgaattggtgggttaagttaaactcaattcttccttgcatgtgttctgctttcttccgcatcatgtagcggatttatagctagttgtgtttgctcactcaactagttgtctagtgcatcgtgtttgtaacttgcaatgctaggtgtttttagtttttactggttaatttggaatgcatgattttatatggtttttgtacgtgtgaattgattagtttcagttaccataaatatcctgtaagatttctgcatttcataaggggactaactactaaagattcttttggggggactatcaacaaattaattaagatcagttgccaactgaagataataatatttcctagaaagaaaattggttaagctcgggaaaaacatggtctgacatgatcacaattcacaaactcttgcggctttgcatactcttggtgcatatgacaagctctagctacagtctactggttttcatggcttctcagcgttttctgttgctggttatttatcgattccttgtaataatgtaatctcctgaacagtgcgttgtttttttctgctttctcatatatcaataaaatggcagagctcctgccccttcactcgatgaaaaaaatatggtgtcacagaatatttactaaaatatccttattactcctagtaattaggcaagttccttggttgccccagtgattccagtgtgttagttttatcaacctattcttagaaggaaattaagacggtgaaaattctcctaattatgaaccacttgttagttgttacatcgtcaattattagtccattcaatttgccggagccggagttgatttaaatcttataagtggtgatacgatcctcaacgaacatggaagagaaaaatatatactgtagtataaataaattagtagtttttagtatgagaaaaaaaaattcaaaacatgtaaacatgaagagatttaacaaccgacaaatacttctcccaggggaaaaaagggaagaaaataggacattgtcctcacaaatgggcctaatcccttacaaatcctcagcccataagccacaaccttctggcccaacacagcctgaaaaagagaaaactctcgtccatgcctagctggctcagcctcccggcgacgccgctgacccgaacccgtacgccggcggttatatataccggcgactccgacgtcgcaccaatcaatccggctcgtgccaaaccatccacgcggcgagcgctagctaggtagtcggtgcaaggagagctagggctctgtgaggagcgagagcgagtgatggcggcggggaacggcggagaggccgcggtggtgggggagggagagggcgcgacggcgtcggaggtggtggagaagatggtgtcgcaggcggttg

SEQ ID NO: 20454 - DNA, 19844 bp, Oryza sativa
ccgacggcgagccggtcgaggtgacagaggcggcggcgaggatctccaaggtcatcggggacaagatcgacgccggccgcggcggcgaggccatcccgctcccacacgtcgacaaaaagaccctcaagaaggtgatcgagtactgcgacgagcacgccaacgagaactccgacaccgacgagcagaaagaggaactcaagaactgggacaaggccttcatcgacgagctggacgaggacgacggctccttcctcttcttggtcctcctggcctccagctacctcaaaatcgatgggctcctcgacctcacctaccagagggtcgccgacaatagcaaggccaagaccaccgaggagatccgcaagaccttcagtaccatcgagatcgaactcagcgacaaggaggaggaggagcagcagcaggaggaggagatccgcccggagaacgtctgaatcttgaagtatagtactcacttcgatctcttaacccgcagtgtttctcgtcgtgtgatggcgccatggcggctgtctcgtagttgtgtgtgttgtggctctggtagatttagatcgaattggggagttcgtgcatcctgtccaagaagaacagagtcgatcggttgtgtcgttgaatgagttgaactgctggatcgcttgcatgaagtgaatattttgaccccaaattgtttgctacgtgcctctatccgattggttttcatgcagtttggattctggtgtgagttgaatttgaatatagaagggagaactttctctgaaattctgaatgctgcgtttcgtttctgatgcatggactgatccgtcagtactgatgccttagtctgttgtttggttaactaaaccaactacctgcatgtctgaattcttctgcatccgaagcattttcgtttcagatatgcatgtggactgatacccagtatattgcattcttcagcatctgaagaatttcatttcagagatgtatggacttactgatttggtagatgaagaagaagacggccacggcgatgatgatcgtgacgccccggccgaccgtgacgactgtgcccgtggcaggagaagaggtcgccgggggcacaacaacgaccaccccagggctaatcaaaactggcgatgcagggattgagacgacgacgattggaatgaacggggacgagactttgggcgtggccgcggcgaacaacgtgcgattgatcaagactaccgccgtgaacgcacacgctccccgcgccagcgcgacaggggagggcacagtcaccatggcggccggcgtcatcacgctggtgccaccgacgtggacaacgtcaccgatcctgtctaccccgagccacacctggcagagatctctctgccttcccgccagcaggagcttcacaccgaggtttgcatatttcgattgctgcatgctttgcacacttccccgttcaagatgcaggaaatcccggcgtgatcagctgcttcgcctcgcgcttgtcgctgataaggccatggctgcgccacctccgacggcgatggaggacctggccatccggtcttccactgggactgaagcctggttcagcggcacggcatggaagccagtgcctgttgcgcgtgtctttggccgtatcagggaggccttgccggccacgccagcggtcgaaacgccgacaacctaccagcaaattgaggaggcgctgatgcgccttgagctcgctgccgctgcagctcgcaccccaggcgatgacactctcctaccacagcccatgtcaccggcacctctcgcagcgtccccgcctcgccgcttggaagatctggccagcgacgctgtggccgacaagattctgccggctccgctccccggggcgctgcttccccaagagatgacccatatgccagccaccccgcccctgtggcgctggagcggggctcgctgccggaacgcgcatcctcgccatgcgccatcgcgggactgttcacttggcctccgccggctatcattgcgtcgccgctgcgctcgacgcttccatgtctgcggccggtcgtcctcacaaggaaggtgaagctccggccgaggcagcatagccaggcaatccggcggagtgagcacctcgccaagcaacctgcaagaccgatgatggagaggtgccagcgcatcctattcaggaggttgggcatcctccatgacgaagaagatgcctccgtggagcgcgttctcagccagtacatggccatgtttgatgggcccctgccgccgcacgccatcgccgccttgacggcgatcttcggcctcgacgacgatgatgagtgcgccatggatgcctctctgctcccccttgtgggcgaagggatcactgatgtggccgatgaagtggaagaaacgctcgcttgagcagcgcctgcgcccgcggattcggagctgtcgtcgctccatgtatcatcggattcggagctgtcatcgctccatgtatcgtcgccgtcttttcttttgcagctggcgtgccgccggtggcctgcgtgccgcctccctagcatttctatggaacctcagctcttggagcacatgtcggtcagaacttcgtttggcttcaccctgcctgctgtcttttttcctgcttgcgccgcgcctcgtccgccgccggcgtctgtgtgtatgtgcgccgctgtgacgaaggcagaaatgatgacgacgacgctagcggctccccagccacgggccatacctctcgctgggccttgcttgggccttcgcgctctcgctcgggcctcaacgcgccttctaaggccgtcctccatcttgggcctcgttgggttgcgcgtgcaacgacattcgaggccgacgccattatggccacatgggatcttctcggctcaagtccccttcccctccctcgcgccaagcaggccgtgctccaaccccggctgggcctactcccccaatcaagagtccacctttgatttgcagatgtcgcacagtctagatttcattagttggaatgtgagggggctcaattcgccagcacactgcaacacggtccacgagatgatgttggatacgaagtgcaacctagcatgcctccaagagacgaaacttcagaacatctacgacggcctcgcccgcttcctgggtggctacaaattggatagctttgccttcaaaccggccacgggcacgagagggggaattctcatcctttggaacagtgctgtcctcgtcctacaagatattcgaatcggccgcttttcgatctcagcacaagtgacggtcccactcacaggggctaccttccttatgaccggggtgtacgggcccacgagacaccggcttaaggatggcttccttaggcacataaggcggctaaagcccaatgctggcgaagggtggctcctattcggggatttcaacatgatctaccgagcaagggacaaaaacaatggcaaccttaatctagctcgcatgaggcgctttcgagcgacaatcgatcgatgtgaactccgcgagatccccttgcaaaacaggagattcacctggagtaatgagcgtcaaaggcccactctagtgaagcttgatcgttgtttctgcaatgagaactgggatctcgccttccatcaccatgtcctgcatgccctcccaacagggccgtcagaccactgccctctcgttctttcaaatcccgctgccccgcgcaagccgcgcccctttagatttgagaacttttggacacgcattccgggtttcaaggacatggtcaaggctagttggacccaaccatccccgcacacagagccgatgcaccgcctaaattacaagctacagcgcacagcttcttgcattaaaacctgggctaaaagtctattcacggaggtgaaaattcagtttcacatggcactcgatgtcattcagcggcttgatgtggcccaggaacacagagatctctctggcccggaattgcggctgagagctgccctaaagcgcaaaactctgactctcgccacgatagagagggcaaggaaaagacatgcttccaggttgactcatatccgtgaaggggaggcaaacataaagttttttcacctcagggtgaatgcgcgtaggaggaagaatagcattcaaagacccagcaaagaaaatggctgggcagtcactcacgatgagaaagaaatgaccattcttgaccacttcgcccatttaatgggtcggccggggccgaggccgaatgagctcaactgggaagctctagacatccagcctttcgacctctctaccttggaagagcctttcttggagcaggagatccaccaggctatcaaagagatgccagttgacaaagcgccagggccgaatggttacactggtatcttctttaaaatttgttgggatatcgtcaaggaggatgtttcccttgtcttcaattccatcttcaacctccgctacgccagcttgggcctccttaactcagcgaatattgtgttgatcccgaagaaggaaggggcggagagtgtttcggactacaggccgattaatctaatccatagcatagccaaaatcttctccaagctgctggcgttgtggctgaggccccacatgcactccttggtctccatcaaccaaagcgccttcatcaagggaagaagcattcatgacaacttcctctttgtgaggaacatggccagaagatttcaccgtacgaatcggccgatgctcctcttcaagctcgacatcacgaaagcatttgattctattcgttgggactacttgatggcccttttgcaacgcctaggcttccctgtaaaatggagagactggctaggtgatggctaggtgacctcctatacacatctacctcgcaagttcttctcaacggcatcctggtcaaagaatcacgcatgggagaggacttcggcagggagacccgctgtctccgctcctttttgtcctagcaatcgaccctctccaacgtctccttacaaaggcaacagacctgggttcgctctctaagcttcgaggcagaatgcctcgcctaagaacatctatgtatgcagatgacgctgccattttcgtcaatcccacaagaggggatgtccaagcgctcacggaaatcctgcaacgtttcggtacggccactggactcgttaccaacttccaaaaatctcaagtcgcggccatcaaatgcaataacattgatttggacgacgtcctagagggagtcccagcagtgagagcatgcttctcgatcaaacctgggactccccctgatcctcgggcggatgcgaaaggcggacatgcagcacatctctgataagatcacagggcgtataataggatggagaggcaaaaacatgggacttgccgggaggtccacacttttaaaatcagtgcttacggcgcagccaatctacttactgaccgctctgaaaacttcaaaggaagccttggagtgcctagacaagcagcggcgacgttttctctaggctggcacgggggacatcacgggtggaaaatgcaaagtcaattggacaaagacgtgtctgccaattaggcaaggaggcctcgaggtcctgaacctagaaagattcatgagagccctgcgtctacgctggctgtggcatgaatggaaggacccaaacaagccatgggttggtctcgagatcccctgcgacgaagtagacaagagcttgtttgccgcatccactaagataaccattggtgatgggaatatagcgcgattctgggacactgcgtggattgatgggagaagaccaaaggacctcatgcccctagtatatgcaatttctaagaagaggaaaaagaacctgcgccaaggaaaggagaatgatgcctgggtaggtgatttggcactggagacaaacccagtaattacagtggcccttgtggagcagctggttgccctatggactgcagtctgcaacgtgcagttagaagaagaagagtcagaccaaatcgcctggaagttcactcctcatgggcactactcggcttcatcggcctacaaagcgcagtgtgttggcgcgcctgacacaacttttgactccttgatctggaaggtctgggcgcccggaaaatgcaaactccacgcttggcttatcatacaaaatagggtttggacctctgaccggcttgcgactaggggttgacaaaataatggcaagtgccctctctgcagaagagaatatgaaacggctttgcacctcgtcgccgagtgcaggtatacgagacggatttggaacctcgttgcgacatgggtagggttccaccagctagaaccccgacgctggggggtggcgcaatcggtcaaagattggtgggaaatgctggcctctgtgtctggcgtccccaagaagggactccgcactctgattctactcatcgtatgggaagtctggaaggagcgaaataggaggatatttgatcataaggaagccacaacctcgtatctcctttcaaagataaaagaagaggctggcatgtgggccttggcaggtgccaagcgtcttggagagatcatctcgcagtttgtatagtgtacagctttccttgtttttttgctttttctttacccctaggggttgtatttttctcctgctatattcaatgaataagcacattcttgtgctggttcctttaaaaaaaaaactgatttggtgggacaagtttaacccaattcttccctgcatgtgttcttctttcttccgcatcatgtagccatttagctaattggcgcagtagttgtgtttgctcactcaactagtagtggtctaatgcatcatgtttgtgaatgctaagtgtttttaccggttcatttggaatgcatgactttatatggttttgtatatatgaattaattacttcatttaccataaaaatcctgtaagatttcttcatttcagaaggtggctaactacaaaaaattctttgagggaactatcaacaaattaattaacctcagttgccaattgaatataatagtgtttcctttaaagaaattgattaagctcagttgagtttcttcgcacaaactctgaacaccttcttaaaagttagcaatttattttacaaaaggaaaaagtacgaattacccccccgaactatcgtggtcgaccgaattaccccccgaaccacaaaactggacattcttcaccccccaactatgcaaaccggacgaattacccccctggacccaatccacggttgttttagtctacgtggcgtacgcgtggcagtccagtcagcattctatttattaaaaaatgtgggacccacctgtcatacactcatactctctcttctctttctcactcttcctctctctcttctctttcactctctctctctcacagaggaggggcggctgggcgccggtgtccggtgggatggagggtgggcgggaggcagcagccgcgaaggagctggccggcggtggaggtgggggcgccgtcggagcggcgaggcgaagggggcctcgagccgtctcccatctggtcgtcctcctctgccaccagcgccgaccacgccggctcctcccctggcccgatggggatctcgacgtgcgtgaatcgcgtggccggaggggcggctagcgggcgtcggatcacatcctgctgctgcttcttctatgtgtcggaaaggagcatgacgatggcgacggggttgcggtcacggtggtcctcgagcaccttggtggccttgcgcagcgcgtcgcagacgcagacggcctaccctggccctgggcggcggcgcagtcgacgaggcggtcgacgatctggcaggcgggcggagcgctggccctggcgcgtcatccaacgcagcggcaggaggcgccggaaaaggcgacaatggcgaggcggtcggattgcatcctgctctgagctctgtccgagatggaggggggaagcagcgccgagctccgtccgcccgcacgcgcgcgagctacgtccgcctgcacgccgccgagagggaggggggaagccgcgcgcgagctacgtccgcctgcacgccgccgagagggagggggggaagccgcgccaagcggccgcctctctcttcgtcagttagcgggcagtggcgtgcaggccggcggccggcacgcatggcgtgggtgcgcggggaagggaggtgggcggagccacgcgtgcccgcggaggcggcgatgacgcgcgtgcccggcagaggcggcggagccgcccgtggccaccataccccacggagttcacgccttgcatgcttctgctcaaggaccgtgtacgagcgcgagcaggaccatgcatgctgctgggtgctgatgaagtgatgccttcatgcatacgaaagctgcctattcctcgaagctctcggagcgaggtagccctttgccggccgcggaggcagccatgagctcgggacgaccaccattttttgtgcatcgtccgccagaggcggccgtggaggcgtccatccgccgcacggggacgaccggccatggtgctgctagtgcgcccgtctcgccactgcgggagggactgcgatgcagtcgtgaggctgcggcggcgcagtcgcggaggcaacacgagggttggtcacttggtcgtggcggcatcacgcgaagttgttgggaatagtcccacattgctaatctagggggagttaaaccaacttaaaagtggggggagcccctcacctcttgagctagcttttggggtgtagcaaggctttctcccggttgggccaacgtctcccggtttggggccaacaagtggtatcagagccaaacccacaatctctagtgtttgtgcacactcagggtagtgtaagcccaaagcccagtggaccgcgggtgtgaggcccgtatgtgcctgtgtgtggggccggtcagggctaaggggcaccaatgtgtgacgaggaagattgttgggaatatagcttttggggtgtagtaaggctttctcctggttgggccaacgtctcccagttttgggccaacaggagtgtgtagtaaggctttctcctggttgggccaacgtctcccagttttgggccaacaggagttggggccgcacgcggccagcaccatagcggagccgcgtgcgcgcccaccgccggcccgcccctacgccgccgcccatcgcccttccccgctccgtgccatgcgtgccgctgcccgttgaatgacgaagatagaggaagagagaaagaggggatgatatgtgggatcctaccattaaaaaaataaaatgctgactgaactgtcacgcgtacagggtgaaaaatgtccggttttgtggttcaggggggtaattcgatcgaccgtgatagttcagaggagtaattcgtattttttcctttacaaaaaggaatactctagttggtactatctccttttctagagatcaaagatgagtgatgtggcatcagtcgcctaatgatgaagagcagtactcatatcttgcagtttgcaggtcaagtaaaaggaaaaacatggcgtgacatgatcacaattcacaaactctttcggcttgcacactctttatcttggtgcatatggctgcagaggaacaatagaattttcagtggcagctacgaagttagcagatgtagtgcacatgatcacaaacctgtgcaaggcctgagaggaagctttagctacaatgtactagttttcatggcttctctgcgtttcgttgttgttttttctgctttctcgtatcaatgaaatggcagagctcctgcccctacactcgatgaaaaaaaaatatggtgtcacagaatatttgctaaaatatccatattactcctagtaatcaggcatgttccttggttgctccggtgacttcttagaaggaaattaagatggtgaaaattctcctaactatgaaccacttgttaattgttactagcatcagttactgtaatccatcattatgccggagtccgagttgatttaataaatcttaagcggtgatacgatccccaacgatcaaatcaaagagacaaatatatacagtaggagtcttcagagaaaaattcaaaatatgtaaacgtgaggaaatttttaccaaccgacaaaagaggagaaaaatgggagcaatgtactgtatgacaacatggtcctcataaatgggccgaatctattacaattgccacagcctctggcccaacgtggcccgcaaaacgcagccgctctcgtccagctggcgtgccaggtaaggcttgcattgcagtagaaaaaaaaaacgtaacggacacgaaagcgagcacgcctcctgacccgaacccgctcgccggcggctatatataccggcgactccgacctctcagtctctcaccgatcaatccatctcgtgtgccacaccatccacggcaagaagagttagggctcagcaagagaaagcgatcgagcgatggcggaggagaaggggaaggcggtgatgccgatggaggtggatcaggtggaggacgagagagaggccgagacggtggtggaggcggtgcagaaggcggtgtacgatgctttggagaaggtggagatgatggaggaggagggagaggccgcggtggcggaggcggcggataagttgctagaggaggcggtggagaaggcggtgacggaggcgttggaggaggcggggtgggacgcggcggagaaggcgttgtccgatgatttggagaaggtctcgctggaggcggagagcgctaggatgatcaccctcgagagctccgacggcgaggtggtcaaggtgaaggaggcgtcggcgaggctgtccaagaccatcgggaacatcatcgatgacggccgcggcgacgaggccatcccgctcccggacgtcagctacaagaccctcaagaaggtggtcgagtactgcgacaagcacgccgacgagaagtccgacaccgacgagcagaaagaggagctcaagaactgggacaaggccttcatcgacgagctggccgaggacgacgactccctcgtcaaggtcatcatggcctccaactacctcaaaatcgatggactccacaacctcgcctcccagtgcaagaccacccgcgagcagatcggcaaggcctgaaacatcgagatcgagctcggcgacaaggaggaggaggaggaggagacccgcccggagaacgtctgagtcttgaagtaatactcactaatctcttaacccgtagtgtcctcgtcgtgtaatggtggttctctcgtagttgtgtgttgtgcctctggtagattcagatcggatcggggagttcgtgcatcttgtccaagaagaacagagtcggctgtgtcgttgagtactttgtactgctggatcgcttgcatgaagtgaatattttgccccgaaattgtttgctgtgtctgcttggctttcatgcagttagtcttcttgttaaatatttgctctatttctagctatctactcgttcgcatctggttcgatgttgggattccaatccaggagattcggttgcagatttgcaacatttctcagtggtcagtgctcgatcgatcaggggatgtgtttcctgctcttgagtttgtattgggtgcaagtttggtgttgcattttgcttggattgtggttcggattaatttgagaaggggaaaaaacatcgttgcatttttatctggaattctgaatgctgctttcgcttcagagatacagactgatctgttcgaaatgatccatgcgtgtctgaattttcttctgcatctgaagcgtttcgtttcagatatgcatatggactccctagtatgttctgtgttgcattcttgtgcatctgaagcatttgtttcagaaatttggattgatcctccctaagtatgttatgggtttccggatctgaagcatttttcgtttcattgatgcatggacagatctagcagaagaatgttcttggtcgtttggttaagttaacccacttcatttccctgcatgtggtctgctttctcaagcattattaggatggtgtcctactgtgttgtttggttcataaaatttctgtacgtgttctgaattcctgagctctgctccagattagttagcaacaatccaatgcctgaacttttgccttttgttttgagacattatgagagctacagctacagcacctttgcttccttcttgtgtgtgttccatgtaaatttgctgtacaattgtaaatctgcttgagttggcgttgtctctgaacttgtgaacaggggattgcacagtttcagtcgacatgtacatttcttaaaatctggaacttaattttagagagaaaactgaagataactaattaccgtgtgattcaatgtaatccgagtttaatgctgtgtcagcagaactccaggtcactaggccttatttgggtgcctggaaggattcccagggccagatatctgtttgaatttcattaaaggtagaggacatgttcaattttgctttgattctagtgcaaaatgtactaagtggaaaaaatgcatcgtcgcagttttgtctgaatgctgcatttcgtttcagatatactcagtacgtgcgctttcaccaggagagtatggaggatgatgcagggatggattggaatcaatttcctcttgcctacagagaacgaaccagccctggcagattggtggatgaaggcgaggatggcttttcggacgggctacaggagcatcttcgacagtgttttcgcgctaacatgttggctgctgtggaaagaacgcaatgcgcgtgtctttgaacagaaatttcgaagcatagaacagcttgtgcaagatatcaaggaagaggccattgtctggaagatggcaggagtgttcaaaaaaaaaaactagaatattagggaaggacctaatatcaaataattaggaggggtgaggctttgaacccaggttgtctagcccaccaccttgtggagctagccagaagacccctgggcatttctcaatggcaggagtgttcacaacgtgcaatagcgagatcacgtaatatgcattgtaatttgtagaagttttctagcttacgggtcagggattttgccccaatctgttttcgacagcttactgtcgttgtaagctctttaattgtaatgtacccttcctttcttaatgaaattggtcgaccgaacctttcggccgacctggcaaaaaaaagatatactcagtacgttgtccgttgtttggttaattaacccaactccatgcgtatgcctgaattttcttctgcatctgaagcattttgtttcagatagcacttctgtatctgaagaatttcgtttctgagatgagattcatggacttatctcacagtatgttctgagttgtttggtcaggttaacccaatccctgcatgtgctgtgcttctagttgaggcaggattccacgtagttgttttgctcaacttgtgcatcatgtttgcaagttgcaatgctaattgtgtttatgggctcctttggaatgctgaatgcatgaattttataaataatcacttcagttcagctcagttgccaattgaaatcagttgccaatcaaagacgagtgatgtaataagttcagtgctaagttgccgaatgaaataatagtactgcagttttttgtggaaccaagcagcatgtgttatactctaccttgcaatttgtaggttaagtaacaggaaaatggcgttacataatatttggtaaaatactcttgttaattagagccgaactagaaaaacccgtgtatgaacaagctgaaattaggcacattccttggttgctgtgatttcagtgttagttttacccatccacctactctaaaaagaaaattaagacggaaaaatttctatggagtcctaataacggaccacttgtcagtagttcataaatatgccggagacttccacttaaataataattggcgatacacgatcgtcaacgatcattgaaaagaaaaatatatatatactccaatatacagcaggagtttttcagtacgagaaaaaaaaaactccacaaaacatataaacgtgaggagacttgacaaccgtacaaaaaactttgtacagtggtcagtggtgtggccctcataaatgggccgattccattacaaattctcagcccatatacaacaaatcccccttgttccagtcggcccagcagccagcccaatctagcagcccaacacggcctggacaaaacagtagtccgtccagctggcgagccagctaggcttggagaagaggcttgaagcgaaagcgagcacgcctccaccgccggcgaggctatatatatcggcgaccccttctgcctccgacctcgcaccgatcaatccggctcgcgccaccgcatcgcattcgcatccacggcgagcgcttaggtagtcactagtcagtgcaaggagagctagggctcgatctttgtgagcgagtgatggcggaggagaaggggaaggggaaggaggagggagagggctccgcgatggcgtcgaaggcggcggggattctggtggtgccgggtgcggtgggggtggggaatgcgttgttggaggcgttcgcgaaggtggcggtggagaagaaggacgaggtcgcgacggtgtcggagctggtgcggaagctggtgtcggagggggtggcggaggaggtggcggtgaccgaggcgttggagcatccggtgtttgattcgccggagaaggtggtgcccgaggtggcggaggaggaggagagcggcggcaggatgatcaccctcaagagcttggacggcaagacggtcaaggtgaaggaggcgtcggcgaggctgtccgagaccatcgggaacctcatcgacgacggccgccgccgcggcgacgagaccatcccgcgcctgttcgtcagctacaaggccctcatgaaggtgatcgagtactgcgacgagcacgccaacaacaaggccgacaccgacgagcggaaagaggaactcaagaactgggacaaggccttcatcgacaagctggacgaggacaacatcctcttcgtcgaagtcctcgcggcctccaactacctcaaaatcactggactctccaaactcaccgaccaaaggttcgtcgacccgtttaacaccagcaacaagacccccgacgccgaggagacccgcgtcaacctcatcccggcgaacacctcagccacagcctcgacctcaaggccatcaacatcgacctcaagcccatcaacatcgacctcagcctcacactctgcgactaggagggggagggggaggaggagacactgagacactaccggagaacgtctgagtcttgaagtaacactcactttctctcttaacccgtcgtgtaatggtggttctctcgtcgttgcgtgttgtgtctctgctagattcagatcgaatcggggagttcgtgcatcctgtccaagaagaacagagtcggctgtgtcgttgagtactttgtactgctggatcgcttgcatgaagtgaatatttcgccccaaattgtttgctgtgtcttgttggctttcatgcagtcagtcttcttgttaaatgcttgctctgtttctaactctgtctactcgtgatgcttgggattccaaaccaagcgaattggtttcagatttgcagcatttctcagtactcggggatgttttcctgctcacaatttttattgggtgcaagtttgtgttgcgttttacttggattcaggtgcgaattgagttcaggagggtgaaaacatcgttgtgattttcatctgaatgctgcatttcgtttcagagatgcatgtactggtctgttcgaactgtaaaattttgccccaaattgtttgctgtctctgctcggttttcatggtgctagactactcggtctacttgttggcatgtggttcaattcgtttgtgggattccaatccaagggtttggatgcagattagcaaacatttctccgtgctcaaactgaccggggatgttttcctgttcatgaatttgtgtggcttgcgttttgcctgaattctggtgtgaactggacagataagggaaagtatctgctgcaaatttcgtttcatagatgtatttattgattagtaccgatgactaacggatcatcagttgtttagttcagttcttaacagtaactgatccttctttgttgcaaactgatccaactccctgcatgttttctaacttatcagataaagtttcagagatgttgcaaactggtctttctgtttgtctgtctgtatctgaattcttctggatatttcagagatgtttcagagatgtatctgaattcttctggatatgaaacaattcgtttcagatatggatgtggattcttctgcatgtcacaatgtgttgcatttttctgcatctatagcattccgtttcagagatgaatgggcttatctgaagaatcatgcttgtaacttgcagggctaattgtgttcacgggcttgaatacatgacttttatatatagctttcgtgtgaactaattacttcagttaccataaatatcctgcaagatttctttatttcagaaggggactaactactcagaactcttttaggggattatcaacaaataaattaagttcagttgtcaattgaaaacaacaaaattcctagaaagaaaattcacacactctgtacgcctaatttgaaagttcacatgttttacaaaaataatactggctggtacaatactccctttcgagagatcatagacgagtgatatggggaaaaaaagtaagatgccgaatcaaatgaaccaaacaacatgagtgatatacctttcaattagcaggccaagtaacagggaaatggcgtgacatttttcttcttttgattgttgtgccgtttggctgaacctgtactggtatgatcatttctagtaaaagaaatgggggcctttgcccttgctaaaaaaaaaacaatatgctggagactactttatcctcgatttaagcattgaatcgccatcgttgaagagaaaaagaatatattaatacagtatccactacgagttttcagtatgagaagaaaacaacatatacttcgtataaatctaaggatatctaacaaaccgtacaaatctagcccacgaccttctcctctgggccgtacccagcccaacctactggcccagcaaggcctgcaaatcacagtactctcctactcttggagaagaggaaatgcaacggccgccgcgaaggcgaaggcgaacacgtctccgtctccgggctgcgcctttaaccagaacacgtgagccggcggctatatatcggcgaccccatctgcttccggcgatcgctaaggtaatcagtttccgagagcgagcgagagagagagagagagagagagttagggtttcgcaagtgatggcgacggggaacggagaggccgcggtggtggagaaggagggagagggcacgatggtgccggaggcgctggagaagaaggtggtgttggatgcggcggagaaggaggaggaggagaaggatagcgaggcggaggcggaggcggaggcgaggatctccaagctcgtcggcgacatgatcgacaacgtctgcgccgatcacgggatcccgctccccaaggtcgacataaagaccgtcaggaagatggccgagtacatgaacaagcacttcgccatcaccaacaaggaggaactcaagatctgggacgagggcttcatcaacgagcttgacggcgacgaggacaagtactccctcttcaagatcatccgggcctccgagcgcgtcggcttctatggactcctcgacctcgccagcgacatggtcgcccgcaagatcaaggcgggcaaggccatcgacgagatccgcaagttcctcggcgtcgagaaggacttcaccaaggaggaggaggagaagatccgccgggagaacgcctgggccttcgaggagtagacacctggctgttcttcgtcgtgattgttgttgtttcgtaggtgtgtgttgcgtacttgcatctctggtagattcagatcgaatcggggagttcgtgcatcccgtcccgtgcaagaagaacagagtcgattggctgtgttgttgaatgctttgaactgctggatcgcttgcatgatcgtgaataattttgcttccatcaatgctgtttcctgtgtttgcttggcttcgatgcagttagcctccttattaattgttcgctgtctcctctgtctgctcgttggtttggttcaattgcgttgatgtgattccaatccaagagactggattgcagatttgctgcttgatcgatctgggatgtttccctggtcatgaatttgtattgggaagatttttgttgcgttttggattctggtgtgaattgaattgagaagggaaaacatcgttgcaacatttttcagaattctgcatttttgtttcagagatgcattggactgatcctttagtactctgtctgttgtttggtttatgaaccgaacaggctgcatgtctgaattcttctgcgtctgaaggactttttttttttaacgactcgcacgagacggtgcgaagttttattgataaagcaggaaaaaattacaagattacaaccctggagggtcgtaaccaggaaaaaggaaaaaatataccaccacccacacatcaacagcgccaacacacaagcccaatataccaccacccacacatcaacagcgccaacacacaagcccaggagaaggcaagcaccggaccggccgccgctaagcgtgaccgaccgccgctagaccaacaaaagaacccagacgagatcgccccctaggggatgccaaaacgacgtcttcaagaagagaagcaacggaaagaccgccgccgctgtccgtcggggctcaaaggagccaagactgggctttcgcccggcaaccaccctcttgtgaatccacggctggtgccccgatgctccaccaccattcaagctctgccgacatgtgggaccctagcaccggaatgcgtctgaaggactgaagcacttcttttctgaattcttcttcatctgaaggactgacgcatttcggttatgaattcttctgcatctgaaggactgaagcacttcgtttctgaattcttctgcatctaaaggactgaagcatttcgtttcagatatgcatatgtggactgacacccagtatgttctagtatgttgcattcttcagtatgttaaacatttcgcttcacaggagtagttgttttgagttatgaagttagcccaattcttccctgattgcattatgctttcttgtgcatcatgtagccatttatttagctagttgatgcagttgttgtttcgctcaatagaggatcatgtctgcaacttgcagttaggagtgtttatgggctcctttggaatgcatgggcttttattactccagtcaccataaaaatcttgtgagttcagcagggaactaacttagtattaaacacacttttgggggaactatcaacaaattaattaagcttagtcgtcaatttaatcctagaaagaaaattaattggggagtagctcaatatagtttcttcgcacgcgctctctacagctaacttaaaagttcacaagttgttttacaaacaaatatagttggtctctcactttctactagagagatcaaagatgagtgatgtggtgtggtcactagtcacagtaagttttgccgaatgaaatacagtaataatactccagtaagtttgccgaatgtgcgaaactctgtcctgcaatttgcaggtcaggtaaccggaaaatggcgtggcataatattttctaaaatatccttaattaggcacatttcttggtttctatagtgaattttcagtgttagttttacccaccaccttttcttaggaggaaaagttaagatggtaaaatttctccttactagcaccaaacctgaagagattta

SEQ ID NO: 20455 - DNA, 25636 bp, Oryza sativa
  unsure (1)..(25636): unsure at all n locations
tagcggccgcgaaagcgaaagccaacacgcctccgtctccgactctccgcctcctccgcgctataaaaaggcgcccccccataaccccattcggcttggaccactcaccgatcaatccgtctcgtctcgttccactgcttcaccgcgagcgaaaggggagagttggggttttgcgagcgagatcgagcgatggcgacggggagcggagcagcggcggcggcggcggcggatgcggaggagaaggagagcggcagcaggatgatcaccctgacgagcaacgagggcaaggcattcgttgtgacggaggcgtcggcgaggcagtccgcgaccatcaggagcatggtcgacgacggcggctgcgtcgacaagggcttcccgctccccaacgtcgactccaagaccctcgcgagggtgatccagtactgcgacgagcacggcaacaaggagccccacaccgtcgacgagagagcggcgctcgccaagttcgacagggacttcatcgccgagctggacgccgacaaggccttcctctacgacgtcaccatggccgccaactacctccacatccaagggctcctcgccctcaccacccagtgcgtcgccgacaccatcaagggcaagacccccgaggagatccgcacggccttcggcatcgagtacgacctcaccgcgcaggacgagaaggagatcaaggaggaggatactcacgcatgacgcaccagctagctgcccccgtaagccgtagtgtcctcgtcgtaacgattgttctctcgtagttgcgcgttgtgtctctggtggattcagatccaatcaagcttactgcctttgagttcgtgcatcctgtgtccaagtagaagtgtagaactgagtcggctgtgtcgttgaatgcttttgcaactgctggatcgcttgcatgaagtgaatattttgccccgaaattgttttgctgtgtccgcttggcgttcatgcagttagtcttcttgttaaatgcttgctctgtctctaactctgtctactcgtgatgcttgggattccaaaccaacagatttggtttcagatttgcaatgcaacagttctcagtcctcagggatgttttcctgctcacaaatttttatcaggtgcaagtttgtgttgcgttttgcttgaactcaagtgcgaattgaattcaggagggagaaacacatcgttgcaattttatctgaatgctgcatttcgttttagtgatgcatggattggtcctgttcgaactgtaattttttgccccaaattgtttgctgtcgctcggttttcatgcagttagactactcggtctacttgttggcatccaacccaagagtttggttgcagattagcgatatctctcagtgctcaaacttaccggggatgttttcttgttcatgaatttgtatgggttgcgttttgcctgaatttctggtgtgaactgaacagagaatggaaagcgttttgcaaatttatctgaatgctgcatttcatttcatatatgtatgtactgattagtaacaatgaccaactgatcagtttttggttcagttctcaacagtaactgatccttctgtgttgcaaactgatccaactccctgcatgtttcatgtttgcaacctgatcagataaagtttcagagatgttacaaactgatccttcagtatgtctgtctgtttggttgattgacccaactccctgcatgtatctgaattcttctggatatgaaacaattcgtttcagatatggatgtggattattaccctagtatgtcacaatttgttgcattcttctgcatctgtagcattcagtttcagagatgaatgggcttatatgaagaatcatgcttgtaacttgcagggactgtgtttacaggcttgagtacatgaattttatatatagttttcgtatgaacaaattacttcagttaccataaaggtcctgtaaggtttctttatttcagaaggggctaacttttcagagctcttttagggaactatcaacaaataaattaagttcagttgccaattgaaaacaacaaaatttctagaaagaaaattcacatactatgtaacctaatttaaaagttcagatgctttttttaaaaaaattcacgcactatgcagtaaccacaaaagctccaatgttgcgccgtgagccaaggaaggggacgggactagtccacaaaagctccaatatcggcatgtccagcaacctctgagctgctctgaaggaagaagaaacaactctagcacataccagttatatttgttgttgaactcggagtgaggtcataccactttttttagataatggaagcttttattgaactcagtcaattacatcaaggtgatccaattatcctgagaacacttccggcctatgcataactaagatgcacacagccgaacaaacaaaaccacactcgaaaggaaaaaagaatgacatggagtattgagaaccatcaatctaacgaaggaccaccaattctaagactagattgtcacctatatctctgggtaaaaaactccttgaccaccttctccaaatgttgacatgccgcaactaccatatcccgtgaaccaggcttctgtaggatagcccatgtacaaagccaatggataagagaatatataacctgcaaaggtgaagatatgatttttttttatcaaaaaccacattattcctgcatagccaaagcgaccaacaagtagcaactgctcctaacagaacatgtaatttcaaattatgatgaattccatcaaaccagctcccaaacatatgcgctacacaatgtgaggtcataccacttgacatagatgttctgatgcatgccctcaaaatgaggcaattacagatgtaactggtccaggattatttatattaattgtaatcaatcgagttgtaacctcatttattattcatatagcaaggtatataaattgagcaagtttcgagtttctagtaaaaacaaataatatcctagactagaatatgatgatcatatatcaaggttataacatatcaactccataatactccctccgtcccaaaataagtgcagttttacactattcacgttcaacgtttgaccgttcgtcttatttgaatttttttatgattagtatttttattgctattagatgataaaacatgaataatactttatgtgtgactaaatatttgtaaatttttcataaatttttcaaataagatggacggtcaaacgttggatacggatatccacggctgcacttattttggaacggaggtagtatatcttacaatctttgtctaccccaatgctgtgcattgggcgagtcaatcttgtctaggactaggtatatagtgttccatgtaagatatatggcgcctagtaatagaccacagaatgagtgtgtcttgtggtgagaaagacggtggctggcacagagatatccaatctcccaaacaactctcaataccaaatctgcatccggattcccccgtcgaggcatatcctttatgaaagtatgtacctggaaacacgcagatcttaggggaaacaacacaacactcaaagttaatttcataattgaaaagatcagcactgaaaaattccatccaaaatacatcaagggcaggccaagacgaagcaatcaagcaactcagaaagtttgtaagttaatttgcaacggtgatcaggatgtacaaagaaattaaacttttcccaaaaaatattaaaataaaactagtaccggcaaataattagctagcccatgatttagagaaaggaccaacgaaatgtaacaaacttgacatatatctagacaaaattaactaaagaaggtcctaaagctacaacgaaactaactaggggatacttgatcaaggaaataactcgactagggaggaagatgcctcccagctcttaaaaagaaattaaaaaaaacttgactacggaggaagacaaatttcgaattttaactcacatgtttgtgaaaatatatataatagattgatctatcttgacaaattttttgataaattttttagtgtcatgcataaaacggtatatttacgtctatgcatgctgcgtgcgatgcgttgcacttgcacgttgcacgttgtaaccccacccaagccgtcgatcaggcctccggcccatccgcccgcccgtggcagcgttggggagagtcgaccgaccgacgcgcccgccgatcgatcgaaaccatatcaattcgttcgcccggcgggtaaaatgcggtacatatgttcctgttgcgtgccacgctgggagtttcgatatatcgatcctgcgcaatcacatgctacagtacataatcacgttagcgtcgtacctattcccggaaactctaatggcgagcgatcgccccctagtttccttttttagcaccacattactttcctattttagtaaatttatacgtctaaagtttatacacctcaagttacacatctaaagtttagagaccaaaaatttatatatccgattaaaatttgaatttgaattcaaatatttttttatatatagtatttctatacatctaaagtttataagtcaaaagtttatataccccgtttcaaatttgaatttaaattatatctgattcaaatttgaatttgaattcaaatattttctatatatagtattttcatacatctaaagtttatacacctaaagtttatagatccgaagtttataattaaaagtttacatacccgatttaatttgaatttgaattcaaattttttatatacagtatttctatacatatataaaaaaacgtgtgtgaagtggtatggacatgatcgtgggtcacatggtctcgatcatgtgcgtggggctttttcagttttgccgtttctgatcgcgcatgcgtccgtcccgcgatcactcgcgtttcaggaggacccaccgcttcctgccaccgagtcggccgtcgtcgtattcttcggtgtatctttttttttttcacggtatatatgcatgtcacttgtattgtaaagggaggggaggcaatcattctagcaacacaaatacaaaacatctctagttttagtctttgccgatagacaccgtaacttctttaatttgctcgtagaaatcttaaaagcatgataatttgctgaaatatagtgtatnnnnnnnnnnnnnnnnnnnnaaactttaggagttatagaaagggattgatcgccaaaataaatagcattggggagagatgattgccctgcgtcgtagctcactgctatagtaccctgatttactcacacgcagactacttaactatcgtatcatgtgggccccacatgtcagcagcaaactctttccttatctctcacacagtcatcctccctttgctcttcactatcctcactagcccgggaggcatgctgcgggcggcgtgcacaggggtggtggccgatagtgtcctagtgaactcattgcaagataaaaggcaaaatccctcctctctcctgtcacagtggaggacgacagtaagaacggtgaggctaagcttagacggagaaagcttggggacgtgcggagctcgagcttgatgaggtactccaagcctggggaaggttccaacaaggcttggggcagcttgggagctcaagctcgagcacccctacgactacttgctctcccccaccgttgaatcggcgccgacagcgaacccacgaatccttcgtcccaagatctcaatttaggctgtgtttgtttggagttgttctcaactctcccatctcgttttctgcgcgcacgcttttcaaactactaaacggtgtgttttttgcaaaagtctatatacgaaagttgcttaaaaaatcatattgatccatttttgaaaaaaaatagctaatacttaataaatcacgcgctaatagatcacttggtttttcgtgctcaggagatgggttcccaaccccctccaacgaatacagccttattttcttcgcacacactctacatctaacttaaaagttcataagttgttttacaaacaagcatagttggtctccctttctaggttgtgtttagttccacgccaaattggaacgatgtgacggaaaagttagaaatttttgtgggtaggaaagttcaatgtgacgaaaaagttataagtttgaagaaaaaagttggaatctaaacatggccctattagagagatcaaagatgagcgttgtggggtcactggttatagactcagtaaattttgctgaatgagatacaatataatagtacttcagtaagttcgccgaacgtgcgatactctatatatgttgcagtttgtaggtcaggcgtgacgtagtatttgctaaaatatccttaattaggcatatttcttggttgttgtaggtgaattttcagtgttagttttacccatccacctgttcttaggaggcaatcaggctgtgttctttatcacctgctcccaatttatatcccttattttctgcacacacgcttcccaatcggttaaatggtacacttttttaaaggaaactatatgaaaattacttaaaaatattcatactattttattttttaagtttgttttagctaatgtttaattaattatgtgttaatgtattgcttcattttgcgtgtggggatgtgaagtttccaaccttcacctcacaacgcaacctaagatggtgaaatttctcataactagcaccaattactgtcgttcatcgatactaaacctgaggagatttaacgtacgaattcttttcccagccgaaaaataaaggaatatgggagcacgtacagtacgatagcatggttctcaacatgggccgagtccaatacaaattctctgcccatggaccacaaccttctggcccaacacagcctgcaaacacagaaggttctcgtgcagctggcgagccagctaggcttggagaggaggaaacgtagcggccgcgaaagcgaaagcgagcacgcctccgtctccgcctcctccgggctataaaaaggcgcccccccatttggctcggaccactcacctatcaatccgtctcgtctcgtctcgtctcgtgccagtgccactgcttcaccgcgagcgaaaggagagttggggttttgcgagcgagagcgagtgatggcgaaggggagcggagaggcggcggcggccgcggcggcggcggaggggaaggggggaggagccggttgcggcggcggtggtggagatggagggagaggacgcggtggtgccggaggcggtggcggcggatgcggagaaggcggaggagaaggagagcggcagcaggatgatcaccctgaagagcaacgagggcaaggcgttcgttgtgacggaggtgtcggcgaggcagtccacgaccatcgggcacatgatcgacgacgactgcaccagggaagccgtcccgctccccaacgtcgactctaagaccctcgagaaggtgatcgagtacttcgacgagcacgccaacaacaaggccgacaccgacgacgagaaagcggcgctcgacaagtttgacaaggacttcatcggcgagctggacggtgacaaggccttcctcttccacgtcaccatggccgccaactacctccacgcccaaggactcctcgacctcaccacccagtgcatcgccgacaccatcaagggcaagacccccgaggagatccgcacggccttcaacatcgcgtacgacctcaccgaggaggaccaggaggagatcaaggaggaggatgcctgggccttctgaggagcacgcacctgccgcgtaattgttctcgtagttgtgtgttgtgtctctggtggattcagatctgatcagcttacctttgagttcgtgcatcctgtccaagtagaagtgtagaactgagtcggctgtgtcgttgaatgctttgcaactgctggatcgcttgcatgaagtgaaatattttgctccaaatacttttgctgtgtctgctttggtttcatgcggttattcttctgatgagatgtctgctctgctctgcctctaaaaactactctgtctactcgttggcgtgtggttcattggtgggattcggtttcagttttgcaacatttcggagctcgatcgatcggggatgtgttcctgttcatgagtttgtatcgggtgcaagtttgggggtcgcttttttgcttggattcttgtgtgagttgaatagagaagggggaaaatgtcacgccatctgtttcactctgttcttcctttctaccgatctctgttcgtaacaaaaaatcgctgcaactttatctgaatgctcaatttcgtttcagatattcatggactgaccagttagtagtgaccccgtatgctgttctgttgtttggttgattatttgcgcaactccatgcatgtgcctgaattcttatggatctgaagcatttcatttcatatatgcatgtggactgaccctccagaatgttctgcgttgtgtgttcttcagaatctgaagcatttcgcttcacagatatatgaactgatgtcccagtgtgttctgacttctgagttgtttggttaaattaaacctaattccgtgagttgtttggttcaattaaaacccaattccatgaacatgttctgctttcttacagatcattcagttgatatcccgctgtgtttgctttataaaatttctgtacgtgtctgaattcctcagtgctgatccaaatgagttcgtgttgctttgagaaattatgggctgttcgttgcacctgttgctttctcctgctctgtgtttctgagttccatgttaaattcctgcacaatcgtaaatctgtttgaattggcattatttctgaacttgggatcagaggatttgcacaatttcaatttcagttgaaacacgtgattcttactatctgagactaatagggggcaagcttctgataattagacagtgatttctgctatgaattgaatagagaagagaaatcctcgtttcaactttatctcaccgctgcattttgtctcagagatgcatggactgaaccattagaactgatgccttagtattcagtttgctgtttgctgataaaactccctgcaaaatttgtctgaattgaattcttgtgtatatgaagcatttcgtttgagactgatacacagtatgttgcattcttcagcatctgaagcatttcgtttcagacttcagagatgtatggacttactacttaagtgtgtcgtgagttgtttggttaaattaagacaattcagagatgtatgaacttactactttcttccgcatcatgtagccatctgcccatctagctacttgagcagtattccacgtactagttgttttgctcaactagtgcacatttttgtaaatgctagtgttgtgtttacgggctcctttggaatgcacgcgttctgtatggttttcgtatgaattactacagttaccatgaaaatcttgtaagatttattcatttcaaaaggggaataactattaaaaactcttttgtgcaactatcaacaaaatgattaagttcagatgccaatagaaaacgataatattccaggaaagaaagtaattaagttctgttatttttagagaagttggctaagacccccgctgcaaggcggtcctgtgttgtcgttttgttctccttctctctgttctcccctgttctctccctcgacagtttaatgccgatcttgtaaaattgtaacatctttctttcagtcttaataaatttaggtcggccgcctccttggccgtcccggcaaaaaaaagtttcttcgcacacactttatacagataactgaaaagttcatttgttttacagaaagaatagttggtaacttggtatctccctttctagagatcaaagacgagtgatatgggggtcactggtcacagtaattggctcttgtccagttgttgttgatggagccaaacaacatgtgtgaaataatagtaatactccagtaaatttgcaggtcaagtaacaggaaaaatggcgtgacatatttcctttgttactgtagtgatgtttcagtgttagctttatccatcaacgtaatattaaaaggaaattaatacgataaataattctcataactatgaaccacttggttgttattactagcatcaattactacagttcatcaatatgcccggagttctttctcttcgatttaaatcttaaataatggcgatatatcaccaacgatcaccgaagagaaaaaatacataatatgcagtaggaattttcatcatgagaaaaatacaaaacatatcaacctgaggagattcaacaaccatacagatactcttcccaagggtgggaaaaaagaaaagaaaatgggagcatatgtactgtacggtaacatggtcctcataaatgggccgaatccagtacaaatttctcggcctatagaccataaccggcccatcattatgctcagccagctcggcttgcaggagagtaaacgtagcggacacgaaagcgaggcaccgagcaacgcctccgctacaagaaatttcatttcggacccgatacagtattgtttcggtcgaaatttttatttttattttctattgtttttataaatttggtaatattttgattaaatttgatcaacatttgtttaaaattttggaaatttcggactttcaaattccgtgacctcctgaatcggtgaaactgaaaaattaaaccccgacccgaacccgtaatccggcggctatatattggcgccccccatcggcctccgacccgatcaatccggctcgtcccacctcacccacggcgagcgctaggtagtcagtgagagaagagagccaagttgatcagtgagcgcgagagcgagcgatggcggccgcggcggcggccgcggcggaggaggaggaggagaaggagagcggcagcagcaggatgatcaccctgaagagcaacgacgagaagctggtcgaggtgacggaggcgtcggcgaggcaatccagggccatcgcgaacttgatcgacgacggctgcgccgatgtcatcccgctccccaacgtcgactccaagaccctcgcgaaggtgatcccgtactgcgacgagcacggcagggcgaactccggcaccgacgaggagagggcggcgctggggaggtttgacgcggacttcgtcggcgagctggacaaggacaaggcgtccctcatcgacgtcatcatggccgccaactacctcaacatccaggggctcctcgacatcacctgccagcgcgtcgccgacacgatcgggagcgccaccgccgagaagatccgcgaggcgttcgacatcgaggacgacctcaccgaggcggagaagaaggagatccgcgaggagaacgcctgggccttcgacggcatcccgtaagccgtactgtgtcctcgtcgtcatgattgctgatctctcgtagaggcctagctgtgtgtgttgtgtctctggtagattcagatcaaatcagggagtttcgtgcattttgtccaagaagaacagagtcggctgtgtcgatgcatgctttgaactgttggatcgcttgcatgaagtgaatattttgccccaaaattgtttgttgtgtctgcttggctttcatgcagttagtcttcttgttaaatgtttgctctatctctagctgtctactcgttggcatctggttcgatggtgggattccaatccaggagattcggttgcagatatgcaacatttctcagtggtcagtgctcgatcgatcggggaatgcgtttcctgctcgtgagtttgcattgggtgcaagtttggtgttgcttgcttggattgtggttcggattgaattgagaatgggaaaaaaacatcgttgcgattttatctgaatgctgctttcgtttcaaagatgaatggactgatcggttcgaactgatccatgcatgtgcctgaattttcttctgcatctgaagcgtttcgtttcagatatgcatatggaatccctagtatgttctgtgttgcattcttctgcatctgaagcattttgtttcagaaatgaatttcaccatttggattgatcccctagtatgcatgttctgcgttgcatctgaagcatttggttcagaatggtttcagatatgcatttgggttgatcccccctatgttctgtgtttccggatccgaagcatttttcgtttcagtgatgcatgtacagatctagcagtatgttcttggtcgtttggttaattggcatggacgcatggtaggattccagtccaagagatttggttgcaggttttgcaacattttagtgctcgatgttttcctgttcatgaatttgtatcgggtgcaaatgtgaaagtttggggttgcaatttgcttggattctggtgtgatttgaatagagaagggaaaacattagtgcaaatttatttgaatgccgcattcgttgcaacttttcctagtatactgcctttggttgattaattgcccaactccctgtatgtgcctgaattcttctgcattcgaagcatttcgtttcagagatgtatgtcccaacatgttctgagttgtttggttaaattaaacccaattccctgcatgtgttctgctcatgctttcttccggattactcagatggtatcctgctttgttgtttgatttacaaaatttcttctgaactcttctgtttctgtagatgttctgaattcttctgtgctgattcaaatgagttagcaactagccaatacttggctcctgttgctttgagaaattatgactgttgattcacctgttgctttcttctgttttgtgtttctgttccctgttaattgctgcacaatcgttaaccggtttgaattggcactaattctgaatttggggacaggggatcacacggctacacaatcgcaaatctatttgaattggcactgtttctgacattggggacagcgtattgcacacttttagtcgacatgtacatttaaaatctcagcctatggcaaacttaagtcacttgggtgcctggaagtattcccaggcctgaaatatctgtttgaatttcataaagatgaaggatgtgtttagcttgcagaacataaaagtttacgattagcatctgcttctgttgtaattctaacaaaaagatcagatatgctttcctgcatcattcagaaatcagaataacaacagcctgcatgcttcatttttctactttattctgaatgaaccatcccaatattgtacaaactaatagcaatccaggaaacagtgagaaatggcaccacgggcacggctatagaagtcaacattagcagatctctccctaaaagagtcactgataaatcacagcgcaatgcgcatacaaatcacagcgtttcagaaactagatcatatgtggtaaaaatcttcagaggtaatagtaagaaagcagaggtgcagcaaccgtggctacaatgagcatcgccgagaccggagattgggccgccgccgacttcggtgaagatggcgtgccggtggccggtgttgatcctgacccagaaccggaagaagatggtgcgggtgctgcaacattgatgcagaattgtgagatggccagataccacatatccaagcaattataatttctaaaagatgaattggtgaatacatgtcagcagggcagaatatttcattgggttcagaactccaggatccaaattttttgtttgtaattagtagaagaagtcagaaaatgtttatcaacgcaaaatatcttcttatcagtcatgaggtcttcggagagctttcactttcagacctcacattgatttcagaagtcagaactttcagataactttagataatgaatcctcatcaatgtgcagtagatggtgagttggttaccccacagaaagtttgttcagttcttttttagtgtgcatgatggattacaaaatttggctgccaactatgccaggcaccacaacaaccacaacgccaggtagcaggtacaccacttgcatagagaacataataatgggaaaattctactaagatgatcagatctactagtagtactagtagcgagtagtgactaatgaggagaggaagtcatcaggaaggaccagccatctactctgctgatgatttagaatttaaagtttcttttgttttttatcttgttttacttttttcatttttaaataaaaatgaccattctctgggacaaatttcagttatagggagcaaaactgaggataattaggcaggaaatcctttatttgattcatttacatcaaaattgaaatcagatcgacaagaacaatcagacagggattcaggattttgctttacctccagtaggagaggcaccgggaaatttctctgccaagaaaaaaaaaagagatcaaattatatacatatacaaactataaatcgatctataaccaagtactactatataaagggaaatgcaaagttttactaaccatagtcacccaaaaagacacagaagaataaaacgaaaaaataattgaagaaacaaatcgataaattgatctataaccaagtactaaagggaaatgtaaagttttactaaccatagtcacccaaaaagacagagaagagtaaaacgaaaaataaacagagatgaagaaacaaatcgataaattgatctataaccaagtactacggagtactatataaagggaaatgtaaagttttactaaccatagtcacccaaaaagacagaagaataaaacgaagaaaaaattgaaaaaaaaaaacagagatgaagaaacaaatcggaggagtgagttggttgtactgactgttgcacttgctcagggcggaggagtcgccgccgcaggcggcggggagggcggcggcgcgggtgtagttgatcttgatgccgaagtcctggccgagcgcgccgcagaggcaggcgacggcggccgggctgcccagcgcgctcttcacgccggcgcagcagtccttggccggcctcgcctcggggctccccggcgtgatgtacgtcaggcaccccgccagcgccgtgatcgacgacccgcagtccgacgccggccccgccgccggcgccggcgccggcgactgcgacgccgcgccgcacgccagcgccagcacggccaccaccaccaccacaactacggcgcgcgacatagctgtgccggccgagcaatcaagaattcaagatggtagctagtggagtgcgtgcggcggggcgagattgcagtggtggtgggttcgcggcgaggactccggcgagattaattataggggagaaagagatagttatcgcggccgaatgtacagggaatcggttacgcgctggatggttgccgggaccatcaatgcggcacgtggcggcggctggggttagtatagtgcctgttcacttttatgctaaaaaaataccttactaaattttaatattgtcaaaattttggcatagttgtcaaaattttggtaattttggcatgattttattatataagttaccaaaatttagtagcaaactaaatatagccacttttttggtaactttatcaaaatttggtaaggttgaaaatatcatcagaatgaataggcccttattaataacacccatttgagtttgactcgttttgaattaattttgggataattagccgtgatatttggtttacgagaattgtttaggtgcattcaggtgtagatagatgccctcttttaaaaataaccgttcagaataaatcattacttccaagttggtcatgttaattctagatgggaatgataccatgtagtacttcctaaacatttatatttagctgggaggacagcagctgacagccaaactccggtgtccagtgtgctacgtgtaacgttgcatgcaagcatgtgtttttccagcggcgactgcacatgccgcagcatcaaatcgggccatgaattagcgtgcaataatttttttccctcgtagtatctaattttatactctcataatataataaggtatttttgactagcagatcactcatcttatttaaaaaattcgtgcaaacataaaaaacgaaaagttgtgtttaaagtactttgaataataaagtaagtcaaaaaaaataataattctaaatttttttaaataagacgagtggttaaacagtgcgagaaaaaactcaaaatcacttatattatggaacggagggagtagaaatagagtagtactagtagagcaggtgcaatagcagactattaaccagatataaacatattttaataaggtaaaagatgagagagaagagcagtaagctacagatctgtggccagctgcagcatgaatttatagacgcaatgtgtatatgacaggtgagaccatatattaatagtatagtaagtaactattgtataaattggctattagattggctatagattaattggagctagtagtgagctatactattaaacttgctattagggaagtgtgagaggatcaaattaggctgatgtgcttatcaactcgggggctgatagtctccggctgaattttgcgatactatgcttttgtacatggttatttctgctacggtgacattatgtgttcttagaattttgaactaaaacgaagcagcaaatggaactgtgccttacatgatgtttactagttttttttgcatacgtatcttatatagcatatccgcaacctgttacgccccaatcctaatttgggtgtggtgggggggggggggagttggaccgtaatcttcaaatcgtgctggtgctgcaaatattagttaacgccgtgtttagttccaaaatattccttaaaacttttaactttttcatcacatcaaaactttttcacacacataaacttccaactttttcatcacatcatttcaatttcatccaaacttttaattttagtgtgaactaaacacaccctaagagcaagtctaatagtacagcccactactagctccaattcatctataaccaatctaatagctaatttatacaatagttacttactatactattaatatatggtcccacctatcatacacactgtgtgtcttggagttcgtgctgcagtggctacagatctgtagctcgctgctcttctctcccatcgtttatctcattaaaatatgtttgcagctggctaataacctgctattatacctgctctaagtgccttcatataagagcaggtacaatagcaggctataagccagctgtaaatatattttaaggagataaatgatgagagagaagggcagcgggctacatatttgtagtcagctgtagcacggactccaagacgcatcgtgtgtatggcatgtgggaccaggtattaatagtatagtatgtaactatgtataaataagctattagattgactataaatgaatgaagctagtagttggctatatactattaaacttgctctaaaccatgttgcaaagctttaataagaaagtttctgggcatcggttcggagctttctccaaagtaaaatgcgcccgctagcgctgatcatgtcagtctgctcaatgccaaaaatctgaaatgggcttcttaagtcttaacatgtgcagataaagtacagctacaaaaggaaaactcgttcgtcacacgctacagcagcaaaggaaccaaattaaactttcgaaaattttccaaattttcgaatttggcaggagtcatttccaagattttttttccaaattttcgaattcggtgggagtctacccgcctcctgacacacaccacccaaataaataacagctggctttggaggaagtgggacgacgaagagaagtggattcttctcttctttttctacaagcacctcctatttgtctgcgtagctagcaccagcctcccaactctcctcgcccccctcctccggaacgtgctcctctaacgtagaggaatctacgttagagggacgtccaacattggcgaaaattcncctcgcngccgctatcattcaacatctgacggtagagagcgggtatagcatatgagaagcctggttggcccacaaacaggcacactttcagcccaactcgccgctcgttggccagcatgtccttcaccgccgggcggcggcacaatatcccacgacggcaccctccgcgtgaggttggcggttcacgcccgcgcagccgcactgtcttcctctccgccgaccgcgattctacaacttcgtcgccggcccagccacccgagcgctatgtcatccagaaggcgtaggcgaagctcgtcgactaccgtggctctggcatgagcatatcatggagatgagccatcgtgcgaaggactttgatgccgctattaataaggctggggctgatcttcactcgctcctcaccgtgcctgacacccacgaggtgctcttcatccagggcggcgccacctcacagttagccgccgtgtcgctcaacctatgcgcgtcaccctgccgaagtcttctccagctcatggagtgacaaggctttcaaggaatccaagaagttcaagcagattatggaatacatcaacatttgcagcatctacggaaacgtacacaaacagttggtgatacttctaataaatagggaaaaaatatccaaggctccaagccactagattagattaaaacagaaagcaaaaaaaaaaaaaccaagatataccagcccaagcaagaacaaagcaaaaccaccctcgacagtcgacaccatcggtaaatcagcaactaggaaattcgcaagcaaaccaagatggggatccggcaccaggaagcctagctaccgttggatgctgaatgaacggagatgcgacgtgggatgtccctctaacgtagaggaagaggagctcgttccctactccagtcctgcaccaccaccgagatggctcgcctcagtaaggcctggtttagttccattttttttcaaacttccaatttttcaatcacatcaaaactttcctatatatataaactttcaacttttccgtcacatcattccaatttcaaccaaactttcaattctgacgtgaactaaacacaccctgtgtgttggaagtttgatttcacgcaaaaattaaaagtttgattgcaattagaacgatgtgatggaaaagttaaaagtttgtgtgtgtaggaaagttttaatgtgatggaaaaattgaaagtttgaagaaaaaatctagaactaaactcggactaagattccttggtctgtgtggcgtataggggtggatagcgagccggctcggctcggataacgagccggctaacgagcagctcgactcgactcgtttgaaagctcgagccagctcgttaggctcgcgagccagaactagtatgctacagagaagtagagaacgcagcagcaacatgaaatggctccaaaattatctgagaaattatcaaaagatataagaaaaagtctacaatctcccatcaagaaactctaacacaacaacaccgaaatctttcaccacgaaaagcaaaatcagaaaagcctcctactgtgacagagaagtagagagcagaaagcatcctttcgtttcttcatgctccatcatccatggtcatgactgacaaggatgcatggccgatggcaacacaggatggagacagggagcagcgctggtgcggcagctcggagtggccgacggcgactcgatctggattggagtttggagatagatgagaggaaggggaagcgatactattctgttcggtagacgcatgcacgggtgactaatgtacttgggctgtcatggggctttgtttatgggccataggtgtcctactgatttatcttatctctatgtgtaagctcgttaagctcgcgagcgagctggctcgttatgcctaacgagctgaaactgtagctcggctcgtttcaaaaccgtaatgagccgagttgagtcaagtcgagccgagctcgtcatgagccaagcgagctaacaagtcacaagcttttcgtccagccctagtggcgtcgtgtttctcttatccattgctacgcgtactggtactggtgttgtgtacttgtgtggcggtgttgttttctttttctccgttgtgtgtggagacgatttgatccgatcttgggtgagtttctcccgtgttctcgcgggcgtgaaagaactgatgtttctactgtgtgtgttgggttttaccatgtggtgtagtgtggtgcgcgtgaacgatctgatgttgttgagcctgcgcaagtttgctcccttctgtgtgtctggtctgaagaatctgggtgttttctcgatcgctgattttagttcgctctccgatgctgctcgctaggaactgatcgattttagccggcttttctttacgtcgttgttttctgcttcttttcaccgttactgttgttttctactcccatctctctatactatatctatacggcatgaaggatttctcattcgctcatctttttttttttctaaaccaaaatcactaggttgtaagaacgaggcccgtttgctgggtagagtggacagcgtgttttctccctcgtttgtgagcgccacctttctctacggcattgtggtcggactcagtctgaatggacgtggacttatttcccttgtccatccgatcgaggccggagtcagttgcacaccggagagagcgttcggcatcggtactgggccagataggtggaagacgacccatccagttggcctcgcgagcattgctttgagtttttgggtgttgcgggatgttacctcatgattgtgtcgcatctgtccatgaggcgtctccctgatctatactcactcacccgagtagcatcttggctgatgccacttgtcttcctcgtttcgatcgagtcgtattttctgaggtcgctacattcttccaggtactcccaaggaggctatctatatgtttttatttcttcaatgttcatccaaatctcgaaatgttgatagatatggtgttcagagcattgagtgggtcatcttcaccgtcatgacgaccgtcgtgctcatcggtacacttgtcatcattctcgtgagtctctgttatatttcttttactcagtattcatatccgtgaattcgtattgatccgattgatttttttttcctctcagcttcctgttacacagaagggaatgatggaggaggtgcccctgccccccagtatgaagagatcagaggatatgatacgagaaagcctgcaccttctatttccatttgtacaaatgaagagatcagaggatgatacgagaacgcctgcatcttctatttgatcttgtacaaattttaacggattatgttaattccctacttaggatgctggatgtgaccgtggttaggagttgagatgggaggatttggcgccacaattggtccatcaccatgcggtccactgacatcctcaccatatgccgcgaagccttttgtagttcacttgacgttgtttcattcttttgggttttcccattttttattaatttcagttgatgttgtttcattcttttggcttttgggttttcccattttttattaatttgctacgtaattattttggggctccaaggattcttttcttctttccaaatatgattgtaccaaaattcggtagctgcttgtgcgattgtgtaccaccttactctgctaatgatttatacaaagtttctcgcgtggtccatcttgttactttcgttaaagaaggccattgccagaggcaaattcacttgttggctgtcacctaaacgtgttgcctgttagctgcatcctgtggctttcttctggcttagatgtgccatgtgaattgctacacaaccgttagtcagtttgaattggcattgtttctgaatatgggaaaatgagacattttgaggggcagactgaagacaattaggcacgattcgtttatttacccatcaacacaactaatgttgcctactattgatttatttcagctcatagtagctttgtgtgagattcagtctagtgctgtaccaacagcatcaagctggtgggattcccaggcctaagcctaaattatatgtttgaatttcatataaaggtacagaaaatgctcaatttgcagaaccgaaagttccactcatatcatttatttactcgtattataatccgcttctgttgtaattgtggccaaagctcaaatatgcctttctgcatcattcagaacaatagtctgcatgcctgcattttttactttattctgaagggggcataccaatattgtacaaactataaatctgatagaatccaggcaatagtgagaaatggcatcatggacagagctaaaatcaacaataaatcaatagcagaaaggtctctccccaaatgagtagccaataaatcacagcgaaacgcgtatacaaatcacagtatttcaaagtgaaaaggcaacgacaatgcaatcgagacctgcataagaatatgcacctgctcaatttccccaatcccatcgaaattccaattcaaacaactcaaggcacacaagaacactgcaccaaaaaaggcccagctaagggataagcattaaattatcaaaaattaaagggacacaacaatgttttgaagaaacgaggaggcaaaagacgcttattgcttaagcagttttcacttttatttttgtcacggcatattcataaagtaatgtctgtggaccaaaattttcagaactgttcaaaaaattctagacctatactctatccatggcatcagaagtcttacattgaaatgaactaatcatatttcaatacccaacaaaaccagttaaacagacaatacatctctagttttcttcagatgaacaagtgaaatgtactatctaaaacattaattcacatggcagctatatgagcagatttaagctttgccttccacaatatgattacaagatagtactccaaataactgaagctagcatcctggtgcacaagaacaaagacagaggaggcttttcattctggtgacattccaaagcaacaaataactgaagctaaccatatgcgaatcactcgatacagtagagccaactacaattgtatctctgtaagcccccccagacaagtcaattcagctaatcagatataccatccagtgatcccagaccactaaaatagacattattgcgtgattcaacaagataaatcagtaactaggcaagctacaacaatgcaatcaagacctgcatcttcttatacacctgatcaattgccccaattgcatcgaatttcaatccaaacaaaccaaggcacccacaagcgtagcatcttcgatctaaggataacagtaggaaccaaaaataaaaagggcgaacccgttcttccgctcgggatcactcgagcgcgacggcggcgccggcggccttgagcttggcggcgagcgcctcggcctcctccttgggaagcccggatcgcaccacgaccggcgcttctccacgagctccttcgcctccttcagccccaggtccgtcaccgcgcgcacctccttgatgatctttatcttcgccgccgcctcgtacttctcgatcttgacatcgaacgacgtcttcaccgccgcggcctcctccgcgccggcggagccggaggcggcgtctccggccgcgccagtggccgcggcccccgatgcggcgctcgacgtgagcgagaggcggagcttgagccgcaggagcgccgagtagtcgtcgagctcggcaggggagagttccaggagctggtccgctatgcgcgacagcttcgggtcctccccggcggccgtcgccgtcgccgccgccgccgcggtggagaggcggcggagccgggggatcagcggcgcgaatttggaagcgaagagtggcatttcggtaaatcccgggaattacgtggtgaggggttagggtttttttggcccattcgacacgacccttatacgagaacacaaacacgtagccccaaccattccgccttccgatcacgaaagcgtattcgttctggcccgtttaggacgagcctcgtaggctcgaaggcgggtttcagtttttctctgcggctaccggaggcgtattttccgcataccgtggcccacctgtcattgagagtagtggctgttccgctccgagacaaggactcgccatacgactccacaacacactgcctcctgagtcctgactccccccgagcgccagtctctctctctctctctctctctctctctctcctctcgcacgcctcggcggagcggagcggagagcaacaaaagcgcaaaaaccctcgtagagatcgaaaccgccgcggcggggtgggatcgcgtgttccgatcgtgcggaggcctcccgctcttatcgagaggctttcgatccgcttgcgattttttttctgggatttttttggtgcatttttttcggtttttttgttttccatttcaggtggcgcgtgggggatcggtggattcctggagttgctggtcggtggaaatcgtttctcttcgtgtgcgcgtttgcgtttgttctggggtttttgttttgggtggtgggttttgatccggttgctgcgggcttgtaggttggattttgcggtttgggagaaaggtggtgattcgctccgtacactgttgagatttctctgtgactctgcgttggtgttgttgctaggtgagctgcgagcttccgtccgtttgcgatgtgccgatgtttagggttttacttgagggtccatttgatattccttattatgttttagagcacaatctagggttctagactggcatcattacgctgcatgtaaatgtattatcaagttgggggttagggatttaggtggggatcacttgtgattggggttgaaacctgaaagtaatcggagacgtctgcaatgcgttatgtgtatatgtgtttcgggtatgctgctaaagtgaagtctctaactgcctcatgttgttttgcatgttccttgtgtgcggaaatgtcgtatgtaatgttttcatgcttaatataggaattgttctcagctgtttctcccttgtacttagcatacagctcgtatcaaatgtaaaattctgttttgacatggagcatatcagtataggaatttttcaccagaatctgggagttggatcttttgaagaacaaattttgtctgcatataaactgctacttcatcagaattcctaatgcaagaatgcatatacatggcatgacttaactatatacatacttgtgcagtttcaactgaagattacagttattcagtctgttcttgtttcattataactgtaatttccagttctacatgttagaaggctgcacattgttcctatttaattgtatagccactttgattgtgataagtgtgaatttttggcagtcacaatgtcaacgtgtcctgtgctgaatgaccgaccaattgatgagtggaaggttactgaattgaaggatgagctccgtaggagggatctatctattaaaggtttgaaggatgatcttgtgaagaggcttgctgaggcccttcagggggaggttattgatggcggggaagaaacagtcaatggaactccccctgtggagaatcagacacaagacggagctcttgttttagatgatgcatctggtttccaggcttcagcagaacaaaatgttgatgaaggccctgctgaggttgctgcaaagaatgaaggccttgtctctgttatagaagctagtacagagggcggaactcttgttttagatgatg

SEQ ID NO: 20456 - DNA, 5907 bp, Oryza sativa
ccagtttttggttgcaatgcttgtcatggattcatggcagtattttgtgcaccgctacatgcaccagaacaaattcctctatcggcatatccattcacaacatcatcggctgatagttccctacgccattggggctctctacaaccatccattggagggactccttctggacaccgtgggtggtgctatctccttcttggtctctggcatgacaccaaggacttccgtgttcttcttctgttttgctgtcctcaagacagttgatgatcactgtggactttggttaccgtataacatcttccagtccttgttccaaaacaatactgcctatcatgatgtccaccatcagcttcaaggctcaaagtacaattactctcagccttttttctcaatctgggacagaatactggggacccacatgccctacaacttagtaagacggaaggaaggcggttttgaagcaagaccactgcgagactagcttgaaccgatggaagtgtatagaactccagcaactcagtgagatacaatgctctacctccctttcatatgtttagaacctcatagggaccaatctaacttcgaagatgttgaagctgttcaagtactcccagattttctttttcgcgtcttgctggaagcaatacgctagtcgggatttgggaagacactgaagctcttgcgcgatgcttgttcttacacctgctgttaatctagttagatcggtcacctggaatgtgtgtggtactgtatggtttgtcttgatggcttttctccttgtcatggctattttttgtgcagagctggcatttacattgctgtgcagatagtgtatttggaatcacacttctgtatgtacccccaattatttatgtaactgaatatctgggcatggttggtaacttcaaagttcaaaccaatctttatctactactgtatagtagtttgtttgatcaattacagatcaactttgatggtactcatgtttccatttctaagtgtagcttttacagctgttgaaaaccaaagacctcctgaagcttaagcttgcatgttgggttacatattggttgatctggagttcatttcacttgaggcttgagaatgtttgtgtttcctatcataagatttgtgttttgcaacaggattttaattaaagataattatcatgtccaatcattattttcttgcatatagattcagtactcacggctaccactactcccttctgaaggagtataggcccttggacagtacatcatcattagggatgcaagcgggtcgacccacgagctcacttaaaggttaaataagtgataacccatgggttttcgcgccgtggcctgacttaccatgcctcgggatgcaagtgggttaacccataaacctatttttagattaaattagtaggtaactcacaagtcagttggtgagtacccgctaattttgcttataagcgagcttgcgtgttagcccgcttgcatccctaatcaacatcactgtcatccctaatctcatccatctcttatcgttgcagacggtttaatgggggattaaaacgcaaagcatgggacctctagctattagcggccaaaataggggccaaaatgcaaattggctcgttgcatttggaggcccaaaatctcaaattctcaaggcttcttccaacccacgaagcccccaaaaaaagcccaaaaccagtagcagcagcggagcggggcgccgtggactgacggcgacgtcgccggagaagcagaggcggcggcggcggcgggcgacgaaggcgacatcacaccgacggcgatgtgatccccgcgagtgatttgtgccatcattggatgccacgtcacgcgtcggcagttggcacgtcgacccgcgtcgtctcaatttattaagattaattaattactactacgactctacgagagtggtaagtaacaacgagtcatcgcagaaagcatcagctcacctgcgaagctgagatgagccccaggtgttcttctatttctaccggcaaattcttcgtcggcagaaaaaaaaatcaagagaacactacaccgaaatgatgataaagcaaaatattacagcatttgcatctcatcatctcattaatcatagtaggctgcagtattttgattatttactatattgattagaactttaacacatacaaccagatttggaatttgtgatttaatcccagatgctgtaactcaatagtaaactcatagaagtgaagtaattaatttatgtgtagaagaacaccaccttatttctattttgggagggattatgatcctatatacatagctaaatgatgagattttagagagggagagagatcgagttggcgctagaacccgcggtggccggagtcgtcgacgtcgtcgtcctgcgagtagaagtcgacgatctccgacaggtcggcggcggctgattcgtcgtcgtcgtagcccagcatccccttgtctccggccgcctgcagccacagcaggtgctcgaacagcagcacgtccacggcgaccgccaccgcgccgccgcgggtccgccgcccggccgccgcgaggaggcgccgcaccggcccggcctcgagcacggcctggtcgacgtggaacacgctcctctcccccttcgtcgtccccacctccaccctaatcacatcccccgccgcggaggaggagtcgaggcgccggtaccctccgccaccgccggcgccgccgcggcgggacgcagagcggaggaaggtgtagcagccggcggaggacggacgcggcgacggggcctcctcctcggcctcggcggccgcggcggcgtggccgtggcggcggtggtggtggtggggcatcgccgattcgccgggtttcgtggcttgcgggaggagcgaagcgattgctttgtggtggtggtgtttgtgtgggcgggtgtgtgcttcttttcttttcttggggtggggagcctttttatgcagtgggtttggaactaacggtcggcttacggggcagctcggtttcctccctcgttccatattggatcatgtgatttttggtttctttttcccttacattggccttgattgtagtgtgcttttttgttcttttgtttttttgaatttgttactaccttgatccaaaatgttactccatccctcccaaaattataggacccaaattataggacgtcccctttttaagaaaaataaaactcaataacttttgactaataattttactaactatatctatactgagtattattgagtattatgcatgttatatcattagattcatattttaaagtactttcatgtgatgctaattttatattcgttgggatcatagaatgaaataaaatattgattaaagtatgttattgaatatcgtgtaaaaaatataggtcttataatttgagacagaaagagtactatttcgtaccggataatgacgtatcttaattctacgaatctgacataggtaataatattttgagatgaatgtagtacaaaactttcgacaatttttcttcaaaacttttagattttcaactctctaagattcgtgttggaaccgaaggtatcaactattatatatgcttcaagatttgtgatgtatttctaacatgagtgcatccatgtgagtgtaattttgtgtcgtaagatctaaatttcagtgggtgaagttatacaaatatgattccaacgcgacgcttgtagtgcttcttttccctgatttttctgcatttttcaacacgaataaaaactagtacaaagcactttgtaaaaaaaaatcgtgcatttcaaacatggcttcgctaacaaaaaagtatttccacctaaccctactttgaaacaaaacaaatcattcaaagctaatttacaggtatcggctcaattcatgcgtcatttgcaaaataagttctcgatctttaaagagatttcactgtttagacaggttttgcaacaaactggtactgttcatgaaatgctacagtggccttggtgccatcaaccggacacgtaggttgtgtgtgttcattagagttggcgccatgtgcaagaatactgaagtagcaatggctcggtttttcagacaaccactaatcaccgcactgatctagtactccctatctcctaaattataagacataagacatatattttttatacatggtatttaataatatacttggatcagtattttattttattttatgatcctaataaatataaaattaacatcacatgaaagtagttcaaaataaatttaatgatataacatatatagtacttagtatagttatagttatagttaatatgattattagttaaatctatcgagtttaatttttcttaaaaaggggtgtcgtataatttaggaagtattcttcttataatctactgctccctatcagggtttcaaatttcaaaattagggtttctaccgagggggagcgatagaaccgaaatttcagaaattttagaattttttcgtacgaatttttttgaaattttgactaattttgaatggatttgaataaaatttgaccaaattcacaaaaatttacaaaaaaaccgaaagttttgggcgagatatgaacatttcggtggggggcgaaatttcggaaatttcgaaccgaaatttcaaacactgctccccataacttgattagcttaaggattagtacacgagcaaattaacgtcagaaagtggttgttagccggaaaaaaggctcctcggattgaggtaattaggccaaaaggagacccgctcaaattccaaaatgtttggtggagtatataattagggcaactagttaacagtaattttcaaggtgcaaaatcgaacgaaatgtcgaatcgtatttattacttcagacagaaccagtctctggggtgtttgggagagaggggctcaaaaacataagtcccaggctaaagtttagcctctctcttccaaacaccctctctagctacgtgttgtccatttggaatctgttaacttcagctggcagaggtataccatacccatcattcgcgcgttacatcgtcagtttgcgtgcaatcaactcatcgtccatattacacttggacgcataatcaaaggaacataaattaattcaaaaaatttgttacgacactaaacatatactgtactacttctatgtcgatcgaactgccacgtaaggttaccatgcttattatattcgattattaatttgttgattaattaattaaagagtctggtttaattagacgtacgtgtgcacacacgttgcgactcgtgatatgtttttataaattttaatcaggcagctgctgcctacgtggcctggcacgtggcgtcgtcgccggctgcctcgctccctgctccggcgaccgttcctccgggagacccacacgtgcgcccgacgtgtacaaccgccgcgaagaaaactcgcagctaatccatgctctagttcacctcttctactctcgatctccatcaccgattcaccgatcggtcgagtagggcagccatgggcggatcaaggaacaacaatggcgggaaaacggcggaggcggcggcggcggcgagcggcacggccaacaccgtcgtggcgctcgtgctcctcctcgtcgccgcgtcggccgtcgtgttcttgctgtcgccgccgacgccggcggcgacgcggatcggccgtcacggcgacggcggcccccgccgcgagccggtggagctggccatcgggctcgccggacacgagagctggctcgacgccgtccgcgcctgggcgaagctggcctgcctgaagctccggccgccggagccgcggtaaatctcactctcatcatccactgtcatgtcaatcctactcaggtcatgtcgatgaaatagcgttattggtttttgatttctttaaacatgtttaatc

SEQ ID NO: 20457 - DNA, 11855 bp, Oryza sativa
tcggcatatttagcgaaaaaggcatatagcctagtggttatagtgacctgagtagcacccccaagtttataagttcaaatattcataggggccaatttcaaattgggttatttaagggctagttcttcttcattcgataggctaattttctatttaaaaaagctggatatatccggttggatatagaagccggctaaaaaatacatttctctaaataaaaaaaataaaaagtttatgtaattattaattattttattataattattttattattaaaatactttaaacgtacttatacaaaatttttaaataagataaattggtgaaacatgtgtttaaacgttaacctttaaaaaacgaagggattatgtatatattttgcaactagtacatgtatacatgttgtgttgcttgtgtgttttttgggccagtgagaaagtggcgtggtgctgttcgaggaacggcgcggcggtcgaggtgtgtattctcacggcggcgtgtgtgtgccaaggtacgatctgcgcagcccggcggcggtgaaggcggcggcgaaggaggccctggagatgggcaaggtggcggtggagcacgccgcagagtcggcggcgacggcggcggaggaggcagtggggaagaccacggtgaagctcaagaggaagttgtcgccgccgacatcgccggcgggggggcgcctcgacgaagacctgtgaccctgtgttctgtactgtaagtgtgacgtgttgaaaatgtgcatgcttttaagttttgagtaaattccctgtgtacccctgaaaactcactcaatgccttccatatccctgaaatttacccgatcccttctatgcccctgaaatttcagtttgatccctttcatgcccctaccgttacattttccattatttcactgttacgtttggttgcaaatgtcttttttgcccttgatgctttaggtttaaatgtaagcttcaaaaacaattgaaaattttgtttgattgcacagcatgtgcattttataaaactaatgagactaaataattagtgcagaaaattttgacataaattttgaaaataaaataaatgtaataaattaaaatttttatttgaaattttaataggataatagatttttttatctggagcatttataaaaaaaatgttgtgaacattggtagtcctatctttatttgaatgctcctcatttttatgacttttttataaaacaaataaatatgtattttttattttattatctaaaactattttttgggataaataatgcattgcacaacaaactcataagtataatagtctcatgcgagaagcttttatatttttaataatgtaattcatgaatttctttgttcatccaaggttaaaatggtcatttttatagaaaatagacggtcaactgacgggaggggtatgcaagggatcaaaatcaaaatttggaggtatacaaggaagtaaggaaaattcagaggtatagaagggattaggtaaaatttcaggggtatacaagggattttctctttagtttttctgtacccatgtgaattacagtacgatgtgttagcgtcttgtgatggatgatgatgcttggaagttggaaggtggattggagttggacgtattcggcttcagtactttggtttacaatctgcaaaagcaagcataataaaaatgatagaggaacaaacgcactgtttagggcccgtatagttccccaaatttttttcttaaaaacataacatcaaatcaaatctttggatacatacatgaagcattaaatatagataaaaggaaaaactaattgcacagttatgagggaaatcgcgagactaattttttaagcctaattagtccgtaattagctataagtgctatgtttagggcccgtttagtttcccaaatttttttcttaaaaacataacatcaaatcaaatctttggatacatacatgaagcattaaatatagataaaaagaaaaactaattgcacagttatgagggaaatcgcgagactaattttttaagcctaattagtccataattagctataagtgctacagtaacctacatgtgctaatgacggcttaattagtctcaacagattcgtctcgcggtttccaggtgagttctgaaattagttttttcattcgtgttcgaaaaccccttccaacatccggtcaaacgtccaatgtgacacccaaaaatttccttttccccaactaaacacacccttatcttgaatggtgatgggtgctaatcaaccgactaacaatataattatggcgtgtatgtacccaaaaaagtgacagaaatgacgtattatactattttttgaaggataatatagtacaatataattatgacgtattgtactataggagcatttctaaagcagaggaacaggtattgcagtacataccaggacagttgtcttccaatgcatagcaaaggttttaacttcaaaccaggctaaccagcggcaagcaaatggttcagatgcggcttaactacagcataatttcctaatttcctcacctaaatatgtagagagaaagagagattctctcctaggaaactagaaaaactcttctgggagtaattactgcttactactactagtaagtatgcatacaggtgagacacaggagaatatacagaacaaatttgatagtgttgagatgatgaggtcttgggaatggccaccactcattccgggcagatgcttctgaaaatgggcagcctgcgtccattgctttgaccataaagagtttgaattatcaactcttcatcctcctcaattggctctgcctgcgcagatgctggctgagctgaaggtgttgttgcttcatcaggttttggtgttgaaagctctgccctggctgcttggatgacagtatcttcccgtgatcgaatgtcagcaggtggcttgttggggatgcctcgagctgtggcagtaggatgatcggcacttggctgccatggggagaagagagaactgatgtcgttgaagtcttgataacctggagcacctgtctgcccgcccgcctattcagaagggaaaatggtaaaaagccatttattgtcaacagcgtgcaaaataatggtgttagcaatacaagtgccctgaaacaatgatgtttgtaaaccatatagcgtgctaccaatagatttaattgaacaatgaagctgaagaaacatgccaaccatttcatagaacaaatcaggtaatggatgatgaaaagaatagcatagtataaataactggagataatgtgtcctgtatcacaaatcccgacttatcaattacactgaaaaagaaattgtttctaagctcgtaaaacataaggcatccgttaagaaaaatgagaaggaaaaatcccacggtgaagcttaacagcagggctagatttaaaaagttacactggcaagtcgtcattacacatatctgtcgaaaactgtagtagtagttctatttgtataattgtaatgttctctggtcagcaacaaggacaactagtggtgagcaagtatgcaagtgcacaaggaagctaaaagaaaactggattgaaaattgttccttcacttcaagaagattagacaacacatgtctatagtgatgaacaagaaatgcaagtgcacaagctaacagaaaactggatcgaaaattgtttatccacttcaagaagattagacaacacacgtctataggataaatcatgactgtctgattctgatccctatctggatagcaagaacgattacaaaaggtaacatgacagttatgcactatttctcactattgaaacagagggttacttaagcacaaacagaattctcccactctttttctaaaaattctagtagtacactatatttctgaaatgactgaaaatgttaacaggacattacaagcacacatctcacaaaggcatgcaccacctagaatgaatgttatgtatgctaaccggttatcgccttattaaatgcataatcaaatcccatcatacagaataatgaaaacaacaacatctactttaattaatctatcaacgccacaattaaacataaacagttacatgttaattaatctgatgcaaaagatgtattggagacacaaatgccattaagggtgtggcctacatgtaccatacaacatttatgtagaacagtactaaaattagttgacctgatgtactatagtaatctgtttcctgttttctatctcatcaatcactacttcacagttggacttaaaatcgtactacatctgtaatgaagcatgaattgcctgcagaagcatatacacttctatcctaagctcctaatgatccagagttcggcaccagtttttttcttttctcctcccatttaagatagaaggaatgaaatatccgaatcatggaatcaacaataaagctactgcaatgccaaatcatggcattaacaaagatactagagtacatcagtgatcagtcgtgatttttttgcaaccaaatcagatcgtcatatttttatccgattgacccgaaatgcgagcgaaactggatctcgagagcaaatacagtgcgtacctgtcgcttggagtcataccgacaacctccagcaaccaccacgtcgccggccggcggcggcgggtacaccggcgcggactgcggcgagtagacgaggaggcggtggtccaggtcggtggtggccgcggaggagaagcaggcgcggcggtagcggaggagcgagtcgtcgagcccgaggtccatcccgcccgacgacgacgcggagccggagtacggggagacgccgtccacgccggcggcgacggcgtcgaaggccggcgtgaggtaggccctcagcgacggcgacgagaagcggcgctgctgccgccgccgcgccgccgactcggccatccacctgcttccggccggcgaggcggcgacgaaatcgaggtccatcacgacgcccccccccccccccccctcccccaatccttcgcctgagcagcaaaattagggtctctagtgttaaatcctcgagacggcgaaatttaaggaagagaaaatttcggatggggaaatttcaaatatcgaaccgaaaattagggtcactagtgttgaaaaaaaaacttgaaaaaataatccccaattttctctcgatggcgcatgcggccaatcaggcggttactagctcgcgattaatacgcaagtccaaataatattggtttcctgtggatttcttcgattggggaatcgaataaatttttttttaaaaaaacggcacaaatcgtcagcgaaatggcgtcatcacatcaggatagcacaagtaaagcacacatatactattcgtaaaatccaaaaacctcgaacaacagatcaggatctaaaaaacaaaaaaaaaaccttcagaaacgataaaattccggacacgttcgaacctctcccacacaaaagcgatcatcaatccaacaaagaaaaaaaagtaccaaatagcaagctttgattaaacaagcaccgaaaaaaaaaatccccaccctcccaaaaaaaaaatcgttagaatactattcgagaagtcgcagaagagattcaaacattcaaaactcgacggagagtgactcactcgatccgagggaccgaggcggagaggtcggctcacctttgcggccgtggaagcttcctccggtggcgctcgcggccggaaggtcacggtgacgccaccattgctgcgtgctcgctcgctcgggcgggaagtgaagacgaactaggaggaaaatacgaaggagaaaggaggagagcgaggtgggggtagaggatatgtacacgtggcccctacgtctcctcggattccgttattttggaccagggaggcaaggcagtagtggtccgttgttttgggcctggaagcattggttgggccgagcccatctcttggttggtttgggctggttggtattccttttggtttcggccttttctttcctctctttcttttctttaactgtattctcacaaaaggatagatttgactgttcggaaaagaggatatgcttgagttcatccgaaaacatcacaatttcttcatacgtcagttgttggcttaggccccatttgatttcgatttattgggtagattattgtcacagattatttaggagtacttgattataagaataaattaaatattttaataaataaaattaacaaatagcttaagacaagtggggttctttttttttattttgaaagacaagtggttcatataatatactagtagaagaaagtttattatttttaacatacatttttttaaaaaaaattgaagagcaaataatccattttaataatcgttgggcttaatcaaatgcagctcatactattatattgcaccatggaaaaggatggatgcacatccctagacaagtatcacatagaagaatgtatattgaaactggagtactggacaacacagtgagcatcaataaggtaacttcccaacatcagggagcacatacaatactagtagtacctaatatcacctcgccgtataggatcagccacatttgttcagtcagaaggaaactgttaaatcacactacacaccaaaccaatatattccgtacaacatagaaaggttacaagagttaattacacaaagaatagtacttattctatattttggatacaagctgtaaactctttggtacaccatcgccccttttaattcctgtatgatgctactacaacaccgccaatgcaatatgtacaaccaaacaaactatgagactcttaaaacaattgagatctcatatacaaacagctaaacttggatatgagatatccaaacttgatgcaaataggagtatgtcaaagaacctcctaacacacgctgaatagtaggcatgctgagggggcatgcatggcaggcttgggtttagatcccaggcacaccaataatgcaggaaaaaaaactgaaatatacttataacagtttcataggctattaaggagagcccttttgcaagaaggctgctgagaagtgtctggcctcgaccctggcgaggtcaactcaagcacagacagcaaaaaattcctctcctggaaattcaaataaatataaatgtaaatatatttgtcatatggttttttcaggtaagtattatatgttcgatatgaaccggccatatcatatgtcaagcagttgaaagcttacactagcagtaaattttggagtcggcatgtcatctgcgtacggcaggaatgttgggactgtatgagcaggcgaagtgaattcgatacatgaaggattgttacatttgacaacctcgcgtaacttctcagaagctggtgtttctgcatttgcttcaactggggtagttgtctgagcaggggaggctaattgaatacactgaagcctgttatgttcgagaacctcgctaagattctccgatgctgctatttctgcatctgttttagcttgaataactgtgtgtacaggagagctgtattccacacattgaagcaagctatcttcgatagcagcctcagtcaagttttcagatgttggtatgtcttcacctggtttagcttaaagaatttagttcattttctatatgtggtttaaagagcattttaccaaagtaataattaagagcataggttaccagggcacggttccatattattgtcttctgtgctcttatcatttgggcagtcctccattttattgtcaggaaccatttgtgatgtaacttccatgctagtttgtgaagaattttgcttgttctccacatcaatctgttcggtctgctccctgtttgcacagtaatggtagatagtgtcaacaactgagaaaatagatttaaccaaaatgatgaccagatgatgattattaccttaaatcctggtcttcttcctcttcattctcataggggtctacaattaaatcgtcaagatcctctaggagtgaagccattcccgacatactgctctctgacatgtcattatcatctttcttatccaaatgatgctgtagttgctgaaacaggcatagcacagtttatttcaaatagagtacaaggctgcaagcctaagttccaaatttagaacaagttggtgctgtcatacctgccaggcttcgtccatgctttggcttgtattttcagtatttattttcgttgctagggagcaaagcaagtcggctcgctgcaataaagtagcaatttttggatcatccttgttcaaaaaattaccctcatgcttaacgcctgcaattatgcacatagctgtgattaaagctgggacaagacaaatacatcaaactcaaatgcacattatagaggaaaacaggcttacaattctgttcccccgcaaataattgttttgctgcagttttagcaacaagattttgggtatccattgtattcatattatcttgattgttttgataaacaattgcaagaggctgtcgagaatcttgtgtgctcttgtcttgtccaactaatctcatatttggtgtcatattctctttgaaatcagaattacatggcctagttgcagaagagaaaaatgtaagttgcttcgcatgcttaatagaaaatagtgatgctagtgttatgtgtacctcatctgcttaataggtggtgcagagccacttgcaccagatgtgagacacccagtttgtaccaatgccctctttgaacttgtactggaacataatgatccattttccttgaatagctcgtcatccttggcccgccttttgcatagagtagaaaaccgattcttcactgcattatcagttctgttgtggacaaacaaacaaaaaacatgtcagatattttattacatgtatttttttcatcttgcagtaaactgcataatacaagaaacccacctgcctgagacaacctttgctatttcagtccatttgttcccaagaactttttgagcctgcatgacaattccaagtagagaagaatacatgattcaatcttgttaaggaatccatggtagaaacaaataattatgaaaacaaccacaaatctatgcagaacaggtggtttagggtttccagtatgcggagttccaagtctgtcagagcataaaacttgcagccaaaataataagaagaaaaatatgacattgcaaaactaatcaatgcgcaagcccatctagacttctcttatatatacaaaaatataaatcctatctcctgctatttacaaaagaatcccattcttttcccaaaaatctgaaaagctgcatacgtacatgctcaattccatgggcatagcaatatgcctggcctgttgtctcactgaggaagtaaccgaccgcatatttgccaattcagaaatctaaagtttggcccaaaagttacatcacaaatggttcctaataataaaatcaaagtgtctgccaaaattcccaaattcatgaaactgacgcatatttgccaaatcagaaatctaagtgttttatgcagcaattcctaacttcagggaaattcagtgtctggaccaaataattaaaatgtcacaatatcaatatcccacctcacacaatagcaagtcctcttctctggaccaccctcctttcttgcactccgagttcaaataattgtaccatctgcagcagtaaccaagcaaagaaaaaatgaacagggcggcatgcatatttcgtaaaaaattcgaacgaaattccaataaaaccactcttttagtcagaggatggcgaggtacactgtacacaccttctcctgcactgtctggccgtcttgtccttgaattgtgccgctataattgtccagctaccgaaaggaaaaggaaaaacagtgtaaaatatggtgattaaatctagaaaaaaaaagtcaattgagatgggaagtgggaagaattcatacttatcagttccatgaagcgcaatttgagtacgaagcacatcatcctcctaacaggaagaaaggtgcaaacatcagaaaaacaatttggtctaaaagttaaacaaaaaatcgcagacgcactcccaaggaaaggttcgacagcatctgaagctaacaattataattatattataattataattaattataattatgtaggcacaagttcttggaaatgcaatacacttttcaaaaagaagaaagggacacatattcaaacttcgactattctcgatgctcacaaatatcaccttagaccaaaaaaaataggcaggagtcgaatcaaaccaaagtccatttagatagattatgcctaactatgtgaaaaatctactgttcgttaggcaaaaagaaggggaataattgctagaggcgtcgagaactaattcgacccccatgttctaggcatcgaaatcgagcgggaaaggcacaaattccaggaagtgtgatgcacttttccattatctaaaaggtacacagattcaaatttcaattatcctcaatgctcacgaagaatattgccttaaaccatagaattaggtgagaggaacccaaccaaaatcttgaaaagtagacacaaattcaaactccaattattctcaatcctcacgaatatcgcctaaaaccacaaaaattaggcgcgaggagcccaaccaaagtccatttcgataggtcatgcctaattacgtgaaaaatccactgcatattagcccccaaaaaaataaagaaggggaatgattgctacaggagtggaaccccaaaatttcaggcaaccaaatcgagcaggaaagcgcaaacgcacccaaaaaaaaaactcccaaaatccagaaacacacgactcgatagaccacgacaactcgtacgcacctcggtgctccaactcacgatgtggcggtccttcttggccgccgacgccgacggcgcttcggcggaggcggcggcggcgggtggggtcagatcgggtccggtcgccatggtccgggatcccgcatgttccgcgcacggatcccggcaggccgaggtaggcagccggcgggcggcgggcggcggcgagccggggccggctagggtttggggaaatgggcgcgagtggagggaatttttgaaccgtggattcgagaggaagacgacgacgacgaccgagttgggttgggttgggtggagaggaggaaacgagagagagggggggtggagtgtgagatgggggtaaagggaattttttgtgcggaagcggaggtggaggggtttttaaagttggtggggggccatatggctgttttgggagaagatgatgacgacgactcgactccctacagaatggcggcaccggcacgtgcaggtttttgaggatggggcaaagggaacggtaaagaatggcagttgtactggtttgtaaaatcaggttacggtttgtaaaatcacgcttctgataggcaacaatggattgcttcctaaaatgatttgtatatggagtaggtgattatcttaaaaatatgtagtaatgattttaatttttttttggaaaggttattaatgggtctattcggcaatgctgctatgcagctgtaacggctgcgctgtacagccagccttatatactttctctatcatgcactgtagcacagctgctgcacagcagctgcaatttagctgcagcgaacaaacccaatagtcttttgtcatttgagagatactcataagattcataccggtggtcgaataatgatatcctaaacccctactaatatattcaagccgtataaaaggaggctatagttgtatttcttgtatactctacctcaatatctattagaattacatatttcctacttcctccattttaggttatataagacgttttgactttagtcaaaatcaaattgtttcaagtttgactaaatttatagacaaatatagtaa

SEQ ID NO: 20458 - DNA, 15064 bp, Oryza sativa
ccacgttcatattgtttgaattagattgtatcatatttaagataccggtaggtgcacacatatttctctcttcttctactacttgttttcttttttggtacctctggtgaattgtgttcatgagttgcatcatgcgtgtcatgcaacgggggctatatatggtgagctcttgtgacttggtttatggtgctacgctcccactacgtttggagggcgaaatggtcgatctaagcataagaatcttgtgaaattggtaagcacactgaattgaaatttttgagttttcatttttcgaattttcagtgtagctagcagatgccttcgtttccatttcggcgcgagttaggattactttgaaactatatgctgttcttatccctgtatttaattggtaagctcaccgccgtgtaactttcaggttgcgtgcgatttttttttcaacaacaaaataaaaaaccgatgagttagagagacagagagcagtcttcagagcaaggtttgaataagacggttctcaggtctttaggttctgaataaatataatcttcaggttttgaataaatatactccatgaaggtctagcagtaaataattaagatggtttgaactgagcatctgtagttaggcaaccttctagttagtgaaagttgccatttatccactatacgtgatagtgacctctagctatattactcattttcaaaggtgatgccaacggctaatttcgaaagtccaagcttcatgaaaactactcgctccgtttcaaaatatttgacaccgttgactttttagtacgcatttaaccattcgtcttattcaaaaaatttaagtaattatttattcttttcatatcatttgattcattattaaatatactttcatgtacacatatagttttatatattttacaaaaaattttgaataagacgaacggtcaaacatgtgctaaaaagtcaacggtgtcaaatattttgaaacggtgggagtatttaatattatactcggcactaccatcagtatcaggcttcagagaacttggcaacaggtagcattgtaaaactgagctgaattctgaaacaaaccgggccaacggccaaccaaccgaagcaaatattcctgctttctcagtcccaaagtaagttcttttttatcccttccgtttatcccaaaataaattcattttgcagcaatcattgcaccggagtttatgaaagtaaggaataaatatattatgagtaggtaaaatgtggaataattatattgagatttaataaagtagatgtattctcgtattttgttttttaatgatatgtgtggatagctgaaaagaattattttgggacagattgagcggtgcactgttccatttcagttgaccggtgctgatcaaaggctcaaagtctcaaatagattaggcatcttgaaaagctaaaacaagtatccttgcgaaaagccaggtgtcacccaagtcagaccctttatagatgcgactaaaacttttaagtccttatcacatcaaatgtttagacactaattataaatattaaacgtagactattaataaaacccatttataatcttggactaattcgcaagacgaatctattgagcctaattaatccataattagcatatatgatactacagtaaacattctctaattatgggttaattaggcttaaaaaatttatctcgtgaattagttttcatttatgtaattagttttgtaagtagtatatatttaatactctaaattaatgtctaaatataaggactaaagttaaatccctctatctaaagaccacctcactcattcgtgcatggtcattgcaatcgcaaagaggcttttgtaatggcaagagctgtacatgtactacttctactgttgctgctcatcagttgcaactgtgatgagcaggcagcatgcaagagtgcagcgcatgtgctgatctgatgtgcattttttgcgaggtgacgaactgcatctgctttttttcccttgctgtgaatctgtttttctgatgagtagagcagtggtcatctttttttggagggcctttacgcctgtcagatcctgtcaggaccgaaagtgtccaacgaaaccattaaccatagagaatcctatgcaaagacggggtcagtccccacctcggttcttggttgtcccagctggtcttcagtcttcacctcggcctctgtggacatgttgcagtcttgcagatcaagtgcatatagcagcagtagatgaaaagagaagtcaaaaaaatgaatagagaagatcgtactaggagtgtacatggtagtagtaactgctgagtatatgtacatgtatgtagtatgggagtagaactacacggtgaactcgcaggtggcttcgggctcaccactacgagaggatcacggtcactcactcactctgcagtatctgcagtagcagtagctaacaggtggattcggtatcatatatcagcagcaactactgtatttatagtactacagacaatccctattattagaaaatatgttgtcatgcaggggagggagagagagagcgcgcgcataaagaagagtggtctatcatgatgatcatgtattctgcgagaaacggtggaatattaactggaagaagcggtgccaacgtcttagggttcgtgttgggagaacgcttcgttctgccacacaatgtgataccccttttatggtcagatgtagagagtgaaggtttggaggagtagcggctagagaacagggaccggatagatggagctaagggaggaagacgaggggacgatgtggctagatctagagggtgggatggtcgtagctagggggcatgatgggaggacattgccatcaccgaccagggagacgacgagtagatctagatggcggcgtcactatgtgagtatgtgaacatatttggatggcgacgacctctatactcgacgatggcttgcatagagcgtgcagaaaagagctcccattgattcaaccaccagcatggagaagtggtgcgatgcggcttctaacgacgagaaggaaggaacgtgtgtcgttggtactcaagatcaaggaggagtgggcttgatcttgagagcggcacaatgattcagcgacggaaggagaacactatatagtgtctagtgacagaagaagtaaaggccgcggcaacaaggttttgccttcgcttggaactcatcgagagtcagaagtaagcgcatgttcactttgatgccattttcaaccataccaattttttttagcaaaattgccaaaaaatggttatgtttaatttgttgccaaatttaatcaatatataataaattctgccaaaattttggcaatattgtaatcttgctaaaattttggcattgacaaaacttggtaaggtttattttggctacaatctgaacaaaccctatgagggaaagagaaccaaggggggcaagggtttaaatgtgatagaattttctcatttgagatttgttttgtaagctaaaaacgaattagaaaactatataagaacttgaattaaaaaaatagaggtattataagaacttgtaagctacaaattttgaacttgaactatataagaacttaataaaaattgtgtatttactttcaatactattatattttaactgtaacaaaaaatacaaaattatgacaattttaagacaattaatttattagaattttttatttttttcgctctttatgtagaatgaatgtgaagatgtggctttacatgtatatgaaatattattgaaattacatgtacaattatttctaaaatttttaataatatttgttagttagtgtgtacggtgtgtatacgtgaaggcttgtgtgtatatgatatgttcacaaacaaatgtggggtgattgaggataagattaggtaaataaaaaattaaatgagtggtgctttggtaagggaagtagttttcaaaagtacttatatttatgtttagattttaaatggtagaaaaagtttatatttattaggaaatagagaaaagtacgaggcttccattttgttcgcccctgcgaattactacaaagaagggaagcacctgccaaaaaatagcgcctgtatatgtctctctcgatgctgtttacaaagaattttcaaatacagaagatttgagtcaccgaaaaataacatactagcagctattatgaggatatgctacgcaaatgcgatgttgtgttagggcctccaaggaggctttggcatcgtcagagcagacgagtagagaaaacatgcagccctatcgtttggcttgtcggtggaataagccaaacaacatatttgtaaacgaaaagtaatttgttaataaaatttttatgtataagttcttagtaatttaaaagcaaaatctgaaaaagcccaaaaataacttcaaatttaaggttaaaaatttaaatttgggttgataagtataaacataggaaaaatatgaggccgatcgactttctgggtttgatttaggcccattcgtttcatccagacacagctgcagcggcggcggccgtggttaactgggccgaaatatcaggcctttcccaaccaagcccatcatttggttcccaaacacttgatttccagaatgtcaattgcagagcagcaaacttagctacagttttgagttgatgagttcaactgttttatcaagaaagcagcattgctgcaagggacagtaataaacattaagcaacaaccacaaaacagcacagcacaaaacacgtaaaacgaacttattttgtccaagaaattaaaacatgtgacctgtttgatctaaggaaaaaaaatgatcaagttgagacatcatatgttggatcatcccatcgtcatttctcttcttgcgcggatcttggtcgcccccatcgtcgtttggccaaatatagataatacgtcattcagtgtattagtaaaataataataatttataagtaagacttttatatatgagttcttagcaacttaaatatcaatgtaaaaaataaagttaaaattttaaaaatcaacttcaaaatcagattttaaaattcaaattttgaccgtggctgatgctgtatggaggagatgacggggcctccgtcacccggaagtactcgccggtatccgtcctccagtaggtgtagcctgtgccatcacgttttggcctcctacttgatttcattataactagcgattagaatctgctgcttgtatttgagtatttcaaagcttgcgactactccttactgagataaacggtaaggattcagaatctggattgcacatcttcaataccaaaccactggcactcaagatagagatttcagaatctgtgacggcactcaatatttgtgaagacacaagtacacaacaggaagtgctcccaaaaggatcataccaacatttaaacgcatccaaaaactgtaccacacatctttactgacagtctaaaactacttctggtgatgagtatcattttcataattttgaagcctacacaccacagacactgcaatatgtaaccaccaggcatgaacatcaagtggaattatactacactacacacaaacatacacaaacaagcctacacacacaatctgtagttctgtactatcaagcatgaacatagaactgtactactgtttaaacactgaattttcagaatgtcattgcagaagcaaagattttgcagcaattgagtctgaaagtttcatttctttcctttttttttctttcagcaagttgcactgcaagggacaatatggttacagtagcagcagcaaaaagctagtacaaaacataaaactttgcaactacagagcacactcaatcgatcatcaaaagggctgttcagagacagatatgatcataccaggaccaggaacccaactgaatgaatgaatgaacagaaccaaaaggctgaaagaaacctacagttgtacacacaccaatcttctctaaggatgtgttcgcagttggttgttcccaaccgggaacagtactcacggaaaacggagcaattcattagcacgtgattaattaagtattagctattttttttcaaaaatagattaatttgatttttttaagcaactttcgtatataaaccttttgcaaaaaacacaccgtttagcagtttgaaaagtgtgagctcctccacgcgactgcacacctcgccggcgtcgagctcggcgatgccgggtcccctgagaagggcgacgcggccaaggaagtccggcgagaggcagaacagcgggaggaggtcccgcgtcaccacgccatggccgccggcgccgtccgcgaccaaggggaagagccccgaatcgtagaggccgaggtggaaggcgaccagctcggcggacctgctgccgcatcgctccatgtccctggactcgtcgaacaccaccatggcctccctgctcggggattttgaactatttgccatcttctttaatggcgcactctcaaatgccatcttcttcaataatgttgattatttgccatccgactctttatattctttctattttaccattcttccctgccaactcagcaaacttgtgtgacaaatgaccttactgtccctcatctcctttcccatctgcagttcgcagactgtgccatcaccggcctcgtcaagtgaagaagctattgctttgcttgtttgcttggtcgattggtaatttggtatatatgcaagtaattaatctggagggttgaatgagtgccactgttgattgctttacttaatgcagcgctcgatcgaaagcttggtctttttttctttagtgtgttttcttctctttatcttcgatgcttcatgttggctctacccgaatatgcaacacgaaagcgctctctgccatcatgggaactttgtcgctctgctagcttgacagttcgatttacctgataactgatgagaattgctcgtccgagcggttgcccgcgaatcggataaaagccaaggtagcggtcaccggtcacgggcagtacgcccttccgtgtaggcagtcgccaactcgccatcgccgtcggatcaagaagtggcgaggtccgcttgaagacggcaccgtcgcaagaagaatgcggaggaagaaccgaaaagacgggggtagtgaagtcatttgtcacacaggcttgctgagttggcaagcaagagtggctaaatagaaacaatatagcaggtcagatggcaaatagttaaagtcatttgagaagatggcatttgaaaatacaccattcaaaagaatggcaaatagtccaaaatccctcctgctcgagtagtaagccaccaccgcgcacgctctgccggtcgctgccaacgctgacctcgcgacgccgtacagatctccgggcgtagccgtgctccttgcccccatcctcagcagcaggcacctcaagttgatgtcctcctgggcgtctgctttcagatatcgccagggaaccattcgacggaatgcctcggcggtggagcaccgctggctctgctggtcggctgcatccttcacaaggtttaccgaattatgcagaatctcgtcatcaacctacaagaacaacagattcagagcatcagaagtggaatgaagcaagagaaacatgaagattcaccctgcagcagcaaccgattcagagaatcaaagaaacgaacaatacgggaaagggagaaacatgaacaggcacctgcagcaaccaattcaaagaatttgaccatgaacaaagcgggagaaaacatgaacattcacctgcagagactaattcagaaccggaacagaaagaattaggacatgaacaaagcgggagaagcatgaacattcatccgcagaagccaattcagaaatcagaaccaaaaatacggagaattttgacatgaagtcccggcgaagaatctggacatgaacaaagcgcagagaccgattcagaaccagaacagagaatcgaacatgaataaatcgggagaactcaaatttcacggtccaaaactcccaagaaccaagaatttgggcaatcattgaaccaagaacaccgccgcgatcaacatctcgcacccaagaaatgcctcaacaacaacggatggggaagaaaagcagagaagcggtggttgtaccctggaaatcatcaggtatgcgcctggacgagccgcctccatctccgccgcatacaagcaatcgctctctgcggagaacaccagcatgccaacgcgctcgcatctggtagcatctcgtagcaggacggtcgctatgacaactccatagcgggtgaagaacgactccaggtgtaccggcgatatgatggaggctacacctccgaacaccagcgctcgacgcaagaaagtggagtcctcgccgagaatcggttgacgctccaagagcgcctcgatgaggtggcgcaagatcgcgctgtccatagaggcggacgcgaagaaggaaagggagggagaaagaatcgctcggtcaggctggaggaggttcttcgtgatcttggtggagaggctactggttcttgatttcttggggagagaagcactgaagcagaggggagggcgagcgagttgggagttgctggagggagtttcagcccgtatttgcgaattgggcgaatacgggctgaaacttcgtggtctaggccgtaaccgttttgcagattaatgtgccgattgcagtcagtatggagcaggaaagcacatattcaggaataaggtaaacacttcttttaggggtgaataagttcgctttacgtccctcaatttgttgccgagtctgaaatttatctgaaaaccgtaataccatgtatagcacattactcaactcgcaaaaccagtacaaataagctcccaaggcggtttggatgacgatttcagctaacgtggcgttgatgtggcatttaaagtcagaaaaaatcatgggacccacaactcaatgagtatttggttaaaaataaaaaaattatagtgggacccatatcatcaccctctctttttcctatcttctctcccttcctcatctctttccctttccttgttgtcgtcggcgcatgccgccgctgtgctcgaccttgccgagtgtttcgctcatttcactctgggtggacgaggtgcacatggaccatggtgcccagtcgtgatgggtgctcagagaagatggcgcgggctcctgccgtgctagggcgccacagggaatagtcgagggaatcgagggtgggaaagggaggaggaagtggtgggcaaacccgtcggagctcgagctcacccgaccgtcgtgtgagggagtgggatggcgtcattgaggagcaactgtgcgacaggggcagtgtgcgcgcggacgaggtgtgtgtgaaccatagtggccagcgggggcaggtggccaagggaggtgaaggtgagaaagggaggggtaggcaactagcgaacccgtttgaggtcgagcttgcctggcctccatgcaagggaggtggagatgggtgagggagggagatggctcggttgaggagtgaccatatgacggggggacggcgtgccggcgtgcgtgtggaccgcgggggtggtggttggaggctagggcattagcaaggcacgggctgccgccattctggaccaccatttgggggggagaggggtcccatacgagattgagcattcattgcgccccgtgccatccctattgccaccgcacatcttcccgcaaccattccacctgtgctacaatggatatctcaacaagactagcacgaatctcaacaaatatatttttcaacggtacaaaaggactcaacattaggggtggattctaaattctcaaggagataccttctctattttttttcatcttactcaaatagttataaaaaattttgaaaaaaaaagagaatatctattaacatgtgatataccactccataaaaatgcaagttaaaattgaatttttacaagttgcaaaaaaaatacaactagtaaacgtatattgacagttaaatatatatttttctgttacaatgtgtagaaattaaatttgaccttacatgtttgtgaagtaatctatcacatactaataatctatcttgttgaatttttttaattttttataaccatttaagagacatataaaacaacgatgagacgtcccttcagaggttttgaatactttcccccctcgacattatcaaagcgacacatatcaaacagccaatctctactagtatattacagtacgtctaatgagttcgagtcggtttttaatttcgttcacttttagaaatacatatgtttatttgattcggtttaatttgttcgcttttagaaatacagaagaagtcgtttaagaaatctctttataaaaaaaaactcgcatgctaacatgagacgatcggactcctaactgaagcttatgattttctaaaaatatatataacgaagtgaattcccacagtgaataataagattaaaatagccttcaccaattgcaacacacgaacatttttttcgaagtagtaaataaataaataaaaccacactcggtagatagagtttgacagtgaaacgggttgtttgataatctttcaaatgctcactcgtcggacaacttgatcttcttggtcgacggcgagtcgccctcgtcgtcgtcggtgtcgacgccgacatggcctctgcgcttcggctcccacgcggcgtcgagccgccgctcttccaggaatcgctccatgaaccccatgacatcctcgaactcccccgcgtcatccgacgccaggtcgaacaccttgctcgacagctccttcatctcctccaccctctccagctttgcttcgagattccgccggtgccgccgcggcatgaagcagtccgccatccgcgacacgccgcggtgggtgatcacgcggaggatgtggcggcacgggaggcgatcgctctccatcttccggcagctgcacgtcacggccatcttcccgtcgtccatgtcgtcggtgccgagcgcgccgccgcggtcgcaccattgcaccacgaagggttcgccggcggcggcttcctgcttgggcgcgagcaggtagatctttacgtcggggctggacatggtgggcagcgtgtcgacgacgacgaagccgtccatcttctcgatctcctcgcggacgaggtggaagttggccggggtgaagcgccgcgcggcgtgcgcctcgaggaactggtgattggtggtcagcggcagccgggacatggaggccgcgtcgtcggcgcgcaggcgccaggtccagtagtcggcgtggcgcaccaggtcgtgcagcgacatgtcgtcggcgaggcccgtgtggaggcccgtggcgagttactccgtccgctggtcgctcgccatgccgaggaagagcttgtggcgggtgaacgcggcggcccagagctccctcgtcgcgtgcatcgtctccagccagccctcgttctcggctgtccggtgtccgccatgaacacgctccaccgctgtcgaacgccgcgggcgagcacgcgtcgcgcgccagcgacaagaagtcgtcccgcgccgggccatcgacgaggtgctccccggcccaccgctccacgtgccacgctcacacgcggtggttggactccgggcacacggccttgatgtcggcgacctccgcgtcgccgccgtcggtgatgacggacttgggcacatccccctggatcgactcctgaacgcgcgcagcagccagacgcacgagtcgacggagccgtccgcgacgacgccgcagccgaacacggcggggcggcggtggcggctcatcccgaggaacgggacgaacgccgcgccgcacctgttcgtccggaacgtggtgtcgaagacgacgacctcgccgtagtagacgtagtcccagcccagcccggagctcgcccagaagatcccctccatccggccatcggcggcggcgaccttgtggtcgtagaatccctcggggtcgtccttgtctttctcgcgcagcgccgcgagaatctcgtgggtttcctcgctctccatcagcggcatctcatggagcatgcgccaccacaggttagtcgagtgaattgaggcatgacatgagatggatcggggataaggagaccgcaacctctcgatggtcgacgacggcgtggaggtggaagaaggcgacgacgccatgggcggcggcgacgggaggaggaagagatggagacgaagcggtttaacggggatatataacggaatatcgagggtattcgaaacgacaagtctaaaatcatgggagtagttaacacttaacatatggagtggtactcaccatttcccattgcatatgtgttcctttccaaggagaaaaccatcccatttttagcggcacgcttgctaggattttcggagcaacattctagataggaatttctttaaaaatttgttttaaatccgcttttggagtagtagccattcattagtattcactctattccaaaatataaggcacaaacactcttaacacaaagaccaagaaataattattataatctttttcaaaatataaggcacaaccactcttaacacaaagaccaagaaataattattataatcttgtagattgaatcatcctaataaatataatgtatgcatccaatagagttagcgaatgtgggagtgaaggatttaaaaaagtagtaatataatgaagaatgtcatacttaatggcatgcatgcattcataccttatactccctccgtccaaaaaaaaggcaaaccctgagtttccttgtccaactttgactgttcgtcttatatgaaatttttttataattcgtattttcattgttgttagatgataaaatatgattaatattttatgcgtgacttgtctttttaatttttttcatatttttttcaaataagacggacggtcaaacattggacacggaaaccagagtttatctttttttgggacggagagagtattatggaacattaaaaaaaagtgtttgtgccttatattatagaatggagggagtatttacctctgcttttggagtatcgcgaaatcagtcagcgactctcaccattcagcatgacacaaacatggtacaacgctttattatatgacaggtataccagagtctcagaacaatacttgcagccaaaatgtttgcattgctcaattatttttatgacagatttctgtaagttcaagcgacagaaaacgagcgctgaaatatatttagagccggttgtacagtccaagcaattccttcagcttcgccgcttcagggctgaggctgtcgaagctgacagagctcggcatcctccatctccagttccctttctgtggatgtaaaaaaaaatgatgtttttagaattactgctttagcagtatatgtgaattatacaaggtgattggatgcagctgttaacctgtgtagctggagtattcattctagcagaactgtcgaggccaagaatgtcctgcatggttaccatggatgtccttgcaactgaagagagggcagcagtgatcagtgcccatgagatttcagtcctattagcctcaggcagatacttgaacacctgaaacaagaaggcgtgaatatgacaatatggttgaaggtagtgtaatatgcctatttaagaaagttgggagacactaacagtctgcttctcttcctctggtaaagtttgccaccaaccaataacctgaggaatacatggttgaagagcgtcagcattctttgtatgcttgtgtcgctagcagcccttgacaagatattgaaaatagacagctttggaataatttagaaactaaccgtgtcattgtcgtgtgttccggtgtatactacttgatcaaattcatggttatggggcaagtgtggattgtcagaaccaccgccaaaagctgaccacataaaagtgggagtacgaacatttagacatcgaatctatatattcaagtatgctcacaatgccttctcaaaagagaatatacacataatctggctttggaacattaccaaactgaagaactgccattccaggagcctcaatagacttccttaggtcaacaacatcttctgttatcaccccctacaaatagtatgagatgatcagataaagcataagcatgtcagaattaaatgtttcaagttttgagtagaaccattctcgactatattaacccgtgattattatgaggaattctcagttaaatcacatttttgacaatctacagctaatgctgagtagcttatgaatgtctggttgcagataaaacttgtgtagctgactcaaataagacttgtcttatggagaaattatgtgaatttctacttccatattggtccacaaaagaaaaaccaatcatggttttattagataaatgtaaaaaaaaaagaatgcttaccaggtcttctgctattatgtttattctaccgacagctttgaataatgcatcaaaaaatgcattcctcggtccagcctactgccaaagaaaaacagaaaagcgtacatcagcaacaaatatttctgaaaaaaataagggggatagcatgtacatcaagtcaatgctcaccctccagcttccaaccagcgctacttttgactctacatgcaccggtaacaaattagaaatttgaatctatttacccaaaaatatgtactcctattatgtagacaggctagctggatgtatttggtttaccagaaggaactgcccaaaaacctgcaagcccccggaaatggtctatacggaactcatcatacaaatcaagggcacgattaatcctttttatccaccattcaaatccacctgcttccatagctttccagtcgtacaatggactgtaaagttgcaagtttcacaaaggaaatgctgttaattgtattcaacttttttcctgatcacattgacagggagcaaaggattacctgttccaaagctgaccagtttcactaaatgcatcaggtggaacaccactaacaaaagtcggaaaaccattcttgtcctttacaccagaaaaaacaatcaagaaacagaatgtatagcattttaagaatccgatgacacatgactatgagggaaaattattgaggtgta

SEQ ID NO: 20459 - DNA, 27459 bp, Oryza sativa
agtacagaggacggaactcttgttttagctgatgcatctggtatccaggcttcaacggaacaaaatgttgatgaaggtccttctgaggttgctgcaaagaatgaaggccttgtctctgttacagaagctagtaaagatagtgcaattgctactacagaagttagtcaggaagcagttgttgccgctgcagaggttagtccggaggctctagttgctgttacagaggtcagtgaggcccctctagttgatgtggccggaactaatgaaaattctctaggtgatgcagaagcaactaaagaaggtgatccagaatctgttccaagtgacagtaatgtggtgaaggaagtatgttcacatgctgaaattcattgtgaggtcattgcagagaagactccagacaatggcagcagcaagaaaatgactgttgatgacatatcatctgatgataccagtactaataccaagttggaggaatcatctgctaaaggtgaaccatgtgtcagtataggctgtgagattctagaacaggaaacgaaatcatcacatcttgatgttattttgtcacatgctgacgctgttgcaagtgcagaggaaatgattacagagagcctgattcttaagaaagattccaatgagaatgatttaatgtatgagaaggaccaaaaggattctgaccacataagcactgactgcaaacccgagcagtctggaccaaaggatcaggtatctgaagtcaaccaagatctagagtctcaaattaagtgtgtgtcaatttctcctgatgatatactagtcaataaaaacgacaatgtagaaggcaacatgaacgctgacaattttgatttaggactagagtctaagcaggatattgtcaagccatcatccagcaatccctcctccgttggtgatgatttgcagacaccagatgatgacaaagagatatctctgatcgacatgtctctgcaagatactgatatgagcttgaaaaagaaagaaggcagtcctgatagtatttatcctgaaaaactaaatttggataggagttcaggagatgaatcaatggaggaggatgcgatggaaactaagcacatggattccaaaacaatacctgattatctcgaaggaaagagtgaggtcaccttagagcatgtgagttcaggagatgaatcaatggaggaggatgtgatggaaactaagcacgtggattccaatacaaaagttgaacatgtgagttcaggagatgaatcaatggaggaggatgtgatggaaactaagcacgtggattccaatacaaaacctgattatctcgaaggaaagaatgatgtcaccttagagcatgtggtaaaagaggtgatcctccttgatactgtcactgagggttcatctgtagatcaaaaggaagctataagtcaagagaagccagtaatgccgactgaaaagaggaaagctgaaggtctgtcttcatccccttacagtgttcagtcatttttgcagtgttatgatgacacctttctgcttttgtttcatttgtttttttctatgctttgatgcacattatctgagatctgtaagtgtccggagtgaagtgcattatatctactgtttgatactagtatgttctatggaacaattgtaccctttttatgctcttttacattttctgtgtatacacttttttaaaattacttaagtaagatttctcatcataatttcacatgcttcagtcctcaagttgataataattgatataaggttgaaatggtctctattttttgttttaactcactgttgaatgcacagatcaagaagttgttgcaaataatgagccaatcaaacgtcagcgcctatggaatgtggatgatgtcaaacctgagcaagcaacttccaaactaagtggttctgatgcttctaaagttgtacacccgcctgctcgaagacgttcttttggcaggtctgattcaacagcacgtggaaattctccgaaggagaggatgggtgaggtttctcttcctttttagtaaagtatatacttcaccattgttaccaaattcatctcttgcctattcatatttcagtaccaccgcctcagaaacctgcaacaacttccttgagaatcgatcgatttgtgcgcccgttcactttgaaagctgtgcaagagcttcttggtaaaactggatctgtttgtagcttttggatggatcctatcaagactcattgctatgtcacagtatgtccttaacttgcaaatatattatgttacatctgcagaatattatcaaaagtgcattcatgcttataaattactatggcatttccacactgcattctttttcagtatattacttcaggcttcaaagcatttcatcatattgctgtctgtactctttgtaatttgcaacggtataattgtattgatttgtcttcttgtccacactgattttcagttctcttcggtggaggaagctctggctaccaggaatgctgtttacaatctccaatggcctccaaacaatggcagttccttagttgctgaattcgttgatccacatgaggtgaaggccaaacttgaaccccctcccccacctccagcacctatcaaccccacagcagctacagcaccttcccaccaatccaaggccaaccaaatcatgcctcctcatgctgctgatacatcaagggggctattacccacaccaccagcacttgctaggcttccaaccttcaacaacgcaccagcgagggagatgcttccgcccgctccaaagaacccagaaccacctgtggtggtgactcttgatgatctctttaggaagacacaggcctctccgaggatctactacatgcctgtttcagaagaggtggtatctgccaagcttgcagcacgcggcaaagggaagaaggcagcgtagggtggctcaaatttgctgctgctgctgctgccatgagtggtacaatttgacacttgaagaggcttttgcaagggttaggtcttgagagccgagaaggtcattttggttgtacatacaactaggtgtagttttctgcatctccgaaactgttagctgttgctcgcccatgccgatctggattgtatgttaattgtgcaccttttgatcgatggagacgatgcttaccttcaatgttgatgaactgggggaatgcatatgtgctaagtcgcagcatttcccccctaaactcgtcgcgcaaactattggttccgtttgtgaacctggcaatgttttgtaatccgttcttctgaactgggtggatggctgcatgctgcttcatcacaaaagaagataaaaactaggtggttctatttgtgttttgttctaataaatcacggcgtgattttgaatgaaaatgcacacaaaaactgtaaaaatgagcctctaaatttgttctcgcaaaaactaaagtaaaaaacatctgcataaattctttgcaagtttgcaaggcttaagataggcttcacaaagaactcgtccatgggccacggcccatgtacttttaccggtttatcggcccaattcgaaccgtaaagaggaacgggtctccgactcctcgtagttttctctctcttttttcctaactcgagtctttttcttctctctacgccagaattatctttctcatctcctccctcacgcaagcgactttgcagtaacaaaccaaccaaccctcctcgccgcggccgccgccaccgcgaagtcggcgacccgtattacgctgccggcagcggaagccctccctaacccctcccctctcctcctgccccgtcgaattgggcgcggggcctcgagatgatggcgtcccggcggggcagcggcggcaacaccagcagctgctgcgcgctctgcgagggatccaacctcccgtcctgctgctcggcctgcgtgaactccaagtaggatgttctacttgtgcccccctgattcgatcagaggttgattgatggcctccgtgtttggattgatcctaactctgtatggtgctgttggattttggggtttgtgcaggctggcggaataccacgcgaagctgcggatgatgaagaatctccgcgactccctcaacgcccgtatagccacgcgcctcgatgccaaggttggtggtgccctgaattctcccccattcccccgagactgtaacaaattaggtctcgtttggtggttagtttccacgtatgatgcctcagtttggactctatgagactatgacctgggtttagttataagttctgcatgtgtaaaatatcttgttgggtcgagaggcgtagtgtgtatctgaaactaggatggcaatggttgtatcgattgtgtctgaatagctgtatgctgtaaagttttggtgtttggttagaccattatcctgaaagactgcatctttgacttgtttatagaggaaaggggacgagcagagaaactggagggtgagcaaggcacacgatatcaaggagctgagggatcatctcgctgaactgaaaaggcgaaatgcgataggttaacaccgtgtactcatcatatgtgttaagatgccaataagtgatactgagttctgattattgaattgatgttcttgcagagaagaagaaagctgagcaggcatcacgtgatctcagagagagaacggcattgttgaatttggcttttgtcacggtatgaggctgtctttcttagtgtttccctttgattaaaaaataaaaccctgacaggttacttatctttcatatatcttgtttctcattgccagctgaaaaagaagcgaaatgattcatcggtgatgcacaccaatgccatgaaagcagcacagatgggtcttgtgagtcatatttgcttctgcttctttacttgtttgattggtgtagtaagacctcatttgttatccattatctatctggcctattttccctgttactgaaggactttatattttgttggcagatggcaactacctcagagcatttaaaaatgcagtcaaaagctatgaagcaactttgcagattgttcccattgcgacgagtaagttttatattgtttttaacagcatgtagcttctactgaaatttacattttccactgtctaaattcacatgtttgtggtattatgctgttatttgccctcttcgtcatgttcaattattaaattttgttacctaaaaaaaatccttttgataatattgtttaaatattctctggagttccattaataaggatttgtatgtattcatttcaatctgtaggttattaaggatggcgaacagaatgatggctacaatggtccatatgatgtaatatgcaacgctcgtctacctcgtggtctcgacccacattcagttccatccgaagaattatcagcttctttggggtacagctgcgcataataataatatattgaaatatactagtatgtgtatttggttctcaattctgtggaacttaacatttatttctttttgttccaggtacatgttacagctcctcagtattgtagttcctatcctagccgcacctgtcctccacatatctggctttggggtaagatgaaattcagtgtcatgactatcaacccttggctttagcatgctacattgggagattcagtatatttgtcctgtagctgtagatgtggatgcatttacaatctgtctgagactagttaggatcatggcatttttatgcaaattcatgcaaatatattctgcatgcgatgcttgtttagatttttatatgcatatgctctcaatcgattattcagttggttgtatggctgatatattcaatttctttataatgtattattaggcttcgtgttcacgtgtatggcagcgtagttcctactggagcacacgacagtcccaaaggtagtatatatgggaaagtgcagcacatctctttctctgcaacacacaaacattctgatgtgataatgttttcttcttttcagcaaagtctacccactttttatacctaggaaaaataattgctctgttggtgaggataattcatggacggaaagtggttcgggtaactttggtgttcaatctgttgattcagacaacaaatcggttcttgactccaagagaagcaatagctttaacttctctattgcatcttctcactccatggagaggcaccaagatttgcaaagaggaatatcattactaaagacaagtgttactgccattactacctattactataactcattgggtatggatgtgccatccaatctttctacttttgaagcatttgcaaagttgctccatatgctatcatcattaaaggtccttcgcacaactcttcaatcgaacgttgcttcaaggtataattaacatgttattggattacaatgcataaatgtatctatgattgcatattcttggttatcaaaaataaaacagaagttcaattctctgttctgcatgcaggtcagagaagcaaggacagcaactaaatagatctatatggaaagcgagctccgctatctcatctaacagcagcctgatggacagtgtgaacacagctataatggtaatctactagtagcctttctttttgctttttatacattgtgtatactttcaatgtggttacatcacaactgataggatctctgctttaatcagcctagttctctggacaacctcctgctgaactcaacacgagcttcctgtatagcggtaaaccgacgaagcatggtggagttccagacaacattttagaaggctgggatatggtagagcgcgacgtcctaccaccaccaccgtcgcgggttgaagacgttgcgcaatgggaaagagcccacaccttcaatcgcactggctccaaaaagaagtgatggttaggcgctcatgtattctctgaagccaggctgttaatttaggacactgcaagcctctgcataggctttcagctgatcataaggtttttggttgatgtacagaactgaccataacctgtgacaatgaatatgcagagaagagggtgtaattgatcagctggcatctgtaaagcaccttcaatttgtaaatatacatgtaattgtacagtacttcctatccaataaaaaaatatagttgaaatgtgcctgctcattcatatgctcattctccacacctgcaactacaaaatgagcaaaatgaagaacatcatacttgtacttggcttgaaaaatttgctgtatgtgtgttcttttgcagcaagagtgaaatacacgctgtaatcagaaaggaaatggtataaatcgcacctacattttttttaatttgaattttagagaagagaagtgatccacgtgtcaccatcgcgaggcgttccctccatttcaccacaaaaaggaaaaaaaaaagacggaaaaactgcgcctccaagctccgacctctctcccctcctccgcgccctaaccctaggccctccgcgtcgccggcgatgagcggcctccgagccatctccaccctactccacacctgcgccgccgccgccgcgggaggctccagtcggcgggtcgctctcgcgccgccgctcggtcggagcttccgcgtcccgtggagggcgccctccgcgttcgtcttcgacgaggtcgcgagggccgcggggggcgagcggaggagggtgtctacgcgcgcagcgagctgggattcggagaaatcaccgtacgagacgctcggtatgatgacactattgcccccccctgctggtgagagctagtggatatgcagttggaatcaggattggtacctggggattttgttgtgtggaagtgtggaacattatcgattttgttatcactgccttcgatacgatggagcttcaatggtgatcagtattggggattggttgccagaatctgatcgtttgatctagctgtttgatgccaaaattgtggattggttgctagtttcttatcgtttcagtgtgccctagtttattttagtttgatatgtactgtgtagtgtggacatggaattagccgtgaaacttatgggtgcgtctttttggtgcggtgtatggttcgaagagctggacagggatgcagatgaggagacaataaagacggcatacaggcgattggccaagttctatcaccctgatggtatgctctttacagttatttctacttttcctatcaagcaatcttctgttcctgtttattgctatcttgccaagttttggttgtaagcctgtaaaaaatccgatctcttgcctggcatactttgcgcagcataaagctatttctgcatgtgtaagtgtgcatatatctagcatgagattttagtggaatggacaattatacaaaattatggtagtgtagagttgcagaatatgtactctaacattatgattcatccattcataagcatcaaaattaagtggtcctcttcaagcctattaaaaagccaaaagggaatatgcaccgataaataaattcaagactaaccaaagtatgtctagcaaagcctggcaaaaaaaaatatgtctagcaaagagaagtgataggttggtagtttacctgctgataaataagtgaagtgtgcaataaactggtgcatggcaatacaggagggcactttttagttgattagtgctatttggtattcatggccaattaatgttatttggtatgcatggcccaatagtttttttttttctgttcattccatctgattattttgtcctcttagtttatgatggtaagggaacccttgaggaaggggaaactgccgaagcccgcttcatcaaaatccaagcagcatatgagctactgattgatgaccaaaggagaaagtcatatgacagagagcatcatgtgaatccaatgaaggtctgggtttctttggccacttattgattattgtgtcaaatttctatatcattttgataatttgaaattgcgagtgttgaaatgtattgcagagaaattttagtcaatagaggcttttctgttctgaaagcttctttttgtccattcgtcaggcttctcaggcatggatggagtgggtgatgaaaaagcgaaaagcttttgatcaacgtggtgacatggcagtagctgcttgggctgagcaacagcatcgggaaatgacattacgtgctcgccgtctctcacgatcaaaggtaatattagaacatttctttgtcattgttatcttcatgctttttatatctaggtctgattttataagcactggatccagattgatcctgaggaggagaggaaactgtttgccaaggaaaagaaggcatccatggaattctacagcaccactctaaagaggcatacccttgtcctgcggaagagggatattatgcgcaaaaggcagaggaagacaagaagaaagagatcagtagacttctagctcttgaggggcttgagctagatacagatgaagacgacaacataaatttcctaaagtaactacgcaaatgttctttcacaaattccatccacctctcccagcatatactagaaggtttcgccaaagttccatttagtgaatatatattgacgcaagaaaaaatgagctcaagggaaacattggatcataactgttggaaatccagaattctcccatggagcagaaagatgtggccaacggcgaaatccatctgggccaactgctgcaacctgcagcccagtgattcaatcaaagttctttatgcagatcctctattcattgtttccagcagatggactgtattgcaagggatatgactatcagatatgtatacttgttacatgcgaaattgtaattatgctagggtaattttgtaaccttcttgtttgtccgagcaaaacaaagtgcattctctgtgtggtgcctctagctctgacactttgtaaatactacagaaaacatccaaagctattgtttactgggcatgaataatgttgtttcaaatcatccatactcccttcgtactcgtaaagaaagtcgtttaggacaatgtttaagtcaaaccttaggaatataaatcatgaatgactctcaagttgttgagtttgaaaatgtaaaatttatatgaatagatttgtcttgaaaaaatacttttataaaagtatacatatatcacttttcaataaatatttttatagaaacaagaagtcaaagttgtgtttttggagaccgtgtcgctgtccaaaacgattttcttccaaacctctgaaaatcccacatgcagaagatggaaaatatgatgatgatggcatggttctaattttataaaatttaaatgacatcgttacaaatatacgaattataatggtatatctgaataagtatatttgcaatggcacatatcaaattaacccaaatttgtttcactggcctttgctggtagagcctccagcttcagcatcgcagtcatggcgtttgcagtagcttacgaattcgtaaattgccaatgaaaaatccaagtttcctctacctgactacctctcgacggcgtaacaaatcttgaggagaagcctgctattttgtacaaatggggggttttatatgcaaaagctccatccatcggccaatctgggacgctgaggtccgatccaacggtcatgaatggcccagtgctggaccgcgccatctcactgacatctggggtcaggcagtcaacggcgccacgtgacgtcactcgccctccccgtcgccggggatagacggttcggcgccgcaccatcatctccggcgagcttggcctcctcgagctcgtgagcgcaggcaagcctccacgatcgcagcaactagtgccacttccctatcccagctgttgttggaatatgaagtaaattgcttctcttttcttattagttactccctccgtttaaaaaaacttaacctaatattgatgagacataatttagtataacgaatttgaataggagtgaccagattcgaaatacgattatgtccaattccatactaggttatgtttttttttttttggattaacctctcacactggccattcatggctggtccaattaccagcctcgtcatgacgtcatccggccgccatggcggcgtggggcagctttcatcaaggcaacgacgccattgggctcactcctggagaattaaatcgatttaattcttcatttctcagctccgacacaatttcaattagccaaagctacgccatcagattggcaatctatttacagcggattcagcagcgtggtcggatgaatgctgaagaaaaatccagcttcagaacctgctcttggatgcgcagaatggtacattggagaagctgatctgtttttcttttaactgtttgcattcattcatggaggccagtatcactgatgctgacgacgatggctgcctcgccattcatttcgtctcgctgcgacgaaccagggacacattcagaacagcttgcttagccatcaagagctagtagcccctagtctactactagtccattggctgggacctactatgagatcttggaacttctgcaaacactaaccaggcaaccagcatgagaagatttggattcagggtgtgtttagttccacgctaaaattgaaggtttgaagaaattggaacgatgtgatggaaaagttaaaagtttatgtgtgtaggaaagttcgatgtgacggaaaagttagaagtttgaagaaaaaagttggaatgtaaacagggcctcagtttggactaggcctcctttggattggaggatgttcaaatccttaggatagcgccctttggattgaaggaatgcaattttgaaactcttatcctgaattcctttgagaagtcaaatgcactctctacattctctcttaacctgacaaacttcctccaaaactcatactacgttttatttcttatgaaccatccatgggcattatttcttatattcattcatctgttttgaaatcctatttaaattgatgcgattttcatgttcccacgtcttgagcgctttcaaaagaaaaaaaataaaaggtttggtttagcgaaattcggaatggtgagatgatgggtggtgactacggacaggagaagctgtacactcatgtgatgacagatgtgtcgatacagaaaactgcttcagacaaggaccacagtgagtgagtgaggcgaaaaaatcataatggctccatgacccatatgttctctgctcctgcaaccaaacgactgcccccagatgcttgtctggtaaccaaacctgggaccctcaccaacgtgctcacatctctccctgccaggtgggcccgacccggcctgggcccagccgccagtcgcagcgagccgttgccgcgatcgccgccgtccacctggctcggcatctgatacaatgccaatcaacggccaagatgggggggtggaggaagcagcttgaggttgggggatcatggccaatgcctgtctctccacagcaaacattgaaggctacagcaaaatggaccggctcaatgaacgcctcctcctgggggtgttcattcattcaataaatcctgagccatgctgcaatgcaaagcagctgctccagaagatcagaaactgcatgtgccctgttgtaaaagccagcaatggccaggccaaatcggagtaacttcagaattgcatgttacagctacagtatttttccaaatttcgacaaggaagcacagctgagaacagttcagaacagggaaatttttgatgagttggaacctcttgaactcatgaagaaagatggcaatggtatcaatcaatcaatgggatggatgggatcaaatcctctttacactactcgagttaccaaccaaacaaaccctggctacaaggctctggaaaacccacagaaaaaattgggatgaacgaaaaatcggttacatgtacacgggaaattaaaacgaaactcacacggttatggaacacagatcgtcacagaccgtcttcatgttaggcctctcatttacaggaagaatacacctaagagagatcgcaagcagctcgtccatcacccttggagattcttccaagcccgtgatgtctcgatcgaaacaatcagttccccgtccttccctgttgcacatttgaacccagtcggtcagatcaacggccccagattgacccgaaattatgtccccggcactcttccgcgtcaacatctccataacaatcaccccaaacgcgtaaacgtcagctttaaatgatggcattggcttggctgtgtttgccagttctggggctctgtaccccaatgcccctaagttaagtatttgctcagcagtgccacttggagtcatgaaccgatgcaggccataatcgactagcttcggggagagatcaggacccgtcaagaatatattggttggctttaggttgccatgaggcagacccttctcatggtgcaagaactggaggcagcgtgccaggtcgatggcaattttgagccgttgagaaactgacaagcgggagtatcttcttggagttgactctgcagcacatgcgaggagatcaaaatttcagcaatggaagaaacaaatgttgacatgaatgacccagcaaatatatggaacaaataagatagtaataatcaagcagacaatgtaaatataggtattccattgtaaattaggaatgcatgtcaaccaaacaaggaaaaaatccattgccgattcaagtgagcatgggatagttaccataaagataaagagccaagctgtcgccattgacgtagtcagaaataatgagtctttcttgctccttaggaccccagtagaaagctctccacgaaattatatttggatgcctgatggtcccaatcctctttatctccttagtgaagtcctttttatgctttacgaggccaacacgcagccacttcactgtcaggacatggccgctttgtagtgcagctttgtatgtcgtgccatgactgctccttccaagaacctctgctggtgctcgggacaggtcttcagctgtgaaaaccaaagtgctgtctaggaaaatcaattctccgaccaaccgatcgggtgagtacacttcaaatgccacaggttcctcatggaatctactatcaataaaatgtggtgatgttggtagcacaacccgtggagagggctccatagcagggactgcagcagaggtctcagccatacctgaactcgagggttcagtgacttcttttggatcagcatagccgtactcaacagcagcttcagctaatagctctttctgagcagacattgatctagctgcagctgttaagagatggtcatttgagaaacttgttttagttggtataacattatctttcggaggcttgaaaagatttggtcggcttaacctccccagttttagatctctaatagtaatctgacctctaaatccatttcttccgcaaagctcttgagacctgaccacatagattgccaatgctatgaagatcacaagcaatgcagctccaatgcagccaacaataagagcaactcgaacgccagccttatgtccatgagacgattgactctgagcgactccagtatcatcataatttccagcaggaaggccatctggaaaaactaataggtcatttccaggtctaaagcaggttatggggaatttttcaacacttttaggaacagttccttgtagatcattgtaggacacattgaatatcttcaaactagcctggggcatatcaggaattctgccagtaaagtgattatgtgatagatcaagatactccaatccttgaagtttgcttatctcacttggaatctccccagacaactcattcattgcgagagtaaggaactcaactctttgcaagttagaaatatctggtggcaacggaccggacaaagaattacttgacagatcaacgatcctgagaacaggctgaattagtgcaatcgactctgttgaatgtgtgctctgaaatggaatagtcccagtgaagttgtttccggaaagatttaacactgcaaagtgggcgacagaaagaagaaaggcaaaacaggtccgccaagagcatttagactgagatcgaggaattgtaacttctgataggttcccaacacggaaggaatagatcctgataacaaattgttccgcagcttcagggagactaagttctgaaactgtgaagcatcatttgggtagcttccctccagtttgtttgaactcaagtcaatcgtctccacggtaccatcccaagcacgcaatatagctagctccccagaaagctggttcccactcagatcaactgagctacacttgccaacagtggatggtaaggaacctgagaacgtatttgaagagagattcagcagcttcaaagtcgtcgagttcacaactggaaccgatcctgcaaaattacaagcgtgcacgaatcatttagagctgtagacaaatgaaaatgacatttatgaataactgtacaagaagagagtagacatagcaaggcagcaaactataaacagatacatatatttttcaatagtagatctcatgccatagcatattagcataggaatagtttgttacagtcttaattgaataatttctgtgtaaaagtcatgttagatggcaaggatccatcagcaagttctatggtagaagaaatatgtggcaacatgacagctggttcagaataaaaggtttatttgactgagtttatcaatgagcaccaaaaatgttaactacttaagactatgtttaggtctataaataaataactatcgtttatacaaactattacagaagcaacaaacatgaattacaaagaaagatgctaaaatcagttataagccaacaatgcagcttcaccacgagtcacaagagacaactatgcaagaagagtcaattgttccatatgctcatcaaatcctcaatgcaaatgaactcaaccagattcaagatgcattgaatatatttttgccaacgaagtctagaaatattcgtgtcgcaaatgttacgaatctcatttgattcgcaggttgtaatttaggcatcgccgctccacattatcgcccgtatccaagccgtcgcccatcgatcacaagaacaaaatcgaccacttcagcttacgctggggggttcctagtgacagatcaaggcatttttgacaaagatagcagaaccatttgactagcaaaaggaagatatatacctgagaagccattcctgctgagatcaacctcgacaagccgcatcgagttctgcagcatcgcctccggcatcacaccggaaagcgcattgccggcgaccctgaaaaccgccagagagaaccacgcgtcgatctgcggcaccatcccagcaatcccactgttgctcaaatcaagaacctccaggttcttgaaggcccccaccgtctcgttccggaagaacccgccctgcagcttgttgtggctgaggttgaggtacttgacggtgttcccgatgctggacaagctctcgagctccaaatcgacggcgccggtgaagaggttgtcgctgaggtcaatgtactcggcgttgcggagctcggcgagcagatcgccggcattgccccagaaggagttgctgcggaggtcgatgcggcggaggttctgcagctgccggatcccgtcggtggggaagcccgaggagaagttgttgtgggagaggttgaggtggacgaggccggagaggtcggcgaggcggccggggatggggccgtagaagcggttcccggagaggtcgaggtggcggagcgaggagaggtagccgatgccgggggggaggcggccggagaacgcgttcccggcgagggacaggttctggagcgcgcgcatgccggagagcgtcaccagcttgagctccccggcgaggccgagcccgtcgagcgcgacgccgaccaccgcgccgccgtcgcacacgacccctctccacccagacgggcacccgccgcctcccccgccggcgtcgggcgtcgccggcggcgaccaggatcccagcacggggtccctccccctgtccgaaatccccttcttgaactccagcagcgccgccacgtcgtcgcccgccgcgccgccgcctcccaacaccaccaaaaccaccagcacgaggagcgcggccatggatgcgggtgcgggggtggccacagctaggtttcggcgtgggagcaggtggtggcggcggcggcggcggctgccattggaggggggtgagaagcttagctgagagagagagaaggggaagagatgtgtgagagaaagaaatgcaaatttttggaaatgcgaggggtggagtgtaataatagcaagcaccagctggggaagagagagagagagagagagagagtagtgtatgccagtacagactggaaagttacaagtggttgtcttgtgctgtagaagttgtagattggtgtgctgttaagcttagcttaactgtggctctgtgactttggacgtgtttagatcgtagccaaaataaacattactaaattttgggggtgcgtttagtttctgaaaaaaagttgaaagtttgaagaaagttaaaagtttggaaaaaaagttggaagtttatatgtgtaggaaagttttagatgtgatgtgatatgatggaaagttggaagtttgggggtagttggtggtgaactaaacacggccttagtattaccaaaattttagtaatattatcaatttttggcaggatttcttatttatttatcagagtttggtaagaaactaaatggatgcacatatttttcaactttgccaaaaaaattgtatggtttgaaatgtcatcaatctgaagaagccctttatttacttccatgagtgttactgtgttactccatcgttccataaaaaaccaacctaatattagatgttacacatattagaactatgaatatggacatacctatgtacagatttattatactagaatgtgtcacgtataattttagattcgtttttttaaacagagggagttctgttttgtgtcattgtgtgagtacttgggttatggagcatattgtgtgacaatgtgagagtaaaaacaatgttgtctttagggtggttatacttatacctttttcatggtttcatgtacctggtcttggaagtttgcttttgtttattggttggtttgtgcttttgttatattgtagatatgttttgggaaaggttgtttgtgcaaaagaaaattatgtaactcttaccaaggctaacgtagcatgttgcgggtaaatctagatttcctgtaactcctagctagtaaaatcaaacagtcgagagttttgtatttaagagtttttgtaagttttccatagttgagtgtgagcaatttggtaagcgcaagaaatgaccgcttagaatgcaagttgaatctttcaccattgtagatctttttttccctttgtactgtagatgtgttctagtgtagtactagtagcgttttgttgctcatcctaaagtgctttataactatattctttaaaaaaaagaagaagaaaaaacatgttactcacgttattcctgaaaagacaaactcaatttaactacggaaatatttaatgtcaaaatatttattgttacagcaacttcttgacatctcaaggtcaaggaagagaattagggaacatgcaataaaaaataacaaaagctaccattcatttatacattagttagattattagagtgccacccattggggacaatcagtaattcaaaataaataaataaacctctcaaatgtgtgcagacactgggcactggtagaaaagcaagagcccccacatgacccaaggctgtttcaggctttgacccctttcctccagctcagttgagctgcctgccctcttgctttccattctttcctcccttttccttacctccaatgctctctttcttcatgccactcaacaacacattagactataattttttttagaaaaaaatccaaacagaactggaaaaaaatcgacagtttataaagtatacaatttttgtcatggacaagtgtcatgaggtgatattcttctagtttgtgcaaggttgatgtgatgtagtggtagtagtaaatggagtgtagtatttatttcagtagctcacagaggtttagagagacatgaagaccttagattcaggagcctgtcacatgtccaattatatatttctggtaccaggtagatcaggagaaaatttctacctctccagataatttcagtgcttcatattgacagtttacaagatattttatattgtgatcttcctctgttcatccaattattcgatttctgtcaaaattggcgttagtcctttcatgaatttggctgatccaggatctgtgcagtttttgcttctgaatcttgccaacatttcaacatgccatttctgaagtttaaggttaaggatgtgatgactgaaaggacggtaaaacagtcggtgcatagtggaattagaggatatatattcatatcctaatccagatgcttgctgttaggaggaaatataggctctgaaaatgacatggtgtagaggagtactaatcaatcggagagattgatgggctctggagtttggagtttcttgacatcaaaatccagagttgtctgtgatagagacggtagtgctaacaagaattaactagcaggataagttgaaaagtgtgtcatgtttggatgacacttaattaaggttgccatatttttagattaagaggggccaagcatgattggagttccataagtcaaatattcttccatttctttcctctcgtttggatgtgtatgagggtgacagtgtgtgtcctgactggtcctgagctggatgtaattcctgcacgaaatgcctaattggtgcaacaaacgggtttaaattacagtcaatatccagccatgtgttagaagcagatgttttctgattactttaattaaggccatgatcacactataaaccatatgcggaaactcgaaagattgtaattaagttctactagcaattagacagactattatatatgagtcgtatacaattttttttagataatgatatgaatcatatgtacaattacaatttatatatcttttatggataattgcaacagatgtccttttgcagtcgttatgaagtgattaggaagtttcttaacttgattaggtgcgggattatcagtactgcataatcatgccgtgtttgctctgaattgcggtttcttggggaaatgcaaatgctaatcagtaactggatcagaacatgctgcaggtactaatttattcagggaattaagtaatgtttcacaccgaagactcaaatagcaccgagtagattagttgaggctaccaaaccctgagctgtaaccgagtagaagaaccttgacgtcttaaaacacactaaaaaaaatagaagaagaagaagaagaaagtgtccatgtcgaatgctgtttttttttttctgaacctcccaacactctttcaacaaccaacctgaagaaattccaaaaggaatactggattttggatttttcatttacatgcttcataaactggtgcattttgtgtaaaaaaaattctatatgcttttttcgaaaaacttttctaaaccattttttcaactttatagtagttaatttatttattcatacccttaaatagctataaaaatcatattatccattaattcatcagtttaaactatctcaaacagggaaacaattttcagtggtacttttttttaaaaaatactacagtggtactggatgggagaattattgttgctgattgcaggaaaaggactgcaaagaaagatatgggcagtacaaaaggtgaggattaaccaggacactttcactgtaaaagagagtaaccaaaagactatcagtgtggcagttaaagctgctcagttggctagttgtcccggggctttgcttgaatttgaaaccatctgaagaaaaaaaatgttgccgctgctgctccatgagatgatgtttttttcatgcgtcttttgcagctaaacctgggacctgagctaggttaactccactgtcatgcatcatggattcacagtgcaatggtacacgtttgtagtactgattaagggtaaactaaagcaatcaatctggaggcttgagaaccaagcttaacctgaataatgattagtattggtaatcatacttaaactgaagaacatttttcagactggcacagtagtagtattggtaatactggtacggttttgccattgagcgatctttgttggtgggccccagtgactaacagtccgttctgtccgtgaaaggctgtatggacccgtgctgtcagaaggataagggttagattgactggactggctaaagactcgtctttcagaaagtcttctatgcacatatacagagacaaacagatctctaaacaaaacaagaggctggcagacagacagagtgagtaagtggatgattttaatctaagtaaaagtggttagtagcattattagttaaagaaagcatggaggagcatcaccagcaggacacaatagaatatgtggaagtgagcaaaggcgaggacgaagtacgaagaccaccgccctagagctcatgctcaccgaactgtttccgagctaaaaaccggtgataattggttttttaattcggttttcatggaaaccgttgaatcccgataaaatccgatcaaattttgttgaacttgaaaataaaccgagtggaaaatccggttttcgcgaacatcgatcggttttcgtcggttttgtgaatctggccacctgggaaatgcaatgtgcatgcaccaggcaggtagcgtgctgggtggtgttgtgttccatgcttccattacatggcgccatatgctttacaggagtaatcctcgcggattacagcgcatgcgatgcatcttcttgtcgttccatccatcgtcgccgcgacgccgcccgtcacatccccaccaccatcaccaccaccactagtcgctctagtgctaattaattctgattaagctggtgtaattgatagtgtcatgaatataatctggtcgaagttgagtagtaggcgaaatgtgatgttttttttagataatgaggcgaaatgtgatgtgtatcccctcacgtgtttagaacagggtcatatctgctggtcaaagatctagcgccctcacagttcaccggttacggctgattggcggatttcagattgtgatagatgatggtagatcagaacatgagaatcagcaagtagtgcttggcgaaaattcttcagccatgatagaggacttaactgaactaactgaaatcgaattgcacggtcataatcatgatgtgtagggatagttaatcaggcggaccaaaccaaactgaactgaagattagagaggacataattacgaaaataggcaattgcacgagcgacagggaggagcgagagcagaggtcgacgatggggtggaagaagaaagaagaagaagccgtgcatgtcaacatgcgtacatgcaggcatgtctgctacgacaagtctacaatactgtactacgtactacttctgaaaaaaaaaattataacatatgctctttcttttcttatgaagatatagattttatctcggtttttgttagcacgttttctaaattactaaacagtaatgttccgcgtaaaaaactttttatatgaaagttgctttaaaaatatcaaatatatccatttgttaagtttgtaataactagaaaaaatacacgtgcgtcgcaacgggtgatactattttaatattattattattatacggttcagttaggatgaaattcactgtgagaattcgcttggatatatttttagaaaatcatgagctgtaattagaagtctgactttcatattaagttagcaagttttaaaaaagaaaattcttatacgacttcttttgtatccaaaagcaaatgaacttaaaatccgattcaaacacggatatgtatttcaaaaaacaaatttaaaaaccgactcaaatacgaataacatatcaaaataccaacgaaaacattttcaatttttataatagcagagattaaaacttaattaatcatattctaatagcttttttgttttacgtgtgctaactttaattttatgcattaacttaacttaaaatatgagaatatatttttatctaaacaataaatttttttatattttgggacgaggtcggtatatcaatcctgagcgtgtccatgtgcgaccaggatgccatttaagacaacgaactgtaggaaggacacatatatatacggccccgcgcgccgtcgggggggccccttgtttgatcgatctttcatttcggtgtgtccatgcatgcatgatgcgtccacgcatgtgtccatgtgatcgccgaagcaaaaacagagtggaccatctcccttgtctcctcccgctgctactgctcgtgcaagtgatcgagcttccgtccatgtatacgtgcgaggtgatggtcgagattatccggtataagagacagggcaatagtacagatacctgttaagctgtaaaatcttccatcttagaccgagtttagttataaactttttctttaaacttctaacttttccattacacttctaacttttccgtcatatcgtttcaattttaactaaacttttaattttggtgtgaactaaatacacccttagtaaaatagaagataatatgtacgatagtgagctgtaagtagttcaatgtattgtcctctagcgcatatatatactatttattcgtttaatctaacaagtacctagtgtgtcgtcactgtaaactctctagagtgagcagcgtcgcatggaagcatatgaggtcgtgttgcagccggcgcttttatctctctttaccatcgtttttctttcagctcagctcatatctgacgtatttggtgttggagccggttaagttaacctactctatttgttctatactgtggtaaagttatacgtttatatccatatccatcgtctagaacaagtatgaaatattctctctataaaaaaagttaaataggaatgtggcataacctagtataacgaaacatttaaaaagacctaatctagcgaatttaggtttcgttgtacagtactaagtattaagtcgtatcacatcttcatttgtattgaacttttttataacaaataaagtactaatgaaatactacatctatcccaaatagagacgagaaaggagaaaggagtaagcaaagtaagcccttgtttagttccaaacttgtttctttaaacttttaactttttcatcatatcaaaacttttatatacacaaactttcaatttttcaatacatcgatacaattttaaccaaaattttaattttagcgtgaaaacatacctaaaataaaatcatggcgccgccgtggcgtgggggcgcgtggcggtggcgtgcgtgccaccggacaaccggagagcggagaccaattgcagttagcgtaggcaacatcacctgtgtgcacgatgattagctagggccggccgggctgtgtgtgggctgtggctggcacggtgggaaaagaaaagcggcgtgacggaggagagcatcggaattcgcgtaaagcgagaggggcacgccgtggcgtggcgtggcgtggagccgtggaagtgtggagcaccggcaccaatcatgcgccgcctcggtgtccgcgtacggcgcgccatccgccccccacccccaatgcttgttgcttcccctcccaaaccaccccttttttcttttcttttcgccctttttgttgggaaacaaacagtaacacgcgtccgtgtcgcatcgcagctcgatcggattccgttgaattctaccaatttctgtcatattgtttcgcaccgcacccccatttcgacatgttctcccagcaagcgtccctgcctggttgtttaattaacgtcaattccattccccctcatatgagtacgtacgtactcatggcaacagataccgactctcggtatggagcaaaagcacgcaagcaaagccatacagtagcagcatcccagcggcgtttgcttctgtacgccccatcatccgctgggaccggaccgggacggccatgccatgctgcaggagcaggaaggagaggcaactctgatcgtgattgcagatgcaggagatagcaggagtagtagatctcacacatctcatatcaaatgtgagtctcgtctcttgcaatcctaatccccagccgcatcatgtgtcgccttcctccccgtccccttgctatttgccactaccaccactaaccacagtttgtctccccccctcgcacttgaacgtgcctcccctgccccacccatatgggcgtacaggtgtacccagtgcaagcaaagcaatgctgctgctactgccaaatgtacaactacgtactactagtacagacaggctctcccttcgaagggagtgaagagtgcccgagtggctgccctggaatctggataggatctgcttgcctccggtgagagagatgagagatcagatcagcacacacattcacagctgaatgaataatgagacgaggaagacgagtcccggttttgctgctggtttcgttgtcttcctcttcgtgtaaatcggagtggaaaagaggcaacaatagatgttcagatatatacatgtgtccaggagcaaaatgtagggaagcgagagctattgtttctttcatggattactgcaacacaaataacaatgtcgatgtttacaacactacagttacggtacacaagtgagggagaaagagagggggagatcctaagtgggaaatgtacaggattgagctggtcagattttctttttatctaattcgttttgcacgagagcttagcttagccttgttccttgtagggtgtccagatcagcttgctaacgtcgacctcgaggccaccccggccggcggccttgaggtggcggtcgagaaccttggggtcagcgcagatgacgtgctgacctttccggtactggatcaggtccagactctgaagcgtgctcaagatgtcgtccgcttttattgccgtcatatcgctaagctcctgcattcaagcgcgacaacctgttaggaacagtttagggctgcgtaattggataatgcaaatcgaagctaattgatgatagaaaatgatggatctgtggtggagttatgggctatggattcagctacagaggaactcaatgtgtgtgtttcttcatgatttgaaaaaaaaaattagtatggaaagtaaaattatacagtagttagtacaacacagcctattgacttttcctacagatctgtttgcaccagtgactgtactagtgcatcagggagcaaggatgcaggaacaattatctttcagaatccaattgttcttgtgtgtcgtcaaaaggtttgatttgcatacatccaaaagttttagagggccggggcaagatgaacaggaaggcacaggctgacaagccagagaacacatggatatatgtccttccgtagaggaagtttctgcagattacactagttgcatgtgatcctgtctacatatatttgagttcaaaagaaaaggatatacacctcttcttcagaatggtttaaggatataatgcagcttggagaatctaattgttgatttattctttcatgcaatctttaagagctagaacaatggttctaatgccagaagtaagttgagtgaagatttttattagttattatagctgtccatgaaactgcagtgggctatatctacatgaatgattatttagatgtggacaaatattgactgatgacacatgaatttcagcttggtttgttggatttaatattttattgtaatttgtaagaagtaaactgggtgtaagaatctacagcctcccttcagactactgaactgcacatatctactgtatccatgaaaagtagcacattagatttgagttggtaatcaagatctcatggatatccacaaacatccaaactgtgaagtgtagcatcaaatggtctgtttcacataatccaaaagttttcaggccccagggcaaacgaacaggaagatgtaaggtgaaaagcctattaatatgcaaaccaatgtccttgtgtgggcaagcatgatcttactgttcactcaactggctactcctgacctgaccattttagcctatattaatctgaccatttacacactagaaattaacctgatgacactttatcctacatatgattgtaagtaatagattggctgagatcatcaatgaacaggatcagatagggataaaaaaaagtagtatttgatgcaatgccaaaaaagaaaatgacgcctgtttttatcatgatttattcaaatgataaaatggagagagaaaaaaactatagtgttagatagaggagaaggaatgtggtgattaccttaatggatatgttgctcttatgtttctttaaaatctctagaagcactctagtccaataacctctataactgagcagaccaagatcagaaagagggcgctccggtgtccctactttaccttccttcttagaaagctcatagg

SEQ ID NO: 20460 - DNA, 10155 bp, Oryza sativa
aagtgtcttgtgatcaagaaatagtttggtcaagataacaaaggttctgcccataaactttgttcttcttgccatcaacctgcaattatgcaaacatttttcttattaaaatattaagataactaaatgaaaaggagaagttgcatgatttccattctgcttttcttaaaactttttaaggcattatgccaacagcagagaactggtttcagaaacttgatcaacatagcatgcaagctgccattacaggaagctaaaatggatatcgaactaacctcaaacatagacagggttccacttctgtatatttcatcaccagggggatgtttaagatcacattttttctgtatagtaaagagaatggaattaatcattgattatgacttatgataatttaacatggaatatcagaacgctataaatgaaacatgtgcacaacaaacaagatataaaatgcattcaaagatgatcatagatcaagtgatcaactcaggaacggaatatgctgcacatgcagcgaggttgatctgatttatggtatttgtaatgtcaataagtaccagccatgacttgaggacatttaaggagatttttctgagatgccagaaacataagtagtggggcagaggggttgcattttacttatgaagttcgttgtactaattattaaatggctggcgacacacaacagttgcaatcaattcagagctagggaccactagaatggcaaaacaggcattttttagaacccacaaaattcacagtaaacagtataattactgcagctttatgaggaaattcctgcaatacaaacagggccttttaaaaaaataaagattaagagaacatgtttggcacctaatggtacaatgaacaaaaagttaagatagatgggccgaaaaagcacaggaggagctaaacaagtgcaggcagatttgagctcatactcccaaatttgcattagcagagcctggctgaaaagatagtaaccctccatatgggaacaaataactaaatctcaccatgtgcctctgaagctgttccttgcgcttcatgaagttgaggcaaaactcacagaagaacagctttggagagtcattatactccggtgggaaaggagagaaataccatgtatctatctcatatctcccaagttctatcttcgctatatttttcacctttgtgaactcttcatgttcccgcaaactagcagcatcaagctcctcatgaccttgctataatggaaatggacacaaagctagattagtttcaggatactaattcaaaagggaaaccacaattacagtacaacgtgaagaaggaaccaacatgtgtttcatcaatttttgtagccattgcatagcaaactaacatccttacagataataaatcttcaagaacaaatgataatcaaattatccacagtgatacaatctattccatacctccacatgggtttcatcaattttacgcttctggtgccgtgtcatcttcaagcttgttgcctgagtacatattaaaatggagttgtatgagtattcttttgaaataacagagggctatttatgtcttaggatgatcatctcaggttttcaaccgtcacctggacagtatagcggccaatataaggaaaaagcaaattctactggtatgattgacaattgaacaacatgaatttatgttaccttatcttctaccttctcatcaacatcggtctcaacagtctcaagatcaagttgttcaagtttaacccactcatcgagcctcctattgactgcaagttcattacatttaaatacgattggtaagcataaatatgtcaacatgacagaactccacaaacccacaacagaatacgctgcagctgttatgaagcactaactcctatttcagctaacgaaatcgggtaaaagtttgtgattgtactgaaactattgagacacgagactagaacggccatttccggccccagcgaaaagcaatcctatattcccatatacaaattcatcactatatcacctcgaatttcataacccctaaactaattgaccatttaagccccagattccctcaatctgaagcaccctaaacctaaccctagaaacgaagcatcctgttgggggcgaggtcgcttacactcggtgtagtggacgtagtactcgtaatcggcgggggaggaggaggtggaggacttccggcgctcgatgaccttgacgggatggagcttctggtcgcgccaccggcacatcacgcgcgtgcccacctccagcggcagatgcgacgcccacgacgcggacgcggcggaggacctcagcctcctctctaccccgccgccgttcgaggcggcggcggcgccgccgccgccgcccgcgccgttgcacgccgtcgaggccgcggccgccgcggcggcggcggtgccgttctccggcgcggtggacgcctccatcgagcccatctcgtcgtcggagttggatcggaagttgtgcggttttggggctgggcctcttgccccggatttgggctttgggttagatctttatcatctccgtcgtgtggtccggttgggacgcatggtttattccgtggggcccacatgtaagtgacagaatgataccgtctcggttgtatttggtctgtttgatcctccccaaatttgaattgggtcaacggatttgaaggcccagctctgttttaactttaaactaatttagttttattgccgaattttttttaaaaaaatactccctctattttattttataagttgctttaattttttactagtcaaattttttttgagtttgatcaaatttatcaaaaaatttagcaacatctaaaccaccaaattagttccattaaattagtttataattttatagtttttaaaaagttctatcaaaacatagaatgaaacggcctacttttccaatttggtgtttgggctaacacactgacttaccaatttgtgaagcagatcaataactattttcaaatccaaacgatgttctcattcctaatgatgttctatttcttcattgggatttacaatttgaaaagagtaaagaaatttacaaaaattttaacgatgtaccttgttggatcgaaaccatttaggaataagttcactttgggtctctctatttgtcgtccagtctgattttcgtccctcgatcgcaaaaccgggtacaacaggtcctctaacttacgaaaccgtttaaataagttccctcagcagtatttgaccccggttttagctgaggtggcgcctacgtggctaatttgactcggttttcatctgacgtggcattgacgtggcacttacgtggcaattcgatccgaaaaataaaaaccctatgggacccacatgtcagtttcacacacataattaaaaaaaatggtgggccccacgtggaccccacctgtcatcctcgctaccccttctctcatcccctctctctatcctctctctccatcttctctctatctctctctctcccgtgagaatggcgggcgcgccataggggcggcggcgaggcggcggttggagcactgtcgccggagccggggataccgccgccgcaacttccgcgtcggccaccacgttgctcccatccacctcgcggagatggagcatgcgccgctccttgaccccgtcgagctgctccggggaacgcctagcggtcgctcccccacgtcttcagcgacgggaacgacgggaggagcgtggcctggtggcgagcgctcgacgccgctgcctccaccgcggcggcgccatccgcgacgggatccggggtcgaggcgggggcggctcggcggagatcaccatggccgcgggaaaagccgcgatgatgaacacgcgcgtggaggccgccgtcacctagacctccaccgactccgactccggtggcggcggcggcgggagagtcggccgagcgatgagggtcagcgcgcggcggccggccgaggagggccggccatgcgtgctctaatcacaatttttttgatggttaatttgctagtatttatcagtcgcctgattgatttttaatgtgctgtgtttaatttgatggttaatttgctagtatcgaggctgcgtgccccggcgtcatctcctgcgcggacattgtcgcgttcactggccacgacgcatcgaggtacatgagcaacggcggcgtcaaattcaatgtcccggtcggccgcctcgacggcattgtctcgtcctccgaggtcgcccaaaatatgctccctgactccaaggccgacttggacaagctcacagcgccaacttcgcggcgaagggattcaccccggaggagctggtgatcctctctggcgcgtactccataggcaaggcgcactgcttctccttcaacgaccgcctcaccgagccgaactccgagatcaatgccaactaccacgacaacgtcctgaacaagacctgctacgccgccccgaacgagacgacgttggcgaacaacatccgcgacatcgacgtggcgacgctggggccccggcgccagcgctccacccgccgctccacccgcggcctgctgcctcacagctccgtcgccgcccctctgcgccgcccgccgctgctcgccattctcaggggagatagagagaggggatagagaggagagagagaaggggtaatgaggatgacaggtggggtccacgtgggccccaccattttattattattgtgtgtgaaactgacatgtggatcccatagattttattatttttcggatcgaattgccacataagcgtcacgtcaacgctacgttagatgaagaccaagtcaaactagccacgtaggcgccacctcagccaaaaccggggtcaaatactgccgaggtaccttatttaaacggtttcgtaagttgagggacatgtcttacctggttttgcgatcaatgggcgaaaatcagactggcgacaaatacaggaacccaaagtgaacttattccaaccatttacaaatggaaggcctaaaataaacaaggcccatatggcccactcagctcaaatcaggctaaggataatcccctgtccttagccagagcttcggccgctctcctcccggacaccagcgcgccgtcgaacgtcgcgtagcaccagtggtcgccgcacatgtacagcccgtcgccgaccctcgggtcgcgccccgccggcgaagtcggcggcgtctggtccggctgcgcgaagccgatgcggtacgtcctcaggtgcgtccacgacgcgacctccccggcgccgaaccacccggcgagctcggtgaccacctcgccggcgaggtcggcgtcggaccgcccggcgaaggagccgacgagggatacggacaccagcgacctccccggcggcgcgtacgacggcgccacgttggtggcgaagaacatgttgttgacgatccctttgcctgagccgttgaggagcaggatggggtcttggaccgccgccttgtcggcggcgaagtagaggcagacggtgctccgctcggagttcttcttgggtttcgccggaatcgttggtagctgcggtaggagcttctcggcctccggctgctcgacggcgacgatgacgccgagctcgccggagacggtctcgccggtgtcgagcgtcacgctggactggccgatggccgcggcgcgggagttgaggcggacggagcccgccggcaggcggtccgcgagctgcgacgcgatggcgccgatgccggcctccggcagcgcgttgtccccgagggcgaggcgcttgaacacgagctcgaagaggcgcgacgacgtgtcgagcgccgggtcgaagaatatcccagccaggaacggccgcaggaaccgctccacgatggacggcgagaacccgagcttctccaggtgcgccgccgtggtcgtctccggcgacgagaggatgacgtcgtccggggtggacgccgcgcggagccgggcgaggccgacgaggagcttatcagcgagcgttccgacgggggagaacacggcggagagggaacgcagaggaagccggaacgggtcagacaacaggtagaacggctcgccggcgccgaggaagacgagcgctccaggataaaacggccggagccgcaacgccgggaagtcaaggagacgccggcactccgggtaggcggtgaggaagatctggaaccccctatccaaccgatacccatcgacctcgtcggtggcgacacggccgccgaggcggtccgacgcctcgagcagcgtgaacggcaccgacatggacgccaggtggttcgccgcggcgaggcccgctagcccgccaccgacaatgacggccttattaccaccgccgccgccgccggtggcgtcgctccccggcgcggcggcgcgggtgacggtgaggcggagggcggcggcatggtggcggcggagcttgggtggcgtggcggggaggacggggcgcgcggcgtggacgtgcatgggcgtcgcggcgggcgacagcgagtggcgggaagcgcgcgcgcgcgagggagggagaagacgagtttggggtttgggtggtgttcctgatttgtccatggaccggctgtggatatggtggtttcggtgcatggacccggcgtttggatggggagctatgggttgacgagactgcgtggtggggttgggtgtaggtgttctgtgtggacgtccgtagactgggttcagggaagattcgtcatggagcaaagcgttatcctctctctctgaactctgatttatgagatgaagaacagaagaggaacgctctgatagaataatggttcaatcctggaatgctattttctcgaaccctcttttacctcaacatttgtaatggtttgcctccggcaatgcccgctccctgtaaccccaagatctttctcttaaatgcaatggaagattcaagtggggaacatatcctctccggtgattattaaaaaaaagaagaagaagataaacagggtaaggctagtttttctcatccgaacacatagtatatagacaattacgtacccacgcacatttgtatgggcgcatgtacacatgtagctagccaaaatttaagattgatgaaattaccccaaatccctaaatgtcgcgtcgctaataagtgtcgcctaccactaaaatcatgattagctatggatataaacatctgttgtcgactgatatctaggtgggtagatgttaataagtgtcgccttccactaaaatcatgattagctatgaatataaacatctgttgttgacttatatctaggtgggtagattctactgcaggtaacctaaactggctatcttaggctcacagtttgtttaggttggttccagtggtaccgaaattaaacttgtgaatctcagacaaaatttgttaaaaacaatagatttttgtaaacttggttgttccacgtgatcaataccatttgccacgtaagcaatacttttgccacatcatcattcacgtaagaaaatcattttggtcatttgtagcatttcttatactttaggtttgtgtttggtttggagatgagatgagatgggttaggtttatttgtattttggggatatgatggacctagtttctatttggttctaggaatagaacggacctagttttctgtttggtttgagggatatgatgagttggaatgatcctatctcttgtgttggttggagggatgtagatggattgcttagatatagttacctcttcacattagttggtgaggtcatacacaacacaaaatattgaacatgaagaccacatcatttgaaaaaaaaaatacattcatatgactatatttggaaataaaatacaatcatatcatatagccaaccaaaaaccaaagcaaaataccgataattagcatacatcaatccttatatcaatgtaagcataggaagttcaagccacacataataaggagttccttactttggctatagaggatgatggaggatgcgaggagcagtagcagacgagagagaggatggcactaggacgctgtagtaggttcccgcaatcggtttttgcttctcgccaccaccaccaccgtcttcccttcctgccgtcgccgccaactatgagatgaggagggggagtggcgagagagagatgggaggaaggaggacagagaagggaggatggcacgggcgccactggccccatcgcatgacaccggcgttgccggctgttgcgcgcgatggcgccgccatcaccctctttttttctctcaatctagatggtgatacggtgaagggggagaaaaaagagatagggttaccctatcccacacatgtgtaacacatgtgatgcgcgactccggaggtgagatggagtgatccgctactttttttcaagggccaaacgaccccgaatgtagggagaatattcctttttgacccaactcaactcatgaagtccttcaactaaacaccagtaaatataggatggtcccagtccaactcaccaaaaccttgcagctaaacacatgctaagagtgtaattaattcagggctaaactatgtcattcatgcatagggttataatatgaaaacttcaaacctaatagagggttctaatataatttaatgtcttgttctaataaatccttataaataaatacgtgacggaaggaaagtaaattggacttatgttagcaattaacaacggcagtcacacactcgcacacactttgaattgacgaagatgaataataagttggcgcacgtaaaacgagaaagctactagcacataattaattaaatttaattattacgacttaacaatttgatatatttgatattttaaaataacttctagtctctccggtttcaaaattattgacatttcgaacatgatctcacataccaagcagtgatttattaagatatcaatttactattttacccatattaaatatagtattgtgctctattatcttatatatatatatatatatatatatatatatatatattcttgtgctaatggtaatcactaccgttggtttgaaccaatcacctgcatcggtgcgaggtaaagatccaattccctagcttttttacttggtttttatttgcatgcatgcagggcaaagcagtccaatataacatactaatacaaaaggcgtcaacaattatcaatcactgtttagcccgaaatttttgggctgatacgacttatcgttttagataatagtgagatcaaaatttagaatatttaattataaattatttttaaaatatttgtctttcaaatatgatgactatatgtatagattagtcttaaaaagtactttaataaaatcaaatatttattaacactttatacatattataatgaaaaataacggttaaagttattttttagagatcgtggtcttattcaaaacaataagtattattaatctgaaaagataccagactaattttttgattgaaggaagtatataaaaagttttagcacgaaattcacatctagtaatttgaaaaatgtgggcacaggaaaagaacaggacatccgcagcacacgaacccgcccgccgcggcgcgcacgcgtgtcggtctttccgcgcgccacacgcgcgttgctctgctattacacggttacaccccgccgaacgtcgcggtctctcctctaatcatggacaagcgaaacgttaagcaacaacacgcatcacggattaacgggccctaaaacaaaaatcaaacgaaacaagagggctcatcatcaaaactaaaaggaagaaaataaaaggtgaagaggaaatttcttgaaaaggttttcgttgcacgacgatcatcagtaaagtaatagagtatctcgtccgtttatggtgatggacgagaatatcgtacaggttggctacgtgcctactacgtcgcgtagacgtctccagagcatctttcctttctttcatcctccagaatatgattctgctcaaaactttctacgatcatttcgttttgaagcatccaacaccactgttttttttatatatattttgcatttttgtactcgtggctattcatatccatgagcacaaggcttgttttttatattctttttcttatcttccttttgatcggttggtattggtaatgattgtacatcatttttgcggttttacatggagacccatctatctgttctgatttg

SEQ ID NO: 20461 - DNA, 7170 bp, Oryza sativa
aatcgttgattgtacactaataactatttcctccgtttcatattataagactttctagcattgtccacattcatatgcatgttaatgaatctagacgacatatatgtgtgcctagatttactaacatcaatatgaatgtgagtaatgctagaaagttttataatctgaaatggaggtaatacagtttgacagatcaaggatatgtcttgatgtcataatgttagtattgatttattgtcgatgtgcatcccttgcatctaattttgctcaatcaacaactttggttttaactcgcacaatgcttgattcaagaaagagattaacaaatagaaaatgcttttgtaaaaggttaatgctagcatcctctatttaccaggaggagtatcactagaggtgctatatttaattgaaatgaacaagtcagccatactatcatgcgaatcaagttgaagttgactcctccaaaaattattccattagataaaggaagaattaatccatcaaaacaaattgcatgccgtacaagaaaaggtcaattgaaagaggtcattttaatcaatccatttgtcctctttccatgttcaatggccatccccgattcccctctttaactaatgtttgaataatttcttatttacacttttacataaaataatattccattttctctattattataattctaaaaatacctccaacaacacaagtaatcagaattacatacatcgtcccttaactcaacgggagacgataaaaagatcaacaataacaagagaagatgtttactgcaatgcttacagtcagcgttggatttaaattttagaatctaatatcgaagaaaagttactagataaactattaacccataacctcatcgatatttactctcttattatacagtaataatacaatcttaattcatcataccgagttatccaaaaaaaaatcatcatacggtagaagatcatcatcattttataattcttaaaagacacacacagacaaaaaaaaaaaaaggataaacagagaaagtaaaagttgtccaaactcgacagggaaaatttgcaaataggtcccacaacttttttcaaaatttcctcgtgcgcgaaaacaacctcaccagacacaaaaaatactccctcgctccatttccagcactacggcactacccatttctattcctcttcacctcgcggcggcggcgcggcgagcaatcggcgcctctcctctcggtctactctcctccggccatccccgttcatctctactcttcactccatcctcctccactccaccgtactgccctggggtgcagatcaatcgagacttggggctgatttctcgagttggtgacgaaccctaatttcgtttggattgttgcaagaggtttgtcccgccctctctcttagctgcgagcgatcaaattggcatcgttatcactgggatgagcgcaccgatccatcgagttcgtcgcggatttgattggttcgcggcggagcacgagtagcagttcatttcccccacgttatgtccagccctggaaggagtgggttctcccctgggttggcgcagttgttatcatctagagatgaagcgaaggttagttcccagaagtcgcacttggtatcgtaccatgacgagattgggcaccaggatattgagaggacgctagagcatatatttgatctccctcacaagtcggtggtccggcctccgggtccgattgatgtgggatttgtgcgctcggtattgcggaatcaggcaaggaagtttgatcttggcgggaaagatagccgtaaatacgatgatggtgttctgattgtggataaaggtgctgggcaaactaaggttgttcttgatgattcgagcatttgtggcaagttcaagagcatttggggacctttgcttgttgagagctcggcatcattcagcagcgctagggctaacacctgcgtgtggaatggcaagtggatgtatgaggttaccctggagacgtccggagtgcagcagcttggatgggctactctctcgtgccccttcactgatcagaaaggagttggtgattctgatgattcatatgcatttgatggccggcgggtgaccaaatggaacaatgatccagaacaatatgggcagatgtgggcagtaggagatgtgattggttgctgcatcaacttggatgctggggagatcagtttctacaggaatgggaattttcttggtgttgcctttgatgggattcgcaaagtgggacctaggaaaggctactatcctgcaatttctctctcagaaggtgagcgttgccatctgaacttcggctcacatccattcaggtatcctgtagatgggttcaatccaattgaggcaccgccacatttttgtatgtttgcggcatatcttcttagatgtttgttccgtctactagaagttcaaaatctggaaaaatctgaatctgcatacttcgagaaactaaggagggtcaagaaatttgcacctttacgtgaactatttcgaccaatttcggaagggatatgtgcagaatttttcggtgccgctgaaggaagccaagggtgttctgaatatatcacctggggatctttcatcacccttcttacagatgttttcagggtacgggagccgcatgatttcttatgccttgaccaggttcttgaactttttctacagttcccggggtgcagttcattactgcaggagctcattgtggctctttcttgtatgtgcaaagctgctccacttgtgttgacagaatgcccattttctggaccatatccatttttagcgctggcttgccacattcttaggcataaagatgtaatgcatctatggtggaagtcagaagattttgcattctcatttgaaggatttcttacgatgaagattccaaacaagcaggacttgcagtaccttgtaccttctgtttggtggcctgggtcttctgaagatgaggttagcatgacattatcgatgacaacactctccgatgcaattaagaaggtgaactttctctctcttccttagtcgcgcagagaaattctactaatagatgatatcttgaattaattatgccactgttataacttattctagcatatgcaattttctgctattttatgttgttggcttggatttttattattcttctcaactcttggatgtgcatgctatgctatttggtgattaaaatttgtattaccctgtaactagcccagtttgaaatccagactgccttttcctttagttttctcagcgtgttgcttccttgcttttgtgcacttgtgtactacctattattctccttacttatatgttcaattcatccaaagtttatgctctgttctattagagattaatgttttaaaattttaactacaaacatgatcgcttgcaaatagataaaactctctccctccatttctaactcttaaatctttgtttgtttgttatggtttgcactgtttttcttctacagattgaggataagcaccgtgagctttgcagcttggtgatatgctttgttccaccaacgtctccccctctgcttcctggatctgtgtttcggtcatttgtacaaagttcaatactaaaggttagaggtggagatcataggatggcttccagtgggactttcaatgacacggtgcttgtctcactgtacactgtaatcctccatttgttgtctgaaggattttctatggattcttctggacctgcatcatcctctagaataaattatggaactggtgttggatttctccacaaaggtggaaagcggaggtttcctacacagttattattgaggaatgatgcctattacaatgtaattcctagactcggtggatcactaaatcacctgttgatgtttcaccaaattgatgccaatgaagatgaggtgcagtgggatgaaggttgcatgaatgatgaagaaacacggataacacacactacagcacaaaaaccttgctgctgttcaatcacagatgtcactgttggcctgagatttaaagaaaatgccaagtacataccatcaacttcgaaaggcccatgcaagtccatgcatgaaaaatctgcacatattgcctctgaatgcagtgtgagaagtcttagtaatgagattgaagacaaacctatcacaagtgctcaatcagaaattgaatatggctatcaagcactacatcatttagaaagcatgtcgatgacaaaccaattttcatcagaagcactaagagaagaagagttgcttgattttatgctgctgttatatcatctgggtgtctcaccaaattttaggcaggcaagtgatattatttaattttttcttgaattaggtgaacaaatacaatgctgcagcaaggatccaccactttgcttacatagagatcctcaggatccgtaaacattacgtcatgtactgttcttaattcataatctatagggagttgtccttaatttatgcccttgcacatgtacccaagagtttagacaccatgtgctttccttatgtatgtgagctgcatggccagtatgtgtagccattttctagataatggcatcactttctgcaatactatttagggtgatttgaggattagccactccctgatcatgaaagccactattggggagtggcaaaccattagtcatctatactgtttaagaacaggtccagatgtgctaagtacttcggttgttcattagcttatttaactctcttagaaaaaaaatgaagcacgccaacctggccagtccatgagggtatattccaatgccacttatccattgatgcctgccagtgcactaggatacttaatactttcatattctgctttacattatggttctgattaagtttgttctgttcaggcattctattttgtgtcccagcaatcacaatccatttctttactagaagaaactgataggcagataagagaaaaatcatgcatggagcaagtaagacgcttgaaggaagcccgcaatagttatcatgaggagttggtggattgtgtcaggcattgtgtttggtatgatttctgaaaggacaaattattatgtcttcacatattgcatgacaatatgaaaacactacacttctgccgtatacaatataatttagatcatattttcttctgaatgattatacgaacatattcacaaacatattcctgttcagtaatttattatgtcgaaatggataaaaatatccttgaagctggagcttcttggaaatatatttaccttgcataatttaggagccaccttctaactcttataggtgtttataatgcttgttcttttgctttccttggtgtgagtaagattttcccacaggataatttgtacagactaaagttgatgaaaccattttgcagactagagagctaatttgttgactcgatatatggtacatgcaggtatcgtgccactgttttttcttcatggaagcaaaggggaatgtatgcaacttgcatgtgggttgtggagcttcttttggtgctcagtgattcttcttccattttccactatattcctgaattctatgtggaatcattggtaggtttgaagcgcccatttacagccaacttggttatttgcattgaaacaatatactgaagcctgcacttctgttgtttgtacaggtagactgtttccatgccctgcggcggagtgatcctccttttgtctctcctgcagtatttcttaagcatgggctagcttcatttgtatgtacagaagcgtcttaatgatttttgactcattaattatgtccattctttcttgataaggcacctaaccacacccatcattcagaacctttaaatcctgcattactaatgttcttgctggtttactttagtagcaaaaattgtgaggttgaatgcgtataacaggaagtttgatggattcagtgtttttatgtttattttatttcacaataagcaacaccctattgcacagaacaaaataaaactagctcactggtagctggccaaattgtgggcaagtttcttgtttatgtttagcattattcagtgttgcagtatcaactaagagctctattttcttatcattaggtcactcttgttgtcaaacactttgatgatccaaggatagtgagtccagacttgaaagatcatcttcttcaaacaatatcgattcttgtacagtataaagaattcatgtttgtatttgagaacaatcgggaggctataaacagaatgccaagatcacttctgtcagcttttgataatagatcatggatacctgttaccaacatacttttccaactctgcaaaggttttggctttgcttcatctaagaatgttgaaccttcatcatctgcaattttccaggtttattttaatattacaatcacttctgttattatattcagtcttctatttctgctgtgcatatcttactgtgtgattgtgtgagaactatctatttgatcttacattgtttttctttatgaaggtcctactcagggagacatgtattcatgaagaagaactgtttttatcctttctcaatcgacttttcaacacattaagttggactatgaccgagtcctctatgtccatccgtgagatgcaagagaagcgccaggtggattttgttttgtttttttattcccctttgtgcagaacttcaactctttgctgattgatgctttagtgtcgggtttcattttcagttcagtaacaccaagctcttttctcatgtgtcaaaatgcattaaaaaactgaaatatatctagatctgcgatgaaggtgtacactaataggatctcttgacaacaatcagttccagtcattaggtttccagttaattgctttttaaatattttatgccaagggggggggggaatctgtgtcattcctgtggtataaccatgcatgtggagctaaataatggtaatcaatgtcctatttttcaggttgcagatttgcagcaaagaaagtgcagtgttatttttgacatatcatgtagtcttgcaaggattttggaattcttcaccagagagattcctcatgcattcctgatggggccagatatgaatctgcggaggttggctgaattagttgtctttattctgaaccacatcatattagcagccgatgcagagttctttgacatgtaagtccacat

SEQ ID NO: 20462 - DNA, 1333 bp, Oryza sativa
ggtcattactaaaaatctagttagactgcttatttgcgattaatttttcgttgtatgcttatttttcgttgtacagagcaatgttctccgaggtgacgcttcccttgcaaagctagctcagcttgaagaattctcccattactttatgcacatcactatgtcagcggatggcaatgaagagcaaggtttcagcactgccagtaatgaagaggacaactgctgcatatgctacaattccgattcggataccacattcgagccatgccatcacaggtcctgctacggctgcataaccaggcacctcctcaacagccaaaggtgcttcttctgcaatgcagtggtgacttcagttaccaggatagctgattcgcgcatcgaatctcggtcacctttggcaccgtaaacccgaagagaagaaagatggatcatgccggatgtcttatccatttttgctcgatttggaggcgcagacagctcggagcctcggagttcttcccttctgctttcctggaagactgcatcgccatggtggtgaagtcagaaaggttaatcttttcccttgtgtaaagatcaggtaatagttaaaacaaaaaaagattcaataacaggattgcagaaggaggcttctgcacaaggtgggaagccagtaccacccaaagaaggattcacagaatcgtgaaatttttgtaggttgtagggaaaaattccattgtaaatacgagatatgaaacagaaaggaggtgtcagatctacatcaaccttttgtaattatgtagttaaaataaagaaatactagatggtttatattggagggacctctagtttttttccctcgtatatgttgaataagagcctcactatttttcttatgcttacaaggcaaattttaaattataaaacttaattttatagttgattttgtgagttttttcatcttagtttatttacaatatttgcctttaaatcgctaaatacataataataaaaattttacttaaaaattacttttaaattgctaatgaacgggtttgcgtgaacattagcggaaacaaatgagacctcatgctttaaaatgggtgtattctaaaatgcgtaaacggctagcctcgtgcaggggcccacgtgccagaggagggccgcacacctacgtgcggaccccaccatcccacggcaccgtccacgtgtagccgtgcaagggacgagacgagacgggaggaggggtccttgtcccgtgatccgacgcctcgtttcccgggtcgcccgcccgacaggtgggccccacgtgtcagccccccacacgcgcggccaatatctctcctctcctccattcccc

SEQ ID NO: 20463 - DNA, 2083 bp, Oryza sativa
cgcgaccgctccgtgggatccccgcgcggctcctctcctgccgcgcagcgatggcggtggcgcccgacaaggaggaggcggcggcggttgctctggacaaggcggtgaaggtggcggtggcagctcccgacagggcggcggtgcccgcggtgggcgtcggggaggagctccccgaggggtacgaccagatgatgccggccgtggaggaggcgcggcggcggcgagccggggtgctgctgcacccgacctcgctccgcggcccgcacggcatcggcgacctcggcgacgaggcggtcgccttcctcgcctggctccgcgacgccggctgcacgctctggcaggtgagtggagcttcgcattatcgcgcccatggctaatcgaatctgctcgccgattaagccgcgattagcgtctgattagcgagcttaattgcgtttttgcgttccatttgcgggacccaccacggtcagggatggtgggccatggaatgcgctctgggccctggtgggccggggaacgagacaaaatacgggggcccggcaagtgggctgcgagtgcagccgggcctactggcccagtacgtggagcaagcattatcgtccattctcgctgaaacataccgattgttgtttggtactgagaatctgcgagaccgggactgtagttgtttgctgattgaaatgctcacatcttatctgctgctgtcatgggatgtgtccgtcctgattgtcatagcaacggatgggaatgtgcaccaaatcacaaggttgttaaatcagtgctgtagcaaacaggaagaagagttaggagtatacagtgttgaaacatgttattactatgtggtagcattcattgcttctggccatgcttacaggttcttccgcttgttccaccgggaaggaagtctggggaggatggctctccatattcaggacaggtgaaactatatccagctaatcttgcatattgtgtggcaatcatcgaatggaacttatacgggtacacgttgcaggatgcaaactgtggtaataccctattaatttcacttgaagagcttgtaaaagatgggttgttgatggagaatgaactacctgaccccttgtaagtttgaactctttaatgattaactggaaattcatttctaaggttggcgtcaagcatttacatttttaaattgatggtagggatatggagtatgttgaatttgacaccgttgccaatctgaaagaacctcttattgcaaaggttagtttttcatgactgttcacttcagcatacctttctgtttcctccgactggatttgattgttctacttctacacttctactgagttcaaacagttgaaatgtgtacagcaatgttactactactgaattgatggaagcgaatcatcgcataattaaaattatagataaatcttttcttctaggctgcagagaggctcctactgagccgtggagagctcagaacgcaatatgactgcttcaagaaaaatccaaatatttcaggcaagaaatcttgatttgctaatttcaaaccatattgtcttagtcttccatactcttaaatgagaatagcagatacaatattgtcagcaaaaaactgggtaacacatcaagtacaaaactgcaacctattaaacctttagtataggcatcaataaatagctagtgttccccgcaaaaaataaaaaataaatagctagtgttgctatgctagaaagaccatcagataggtaaactggctcaaatcaggggtcaggtggtctgcttttacaaatacatgccttttccaactaaaatgaaaatagcaatgatcctgaaatgtatgcctgaaataatatacacagtacagtgccttagtcgttctttcctgccaggttggcttgaagatgctgcactttttgctgctattgacagaagtattgatgcattatcctggtatgagtggcctgaacctctgaaaaaccgacatctcagggccttggaagacatatatcaaaaacagaaggatttcgtaagcatttcaaactataatattttcattgcgatgaattattacagaaacaaatgccagtggact

SEQ ID NO: 20464 - DNA, 1053 bp, Oryza sativa
tctggctggcccatggccggatccggtgctcctcgcgacggatcttgccgcagtggcacgaaagcgacgatgtcagtgtttgaagcgggaggccggcgtcggtggctggatggcaatgtcactacagtgggtagcgacgagaaggccgtgggcgatggcggtcactgacggccgccggcggacggcaggctagcagggatagagccagtggtcgccggtggatgggaggctggcacgaaggagctggtggtcgtcggtggacgggaggcccgcgcggtggacacgggcagcaacacgagggtggtgcggttggtgtcagtggtgagcctgccttggtccgagcacggcacgacttggcggtgtggcggtgaggctaacgcggtgggaggacggaggcgacggcgaggtgaccaggcggcccgttgtgaacacgagcaaggtgggtgttgaaggctgcggcaagctcctctccaggcatcaatccttttgcgacgatggcttgccgcaacaagatagccatgttggatggacttgtgcggcggagaggagatccattcttctctctcaccctctccctctccaacccacccacgtagatggatttggagcgctccggaggtcgagatcctgctttgatggctggccagcggcgaggcgtcagcgcggtacctacgcgttgaaggggattagctggtggttattgctgaatctgacatgcactcaatgacgtgggagagtatgaaactacgggtgaaagcctagtgttcgggctggcaacggtgacgcttgcgggcgcctctttcctcctggggcgttgttgcatttttctctattctcccaatggtttcttcaagtgaaaaccacgttcttgttctctaggaagggcggcggcggtgctcttggcgtcatttcctccttggaggcgtcatttagaagaaccattccgggtgttgagtgcatgtttttgtttttcagcagcaggatcagacgtagacacgtggtgtgactgtctttttctttttccgactatagtctgccaggactatagacttg

SEQ ID NO: 20465 - DNA, 3471 bp, Oryza sativa
gcttatttaggtgcttatgatcttttttgttaggcatatatgtagctggtattagacagaatattgaggctttaggtctggactttagcagcaatagagaggtttttgggctgcaattatttatagttgaaagagaaacatatataacatttttttattctaccgaactttcatgtgacagcggtgactatcgagcagattggcaccaacgtgatgtacaagttcaaggattagacaagagttggatggatcccacccctacaccgtccatttttggtgtggatgatctgtgtacaatttttgctgctaaccttgattgccagatggttaaatcccggtctagagtgcctcctcgtgaagagcttcgtagaatcagtgatgagcgggactacaatagtcttcgtattgcattgaaggcatacatcagtcgaagcagtgaaaaggtatataaatgtgcatgaattgttaacttatgctttgatttaaaacgacttctgacatgttgtgtcctatgtatcagactccagaactacgggttgttagtgtacttgagcggaaccttatcgtggagcatggtcaaggatttctgcacttcaatttcttggtgcaaccggttgatttagaatcttcaacactcaagatgttctttgcagaagttcacctggactgcaaaggagacgaagatgtgtatgtttgctgccctttgcatgtccacgacaatggtatatcttttgcttatcttgcttctgtttcgtgcatattgttttgagaatggagttttagtacccagacatagatctttattcacaagtttatagttagatcctttagcatctcctaaactatacttcatccgtcctaaactgtaatacattcttattttaaaaaagtcaacatttacaacttttaactagctagtaattaaatctccaatatgtgtttagtttcaggcatatgacatcattaaatttgtatttgaaagtactcaattattatgggagaaattaattatcaaagttctacattggagaccatataaaaaaactcgcacgccttataatttgggatggagggagtatttaacaatgtgcaatttgctatacagactgaaaatgtaacacattgattggtgtgatttcaggccactgtttcggatgcagtgttcgagctaagtttcttaggcaccccagtagtcatgtttttcttggtggccacaaagatgtagatttcccatttaccgactcatcctcaaatgaccattccaatggaactgaagatagccttcgggatgaagaaagtgagaattcaaagatcgaaacagatgataaagattcaaacagtgatacagaagaggagacagaaagcaaggatgattgatagataaaaggtatgaagattgtagggatgaggataggccctcttttcttggcatagcagtgctacaaaactgtaggttagtttcgcacttgaaggtatgcttaattacacttgggcagtcagttaactgtattacatatcttgttgatttgctttgcattagaaggtatgcttgaccggttgactgtattacatatttgctcagtaattcagtagcatcttaattagcagtctgtctcagcccacgatatcatcttttacatcacatatttgaccagagtgccaaggaaatttaaaaatagtacatatgagtgcagtcactgctacaacccattttgtgaattgtgatgcctgtcttagttacatgatcatggtatctacataaaaactaatgacgcagcccctgctatatatatctattttgtgtatattttgcaacatatggacacagaattacataaaatatggtgagacttttccatatcttctgcagacatctcacatctgcatggtgctcttctcaatataatcaaggcagagctcctgccgttctattcaaaagatctcttctgatggtttttttgacagaatgtgatgcattacaaagagtgtgccactgctgatatattcacttgttgctctagcattgactcccaaggtcaagagttcaaagcgttggtctttgagtttatgccccattggtagttcggatagttggtttcaccagaaaattgccaaaacctgatccaagcaattaccctcggcctagctcagagattgcacattgttgttgatggcgcggacacatcttcaccactactgtcaatcaccaatcatccactgcgatttcaagcagaatgcagaaaacatgagtacacacatggggattttggcgtatcaaagattatttctatctgaacatactagcagaagtgcagtaaatacatccagctccatcagaattagaggttccatcggttactttgctccagctgtcagcctgtcatatacatacgcaagccctgttttcttcacacgttattttgtgttattccctgttttcttcacatgctattttgtgttattcttgcctataaatgaacgcatcatatcatactgaaataatttcccctgctattgcagagaaatggtccggaaagtttgtgcagtctcatctacctgtgacgtttacagttttgacatgctcttatgtacttgcttaatgataaacatctcaattttgtgtactacaaactgtgagtatttgtttggctatcatcttaggagtacatatatgccaacgatttttgtgtttcccatacaatctgattattttctaattgcatactctctaaattcgctcccaaaatcagtctattattaatctttaaatccattgtatatgctttgcaatttagattgcccaattcatagtgttatagttgattgacatcatttgaaggtttttggagtaaatattattgtattcacaaatacatttacataacttattgtgttttcacgttatttaagacccgttgcaacgcacgggcataagactagtttatttataaatcgttactaaggtttttgaaagcgtattcgacgcccaacgcaataacgcgactccaaccataaccacctcaacaaaatttacaaatttaatatcaggatcagggagataaaataacaggacatgaaaatcacacgctttcacgggcccagtccggttttttcggttcaaccggtggcccggtccggtattttcgtccggttttttccactcaccagtcaccaccccatttgtgggccccactgccagtgactcttctgtccactgcacacgccgttttgaaatttcaaatagccccatgttcattgtttgccgcaccacagcgtagtctcgcctcgccttccggaagcttcgagaagcagagccgcctcctcgcctcgcctagcctcccggaagcttcgagaagcccccgcgcggcccgagccatggagaagcagaagccggcaggccacgacgcccgcctcctcctcgcgctgcgctgctccagggcgtcgctgctcctctcctcgctccgccatccc

SEQ ID NO: 20466 - DNA, 7846 bp, Oryza sativa
gccctcctcgagtcgcagggtggtagcgtgctccgggacgccggcctcctccgcgcggagctcgctgcggcgcggcgcgaggccacgatgcacgcggcgaactccggggcggaggttctcctcgtcctctccctggtccccgtcctcctgctcctcctcgggttcctcgcggcagcggcggtggcggcgtagtagggagggggttcggagcgcggcgccggcttgagatcgacggaatcggaagggttcggagccagcttcaccgttcttgtgctccgtgagtttcttcctctgttgcggggcgacgcgttgttgtgcggatgagcaggtctagctcacggcacgattgtgtagtgatatcgtacatatggcatcggattttggtcgtcccgttttagcgtttgctaggtgttcgatggaatgcccatagaaagtgtagcttcgatttcattgcttctcgttgacagagtaaaataatgcagaaccgagaagatgatgctttcatttgtctgacctttgatttttgtgaatttctctagaacatattctaaactgtgaaagctttacttattgctctcgattagacatggatattgcaacgggaaccaataccaatcatagcttcttgtttgtccagtccagtagtgtacatttttgtaagacatgggtgttgtgtcttaaaaaggttctcatatgcctcttacaaagctaaaatgcagtgctgaaaaatgtgttaatgctagaattgaattgttgatgatttggtagtactgaaaaatgactgaatgcttgatcaattgaagatatcttttctcaagttgtcactggtatgcagtctgcaggctatcaccggtaactagagaagttagctgctaatagattacttttactgactgtggctacatacgaattgtggaattgctcgcttgtccatggcaaatcataataaactgaactcatttggttccgagcacggcactggcttgagatcgacagaatctgaagggttcagagttgcttatcttgttctggtgttccgtgattttcttcctctgtttcggtaacgtgttgctgtgcagatttgcaaattacatggcctcagattttggtcgtcttttagcatttgttaagtgttcaatgaaatgcccatatgtgttcagggacctatagaaagtatagtttttgattgcattgcttctcgttgacagatgaaaacaattcacaatggaagagatgagacgcatgttgattatcggatgtagtatttctgattggtgtggcttgaatgctagattcagcctaccttgctttcatttgtctcgttgtctgaactttgatttttgtgaatttctctagaacatattgccacgtttttgtgattttttttttaaaattttacatattgctttcgagtagattgtgggtagcagtgtgaaccaatatcatgcattgcttcttgtttgtccagccagtccagtgaccggtagggtaagcagggttgtgttgtgtgataactagtttctcttatgcctctcacgatggaaagatcgtactgccttttgcaatgctagagatgaattgctgacgatttggcagtgctgaaaaatgtttgaatgcttgatcggttgaacatttgtgtattgactaaaactgtttgatgtctgtataatatctgtttgatgcttgaatattaacttttgtgaagatatgttatgcccaattcagtagcatgccgtctgctggtcttccccggtagtagccaatattgttttcgtctaaagtaataccagtaactagagaagttaactgctggagtaatggattgcattactgtatttgctgagtgcatccatgtaaagagtcctataatcgatcacttgtcattttgtcaaaggcaaattctagatttacttgtgattaatggttaaatttgagtgcacgtgcagcatcttaagaataacttgttgacagaaaaaaaattccttctgatttccctaggaagaattaatagcgattcagacttaattaagcacaacatcaggttgtagctttgctattaatcccagaacgatcacagcagggactctttttaccttcaatacgatcttttgtacgaatacattccatgtatatctggggttggcatacttatggatttctgccgataaaacgtgcctcattttccataaaccaatgcacttcccatgatctatgcgaggtcaggtaccctataaatacctgtgaactacgatactcaacgtagaccaacgatcaagtctgacaatatatcgttccacagacttctctttcatgtacatcttccccaatcttctgctgctaagtttgcggcaaaatgtctgtgctgttctttctgttggagtttaatccacttaattaatttgagtcttagcctaaacatgatcacctctgcttaatgcagaaattgaatttgattcactgaccttgatgtgaagccattgaagtcttttcttcttctattctgttcggctctcctgttcatggaaacaaaacgaacagagaaacctcacgaacccctttcagtgttaaaaatcgattgggtaattgatttagtgtttagggttagagagagggctcgacatgaccgctgcctcttctcctctttatgatatatagcgacactggtaaggcttgggggtttgtctccaattaaaattcgaatctattttgtaccgatcacacaaaacatattttatgtcttatttggttgataagaaaaccggtgggattttactcttatcctaactaaccggcattagtcgataaaatcaactaacattctcctcttgattttgagactaactaacgagtttactaaatataatagcttcccaaggcaatctgtcacaacaacattatgcgttactgagacaataagacttattgttcactatagtacccaaataaactcaagcttaacttagtgggtgttgattgaaaaattaagtccccctcatccaggatcttaataaggctaatttacacatgtactggccagaacatatcttaattaaacttaattttataagcctttaaagtatggatccatgagcaaatgctcagcttagggcctatttggttggagggactaaaactttagtcgcttcactttagtccctagagtcccaaacaggagggactaaaaagacttaaagtgcattagtccattggtccctaagggaggagcttattgggactaaagtagctcctttccacccactgccctcgcgcgtgccaaccctatccatttccttgcctcttctcttcctcgcctcgtctctctcttgctcctctcgaccccgcgtcgtcaccgccgcctccctgtgcaagcccccgcagttgcttcgcgcaagcaaatcctctaccctgcacttgcctcgccggtgtcatgcaagccaccgcgagttgcttagcagcaatggtagaggaagatcctcacgatttcttctcccaatcatacaatgatgctccggcggcccacatgaacggctccgagtacgatttctcgcaggggtcgttaggccatgctggatctagcgtcggcatccattttgggggggggggggggaggggatccaggggcctggatctgaactctcaggccgacgccttccctgatttcgcctcctaccagcagatccttcaaccgggtagccttgggttacctccgatccggccaggcagcagatccaccgtcgcaatgtcgcgccctcctttctgggggggacgcggcagaagttgtggagggagaggaggaggacgaggccgcgctaggtcgttgactattggcgcgggatccggcagggggatgcgtggatttgttcccctggctcagtgtccggcaatggaggtgtccgagctcgtgcgccctccatgtcgcatgacgggccccccttcttcgaatttggagtctttggaggaggtgggcgacttggtgcgtcattgtttcaagggacatcagtggctgaggacgacgccaatgatgaagacgaagaggacatcggtcccgatggtcagcccacggtaaaccccgatggctcaagattgctcttcaattttcttatttgcacttcattgccgtgagctcatcttattgaaactgctcttcaacattcttatttacaatgattgaaatgccattagttgttcatgtggttaatttagggttaaatcatgttttctttactagaatactcttgacaaggcatgctagacagaagaaaaaacttacacgttgtgtgaaatagcatgtgaggaattgagggatggacattgtccaaatggagcatggacaactagagggtaccagaatttgaaggagaaatatttacaaagggctaaactaaagcattcaaccaaacagataaagaatagataaataatttcactagatgcttggtggaaaaagaatcaaggtacgtagttgtgtcaaaaattgccgtagtttacacgcttttggagatttctgtgatgttgattcagtgtcaatacaggagaagggagacgccaggaaatttcgcaatggcaaccctgagtacttagattttcttatagagctgttccaaggtgttgcagttgatggatccacagcatatttccctggttttgatgaagacgaagaggaaggggaagaggaagcaggggaaacaagaagaggggaaacaacaacatgggatggttttgagaacagtcccatgagcaccaacagcaggaagagagggagcagcagctgtgatgtttccacagcttcaagtcctggaaaaaaaaagcaagagcccagtggtgaagctcatgaagggcctgctcaattctttctcctctgagaatgataagtcaactaccctcattactgaacttgttaacaacaagaagttaaaggactagaagaaagaagacatgattgaatcattgacgcattgtcaaaagttggcagttgagtgtggtgtagcagaagatagtgtggaatacttctgtgcaacatagctatttgctctcaaacacaagaaagtgatgtttgagaacattagcactaatgaagcaagattactgtggttgaagagatggtgtcatcagaagaatttgtattagaggaggtctttattagttaatcttagctgtaggtctttcttagctgcatttagttaatcttagctgcattagaggaggtttttttgtcgacccctggttttgtacactggaaacctcatgtgattacaataccattccctggatcagtagatggtatacacatgacaacattgtatatcacaagttgacatcgttatacaggctttacaatacatcaataatataagggttgcccgagtggcacccgaatagaccaagcatggtcatctacaaagaccaaaaatcctaagaagtagatatggtagcggaagcaaagcagcgacggtccatcttattcaacaggcagcgactggtgaacctaggtccctactccaccgtcttcgacatctcttcatcagcatggcacacgtacagatcgctccgacttctccttctaaaagatttaattaagcaagggtgagtaccaaccgtactcagcaagccaccgctacagaatgcatatagtgctcacaggaattcaaggatggcttggttcgtttgcataaagctagatttcacaaatcatttcacaaacctatgacttagcagttttaactgaaaaaaacaacgttattgttgaagttgttgttaattcgcaagggttcatccaccttccccaagcctcgcttggtccggtttaccctcacaaccagttttcccacattctccatcgctacgaccttcccattcatcgggcaaggtcacacctctttccctaatctaagcaaaattaaaaatctatgaggctagtcaagaatagtacaagtcccggtgctcattaaccgcgagcatgtctattcgaatatattagttttactcacactgcagtggatgtacgcttttaatcccgcactccatgacttgcccaacacatgagcctaatcccaacacatgagacttgtcacggcccggtttttcagtcaccctcgcattgcggcacctgctccaaggactatgaatccccattgcactcccgacatagcacaccccctcgagccggcagtgaggggtcctggcgctcccgagattctagggctataccatatctgatcatatacttaggtgtattttaggtttttgccgcggcattcaaacgatcgatccaattgatccatctcaaacgatcgatccaatcgatccatcacacttccgtcacaattgtcaccacttcagaatcatcatgactggggtgccgccccacaaggatttcttagtccgccgggtctatacccattcgagaaatgcggtcgtactcgtttcgtttcctgcatagcttcttgactcggtccttaattgaccggggtcggtgacttgccgtttctagaaccacccatattctattcatgtcaccccagtcgaaatcattttgttttatttggtttttgtaggctttctccgaaggagtattctttgtgggcccacctgtcagtggcttcaggctcttggggcacggtagactgagtctacggagcgcgcgacatggggaggtggtagggagggctcatggtccacgaaagttgcgtgtggggcccgatgatcagtgggatggttcacacgaacagggtgcatgtgaggtgagaggaccgtggtggaggaggtccacgggtccagcccctttggtggactgggtggtggggccaaccgatcagtggctccagggtggtggactgggcgcacggtcgactgggaagagcgggtcccacatgtaagtggttcaagggttaaaaggggattagatagaggtttaacctggtcgggcccacctctcagtgcgattagaagggtttacaaaggggattactatgcggattaggttaacaaaacgtggggcccacttgtcggtgtctcttctctcttcctattcttttcttctcctcggttcttcctcctctcattctctcttctttctctctctctctctctctctcgatacttcctcctctgctttctttctccaagtgcgcctgagggagagagaggggagggccggcgggcggcggtcaggtgaaggcggcgtagcgcggcggtgcggccgaggtgcgacgcggcttggcggcggccgggcgcggcggccaaggcgatgggcacacggcgttcgggccgcacggcgtcgagcacacccaaggtgctcgtccgtgtgtctcggactagcggcgttcgcaagatagcggcgattggaggggcggaagaggaggacgacggaggaggagcgatattcatagccattgcttaagagggaagggcaggacgccgatgcgagatgggcgaagagcggctggtgagcctggactataatggcgatgaaacaatgataaagtttttttatcagactaataatgtgagatcttattgtaaagatttgattacaatgaatataacggtataatcagatcataaattggattgatggttttgaaggaaaatcatttggaagaatcataatatgcatgctatcaacaagtaatcgagcgagcccacattcccatcctctctctcatgactctgttggtgagtaggattgggcctaatcagatttcatgtcgatgggcgtccgattgttcttgcgtctgacatgaagcattatcgaacttgcattgtcctccagttgccgccatataactcctaaagtatttcatggcaatggcggtctcctccagttgtcaaatggtgtagggctcat

SEQ ID NO: 20467 - DNA, 34738 bp, Oryza sativa
atgtatacctaagatttttttttaaaaaataagcatatatactaagtatttggcatatgtattcagaacaacaaaaaagccacaaacagtccaataagcaatcaaactacctttttttgggcatgcttcatcctccctcctccattggcccattggcccaagttactaggcccaaattacccactcctctcatctctctctcactggccactcacccctttctctcccctcccctaaccagctaaccctagcaaagctgcgcgggcggcggccggcgagcggcgagggagtgaggtggcatggccacggcgcggcatgcggcagcagcgggcttctggctgtgggcgcacaacgggttggcgtgtggccgtggggcatggtcacggcttggcgtagccatgcggggcagcggtgcgacgacgtgggggcgggccgccggggcagtggcgacactggcatagggaccagcggcggcgctggtagtggcacaggttagggactaggtggactagggccttgggaagttgggggaaccaggaacctccaaggtgaggtttttatgcagtatttttcagtgcttgattgatcatttagttacattcattgaaaagaaatccgtattgcaagttaaggataaggacatcattactcatttttaaaacatcaagcatcgaaaagttgatatctaaattgtaatacttcttctaactgttataaaacatgccccaaaatcacatcggaaaccaaacgcggaagaaaatgccataggagatccaaacatgatgacgacaccgaggcatgatatttgataacagagttcagccgaggcctacatctccggggcactgattacgggtgctcctccccgatccagcatatacagcatatcagagttacaacgactcacggtcggtcgccgccggcagccgctccctctcgctatgctatgtcgccatgcggttataacaggcacgcccctctatttatgagagaacctaggacagagtccgactcttactctagtcctaatacctattacaactccaagtcctaaactgtaacctactacgtacacatatttgacacaaactctaacaaactccaccttggcaaatatgccacgccaacctgaatctgttacttgctcaaacctccatgtaccaggacttgagttggttccttttcgccgctcacgccaagttgccccgacaagccttcaccagactcaccgtaaacaagagactccgctatccctgtaatttcttcctcctgactccacctgcaacagtgctccaccttctctcctatcaccataatcgtcttgccaagcgaattgaattcttcctagctgtcacatcatagactctccgaagaccatgttcacctctatctaccgtcttaagtttgacttgatctaatccatggccagataaccgatgtcatcaccaaatagacaaaccaaactcaccagacatgaagagaaccctttcttccgtcttatgaaccgagctaataaatccaacatccacgcttctccgtatccgtagactgaattcctgataatctgagaaaattcactgttgccttgaatcatccgaagaaattactaccatagcgctcgctcttcctcttcagtgacgcagattccatatatccccatcatgcaaactccgcagattctggatatatcatgtactgcaaacagcctgttgatgccctcaacgattttcatccgcggttgctcgggaccttctagttttggtccactcgctgccttcgtttgagtcacgtcttgactgaacacgccaccttgccttgccacatgctaaatttttccatacaatagcatgaccacacaacttgaccaagttcctatgcataatcaattttaccgttcggtctccacgtgcaaaccagccaagcaaaaacatttgactgtgcatccaaaaagtccacatgggcccacagccaactagactcggtcaacaacagtcgcagcaactgaccagtcgcgtccagggaccagatcgaaacaaccgatcccctcgcccttctgctcgctcccctcagcctgagtgcgccgccgcccagcgcttgtcgcgcccctgccgcgccggccgctacttcctgcctcaccgtctcctccgcgccgccaccgaagacgctgcttcggttcccgacgccgccgcccgtccagaagatgctgccgcgcagaggagtttttttttgaaagattaacggcaggagctctgccggatatattaaaaagaagtaaaaggagtcagacaaaacgaaaaacatcaagcttaggacaccgccaatgacaacgctgccgatgctgccaccgtaggcttcccgccggtgaggatgctgacgaccacggtaacggcctccccgacacaggagcgtcgctgccgccccttcgccggtacttgccccgacgacaacaccaagccgtgctcctgccactcgacgctcgtcgtcccaaatcaccgccgccaagaggtcccaatccgacttttgcttggtgatttgttcgattgcaaaatctgcaatcccgtggattaattcctgttgctgagtcctgggaatttgatgtccgattttaagtccaaaccgaaacccacttccttttccctttcgtgtgtgtccagtccaactaggcctcctctcctggactacttgccacaaacgccgccgtgaccgaacactgtggctccgtcctgattggagtcctgtgcaaccatgactcctcccgagcctgcttcctcctggcgttgcttctatcaatgccgctagcctggtctcaacgtgcggtgcatgcacaccatcgcgacatggacttccaagccttcacgtatctcacggcttctgcaccttcccttctgcacttccggccaactccgctaatgacgcatgccatcagtttgtaaccaatgcatacgattgtgcaaagcctctcggttgaactgacgtttccacgatacagtcggcccaatttgccgatctggtcgtcctcagcccgatccgcacgtacgccgccctcgaagcaattctgttgcacaccttgttgaagacacatccaaaacagcctataggatccaccgttgcggctccacctcgagcccgcaacccgctctgacctccgattgaccacctgtcaatctagccgcgagccgaagccgacaaatcacatgccgtcttcccagccgctgaacgacccgagtgctacgtctagccatctccctgtcgaacgcaactcatcgaaaggcccgggacacccggcccagagtgttcgattccaccgatcgagaacgccgatcgcctccagcttcaatcaacccgagcgtgcggccgcacgtctccctgtcgagagtagctcactggaaagttcgagccacccgcccgaagtgtccaacccaccgattgattcgccaatcgcttccgccgccatcaacctgagcaccacgtctggtcatctccctgttgaagcagccatcgacggttccggccgccgccagaagtgtttgattccaccgatcaaattccgttgatcgccgccgtgctccaccttgcgtccatgtccgtctctggacaccccgtgtagtcgtcgcggcgtggagcacctccctcgtacctctaccatggatctgccgcacgctctgataccacttgttataaaacaggccccaaaatcacatcggaaaccaaacgcggaagaaaacgccatagaagatccaaacatgatgacgacaccgaggcacgatatttgataacggagttcagccgaggcctacatctccggggcactgattacgggcgctcctccccgatccagcatatcagagttacaacgactcacggccggtcgccgccggcagccgctcgctctcgctatgctatgtcgccatgcggttacaacaggcatgcccctctatttatgagagaacctaggacagagttcgactcttactctagtcctaatacctattacaactccaagtcctaaactgtaacctacaacgtacacatatttatgtatttcatcctccctcctccattggcccattggcccaagttactaggcccaaattacccactcctctcatctctctctcactggccactcacccctttctctcccctcccctaaccggctaaccctagcaaagctgcgcgggcggcggccggcgagcggcgagggagtgaggtggcatggccacggcacggcatgcggcagcagcgggcttctggctgtgggcgcacaacgggttggcgtgtggccgtggggcatggtcacggcttggcgtagccatgcggggcagcggtgcgacgacgtgggggcgggccgccggggcagtggcgacactggcatagggaccagcggcggcgccggtagtggcacaggttagggactaggtggactagggccttgggaagttgggggaaccaggaacctccaaggtgaggtttttatgcagtatttttcagtgcttgattgatcatttagttacattcattgaaaagaaatccgtattgcaagttaaggataaggacatcattactcatttttaaaacatcaagcatcgaaaagttgatatctaaattgtaatacttcttctaactattataaaacatgccccaaaatcacatcggaaaccaaacgcggaagaaaatgccataggagatccaaacatgatgacgacaccgaggcatgatatttgataacagagttcagccgaggcctacatctccggggcactgattacgggcgctcctccccgatccagcatatacagcatatcagagttacaacgactcacggtcggttgccgccggcagccgctccctctcgctatgctatgtcgccatgcggttataacaggcacgcccctctatttatgagagaacctaggacagagtccgactcttactctagtcctaatacctattacaactccaagtcctaaactgtaacctacaacgtacacatatttgacacaaactctaacagtaactttatcattttctatcatttatgtatttcatatgttagcactttgatatgtttactgattagtatttctatatcttagactatttcaagtgacaatcaattctatttgtgtgaacttatgctcaattttttgttatatacgttatatattatataattataagcgtgtgatactatacaagctaattattaggcttttaaatgtatgaataaaatttttctttaccccttcctatttcgaatacacaaatgaaaattctaggcccgccaagatggtgccaccatcactgtagtataaccattcgcaataccaatgagtgtatgatttattatagaaaaaggtacgaattaccccctaaactatcccatttgaccgaattaccactctaaacctgaaaaccagagagagaggggaagaacctgcattctaaaacaaaaaaaataggatatatgagggaaaactatagatttggccttttacagcttgaacttatcataaaaaaagatgcgacaaagaaagctaccataaaagataatacctcatcatctttaattaatgtagggtccctaccaactccataacgtctttggtttccgtcacatatatttcgcaggtaaacaaatccagcctgaaatataaatgttaattacggtctgagagcgaaaattcaattgtttggcacggtaaaaattcatgatgcttcatttactggttcaggtgcagatttatatcaaggcacattaacacaggtttctatatatccttcatttactggtagaaattttacctaatagtagcaccaaggttcattttcaatcacactatcaacactcaacagacacatagtgcagcattttagcaaaacctacaatattcagtaaatcctctacattgcattgcgcgtggaacaaaccatcctaacaaacataaccagaaattaacatcgcgggaaccagaaaagtgaaaataacatcgcaggaaccagaaaagtactccctccgtttcaaaatgtttgacacagttgactttttagcacatgtttgaccgttcgtcttattaaaaaaaatttgtgaaatatgtaaaactatatgtgtacatgaaagtatatttagcaatgaatcaaatgatatgaaaagaataaataattacttaaattttttgaataagacgaatggtcaaacacgtacttaaaaacatcacgtacttaaaacaatagacatccagctctgatgtaaagcgagtcagggtgcttcagcaagccgtgcatctgcttaaccgtgagcttcatggtgaagaacttgtagaggaggcagaagtcgctggaggggccacagcagttgcccggtcatccattgctcgacgtggtcaacctggttgtagatcacgttgatgacctcgtggtacgtcttaagcctgtacagctccttgaagtagtccgaggagaggatgttcactgacaggaccttctccaggagcacttcgggacttcaatgggcctcccagatgactgtatctccatcaccctctcggaaattaacaatcaatccatcaatccgtggaggagtctcctaaacctaattttaatctagagtataatctatggactaatttactattgaacatcttacatctccaagaatcagtatctcacggttcttagaaaagataaaattgtctaatcggaacaggatttcttaggaacaagggagagaaaagtgttcttcctttttagaatcaacatccaaactttcaccgtggaataggaagcttaccacttttttttctcgccaggatgcgaagcggcggccgggcgcacggagggacacggacggggctgccacttccatcgggcctggtgactggtgacaacggtgcttgagaaagaggagctagcgtttgaggtggtctggtccgatgggggccgcggacttcaagcgacagcgatcttggcggcgtcgaatcggacgatgcagcgcgaccgtgagagcgaggcgacggggttgcaagccttgcaggaggtttggcagagattcgcgtcgtgtgaggggatggggaggagactggggcggaggagaggtgcgcctctgctgccgtcggatgtaagtcattggataattttggatcgtttgatgtgtcacatgatggatgatgaatgagtaaaaccattcgttgaactataggatagaggtagatagactactacaactattaaaagcaccaaatttgaatttagaccaataactactttatttaaacccaatgattattcatatcaattaacaggcaattaagctacacgatttgtataggtgcttcaagatctttgcattatacattatagggtaacttctaagggcatgtacaaccaaccaacaaagctcgagtccaagctataaggagattccctgtgaaaacaatgaaaataatgtaataatcttaaatcataaggaaattgaagtgctaatctcaaatagaataaagaatgaaatccatataaaacaagttgtttgagaatccatcgtgtgttgcactgttgttttaacgcaacacaaacatattgaacagatgttgctgcaaacacttgttttgttttcagaagcaaatcaaacccaatggtctgttgcaatgctgctctactcttgttagatgtttttgttttcgatcaagttcatgtcttctgtaaacattcttgcatcctttgctacgtgtgtaattccagatcaatgcaacagtcatgtgttaacttccatttttggcggagagtcatgtgtttgctaccccttcccatatgttgtactcatgcacaagctaaggacgcgtttgatctgttgtggacaaaagagtgtcttacatacacatttttttttgagaattacacagtacaatacagacactcacagcgcacgcgcactcacccctatgaacgcacgcacgcaaaccctacccctatgagtatttttgtagactgggccggcaaatcctcgagaatgacaaagtcaccacaggcgtctcgctgtcgacgggcacgtcgcctaccactgaaagcacaacgccgttaaatcctggaaaattcgctcccatagggagtcgaacccaggacctcaggtgctattgaggcacttgtaacccctaggctacatgccctttcgcttagatacacatattttgaaactgttggactcatgcatttgctcatctatagaatggggatggaccaaatttgaatgaccaaaaataatttctaaggacggaagatactcatcaattgtgactgtaaaattagcaaaagcaactcattctaatgatacgaaattctcattcataatgcatgtttttttattgagaaaattcatagtgcgtgtcacaaatggttgcagaatcttatatataccacaatcaggcagggatgtgaagcataaaaaaacaaactatgctaccaatgtatacatttatcaattataggtcgtatgttttccggctgttaattacatgagataatggagtccaccaaattcaatcgtagtgtttacatcatggaaaggtagtcattgtcgagcacgttctggctactctagggataggcggcatggggcttctgcttgtccttgttgggcctgatagtgtcgccgttctggctgacaatgagttcagtgcgattaacatgggcgtcgatgacagcgaaccagacaatgagttcagtgcgattaacatgggcgtcgatgacagcggtggttcggacatcttcggctttgtacctgcttggcttgatggcatcatcgttcttatcgatgagatagcgtcggcagcggccgcgtaaggggcagcatgcttacactttgatgatgacagctattggtccgcattcgaattgcattcagaagctgcatgaggcggcagcatgacttttggttatgacgacagttagtagtccgcatcgaattgcattcatgagctgcatgaggcggcggcatgacatttggtttcaggaaggtgtcaaatagatttttctcttatgatcatggtcattgtactcagttgtgccagataaatctatattctattatataatgtcttaatcttttgaaaatttgatgccgctactacatcttactatgttctgtaaaaaaaattctgagaaaaaagcgaaacatcaccccttgatttcacttagtacagtagattcagtattttacaccactagatctattttctttatctttacatattataaaaattcaagatgtttttgcctgattttcgtacatcgttccgtgtcgccacctgcgcgtgacgatgggcctcatcggactttacttgggcttggagttacgtacatggattagattaggtttatttacagggacggaatacgggtgcaaattgttacagttgtagtatgatacagattatcgtatggagcaataacatgtttcatatatttcagcagtgggttgtgggagaggctgccggcagcaaggttaattttgaccgccttggtagcgagagagggttgcagctgccgacaaggatttgatagccgatgggctgaaaggagagctcagtccggtggaggaggtgggtgtcgatgctgtgctggggacaccgcccgacgcggggctgtggaggagcagctcacgggcgggagatgggggggcttagcctggcagtagaattaacgaagatggagagaagaaagagtcgatcgcgaggaggaagacaacagggaagtcgtccgatcgacatccgacggctgagattgccaaccgataataatctatctactactacttaaaaaataagaggtgcttccatcgtccgtcaaaaaaaccgggtgaaaaaaaaccgggcagaaaaaaccaagtttgtccgataaaaaaaccggacgaaaaaaaagtccgatccaaaaaaaagtgaaaaaaaaaccgggcgaaaaaaacacccgtccctggcaaaaaaacacccgatcccttaaaaagggaaaaaaaagtccgagagaaaaaccgtttaatgaataaaaaaagcgaaaaaaaaagagtccgattccctggagaaaaaaaatctgatttccctggaagagatccgatctgtatactactacttaaaaaataagaggtgcttccatcgtccgtcaaaaaaaccggatgaaaaaaaaccgggtagaaaaaaccaagtttataaaagaaaaggaaaaagctgaaaagaatctgactccatcgacgcggtaaaaaaaggcgaaaaaaaactttccgataaagaaaaaggaattatatgtgacgcggtaaaaaaaaataaaaaaaccaggcgaaaaaaaagataaaagtccgataaaaaaacggggcgaaaaaaaaacaaatctgtcctatccaaaaaaagccaaaaaggggaaaaatcaaaacgaatccgactccgtcgacgtggtgaaaacagggcgaaaaaattccaaagtaaagggagaaaaaaaatcaaaacgaccgtcgacgcggtaaaaaaagggcgaaaaaaatccaaagtaaaaggaattatatgtcacgcggtaaaaaaaatcgatcgggcgaaataaaccgggcaaaaaaaaatctgtccgatccaaaaaaaggggaaaaaatcaaaacgattccgactccgttgacgcgataaaaaagggcgaaaaaattgtctgtttctaaagaaaaaggaattatacgtgatgcggtaaaaaaaatcgaatcctattatatctagaaaggtttgacactatgtgaaagtggtgaaaaaaacccttcgtaaaagaaatgcacgagaaaaaaaattaaaaggacggaaaaaagcgcggaggaaaaaagtcaaatttatattcgtcgttttttagtccatttatatatcttctttatctctaatctaatctaatctaactataaaaaagagaagtttctacagtatattaaaaaaggaaaaaatgcgcgagaaaataaaaacggtttaaaaaaacacgtgagggaaaaatgtcagaaaaaagcacaaaagaaaacgcgctagaaaataaagtttcgtagttctaattttctgattgttatcgacatggttatgcatgaaaaacgtatattatcattacgttttttcacccgttgcaacgcacgggcatatttgctagttgaaaataaaaatagaaaagatccttcgtggcgtgacggccgggttcgctgcatcgggcacattcggcgccgcagcagcccgcgtgcggcatgcaggaatggatgtaacaacacctatactcgccgtcagggaagcacgcccctgcggccttgcggtggccggtgccaagccgcctacaagctgtttcacaccggcccgcgactcagacgccaagacgaacaaccccatggtgtgtccggttcacgctaaaattgaaagtttggctgaaattggaacgatgtgacggaaaatttagaagaaaaattgaaagtttgtgtgtgtaaaaaagttttgatgtgatggaaaagttggaagtttaaaaaaaaaatttgcaactaaacacggcctcagtaactgaacgaattaactagagtagttcaataaccttaccttgctgatgcgatcgtacatgccttttgtattgtcaggaagcgtggatctccgacttctgagagaagaggagcggcgtgcgggcatggttggctcgatgatgccagaagttttttttttttttgggggtggctatgtttcctttttgtttttttccgtatcattttcaaggggcatggagtttctttatcacggatgaggtattgagatacgagtgggtgcgtagctgacaatacagacgatatccagtggcatgggcacccacatggaagatgattgggtgggttgaacttaacttcagtcttgtgtatttgtgaccgtttggagctagcctcgcgttggtactcatgtttattttattaattaattagaattacatgtttgagatggttattttagttaatataaagggagggcccactttacatcgtgggaaatcaattttagactatctcttgaaaatattagttttctcactttctatattcagtttaggagatctgaaaaaatagttttgggaattgattattataccactaaaatcgccagaaaactgctgtgctgtttatattccatttcatgattggaataaaacgtttgatatgaacagaaatgatagccatcatgatcggaaatttccgtaccttttactaaattgtatcttattcactaataatattgtgttagtaatgtatagtagttaatttaattttttatccattcaccgttgtcgcaacaattctctcatttacaacccgttgcaataaacgggcattttgctagtaactgaaaaaaccgaaaccccatctccccaaaatccactccaactgccctccctcatgggtctcctctcctcctcacgcaccctccctctcgtatcctatctttttgtccttccatccatcttatatagttcatccttatttaggtagtgcttaaatgattaatctatgatccaaattatctttctcctttttttctctaattaagttatatcacatcaattgcttttagcctttatatgattaatctatagggaaaatattcctccttgattgcatctttcttgtcttgtgcaaaacggcggagtcattgtttgatgggtttagcgtcttctttaacatttaaggagtgctcaatcaactctataggaataccaggcatatcagatggtttccactcaaaaatatctttattagcttgaagaaaggtgatgagcgcgctttcctatttacaatctaactcagcgcctattacagcagttttggaaggatcagatggatcgagagtgattttcttggtcttggtgttgatttctccggtctttgatatcttgggcgcaggcacttctccttcggttgcggttgatgcagccagtcggatctcatcccgagcgagtgtaatctcacgcgtctgggccatctcacagctttccttgtcgcaggtgacagcttgcttgatgtcgctccgcaaagatatgactcctcgaggtcctggcatcttcatcatcacgtaggtatagtgtgggactgccatgaatttggctaacgtcgggcgtccgagtatggcgtggtacgccgtctcaaaattagcaactttgaagcaaatattctatgtgcaaaagttctcctgagtgccgaaggtgacgggcagagtgatctgaccgagtggagtagaagacaaccctgggatgactccatgaaagggtgcactactcggcttcagctccgtgcgagggatctgcatatcgtccagttttggcaaaaagaatattgagtgcactaccaccatcaatgagggattgtcggagcttgacgttgcgaatcactgggtctagtactaggggataccgccacgggtggaccactcggtcaagatgatccgagcggtcaaacttgattgttgtctctgaccactgaaggtattgaggcgtgtcgggctggacggcgttgatctcctggtcagttagcttttgcttccgctttgattcgtaggcttggggtcctccgaaaatatggttgagttccttgcgagagtctagaaagccagtcggtccgtcatcttcattatccttcttttttgaagtgctttgctccccgtcagccggcttccatgctttcttggcgtattgctctgtgaactgctggtagatgatgcaatctttgaccgcatggtttgaattcgggtgatgcgagcactgagcattcatgatcttgtcgaaagtattgatgcacggtcgctgtcgagaagaaggtgctgtagtggccacaaggtcctcgggcttacgcttgcgatccttatggttgtacttccactcccctctgctgctggcgcatctttcttgggcttccaattgctacccgactgcttggacacgatgacggcatcatcggctttggcatactcattggctttttgaaacatctgcttgaccgtcctgggatgcttgcgtctgaatttgccgactaagagttcatgacgaacgcccatagtgaaagctgctatgatgatgttgtcggtaatgtcagagatcttattgcgttgttcagaaaaacatcggatataatcccaaagggattcaccgggcttctggatcacattgtagaggtcgaattgggtgccgggacggtcgaaggtgccttggaaattggtgatgaagtgcttgtgaagctctgccgaagatctaattgtaccatggggtaacatgtgaagctaggattgagcagaatctgctagagctaccggcaagtaatttgccatagccgtgctatctcctcctactgcgcaaattgcgagaccatatacggtgagccaagactcaggttttgttttgccgtcatacttctctatcctagtcggcttgaagccggccggccaatctactcgacgcaggtcgcttgtgaaagctgcaactctagcttcatcatcgtcgtagcggtctattgaacggcgtggaaggtagcctctttctgcgtggcgccgattgagtgtctcgtgaagatcgacgggctacctacgacgtggagagctaggctgttcggcacggcgctccctgtgcctgtcagcagacgaatgaacagatcgttcatcatggtccctgctcctgcgattggatcctgacgcggcgacgctaaggcttggttgatgataatcttgagatcggagaggcggaacccggctaccagtcggcgtgcggacgcttgcagagttaactgggacctaggcgacgatcatggtcttcatctggttgatgatgttgtggacatggttgggcgcgtctttatgaagcaaagtatccagaagagtgattgtcgctaacgcgttctgctgtggggtgcgaaagaccactgtgccttcaacgtcttgttgctcgatgagttcgcgtgcttgtcgcccagcctccagggtgtgttgtcgccggtcctcagcctcctttgcggcccgctcgcattcctgctgctgacgctgcaaccggtatcgctcttgtgcttgtcgttcctcttccagtcggtgacgctcagcttcctgtcgcatgcgttgttcttccgcttcacgggcttggcgctgttccgctgtctcattgtcggccatgaaaacgccgaagaagagaggcgtgtaattgtcttcatagcttttgtcgaaatcgtcgaggttgctaaagtcgtagttgtaaccgaagtcatcatagtcgaggatctccgttggtcaagagtcgacactaggagagatgaggtagccatccagctcttcggttgaaaccatccgagaggctgaagtatgatgccgactccctaaagctagattggatcggggccaaagccggatctcctctagacctacgggaagaggacgcccttgtggtgaagactgcagccagatcatcagggagcttcatcagaatcggaggatacgccgcatcatcttgatcaggtcgcgttggagtagatgggatctcatctgtgtggtttgaagccaactcagatgggatgatcttggagtagatctcaggccgagtttgggagaccgaatggtacagagaccgcatctctttccgacttgtttgaatccgagtcgaagagagagatcttgccgaagttgtcggtgacgaagtcaaggctgccgaaccgaaacatctgcccggaagggaagacgaagtcgtcgatgccggaaatgaatcccatcgcactaatcggcgagaagcttgacgcagcccctacctggcgcgccaactgtcgaaacaagatttcggcaatacaaaaagggggtggctatcaagcaggaaaagtggatgggtttggagacaagagatttatacaggttcaggccctctcaacgagaagtaataccctactcctgtccgaggattgatccgccgagtgtattatcgatcgtatgatctgggagaaaagttatgccccaagaggcacccgaacccctccttatatagtgggaggagcccgtattacaacatatagcccatattcttaacggaataggcaagtaaagataaagtacaatcgtaaccgactagtatcctaggtatttccttaatacataagttaggaatttaacctgagtcccctaaagatattctatctatatatggtacccccatacctagtcggatatatatgccgtgtgggtatggggtatccataatctccacactcgagcttatggatatcgtggtagctttcatccgaaagtattttggggtatccaattaacgagggatggaaatgcactttcccctaatcgattgtttggttttgagttttcaaaaatagtgggcatacttagcatctaactacctaaagtgctctaacaaaatgaattagaaaggtgaaggtgaagcttggttttgagttgtgaattagagggcttcacaactccacccctgattcaaatctaaatttaggagttagagctcaaccaaatggatctaaggtaagagatagattcatgaagaaattaacttaggagttagagctctaccaaatggatctaaggtaagagatagattcatgaagaaatggtccctttggtgtggtaactccggaactcactaatttctaggccttaacacttcacttactaattgcttttagtacaacatcaccacctcctaaagggatgaaaactaactgccttcaagtcggtgacaaaactagtccaaccgagctgattacaatggatgtgcagagttgtcatcacgtgccaccccgttgatctagctttccttgttagtaaaatgaaccttcttgtagatgacgcatactcttgcctaaactccagctcggcaacattcttatagagagcatcaacagcagcaggatgattgataatcgtatctattcattcgccaaactatcctccctaagagacaacattgagatgcctcatcatctgcaaataacttcagatcacgagcgcacatgtggcctagctcatactactgcagcaaagaagaggcttcacataaaaaagagagtcattgattaattcttccaaggatggaggacctgagtggccaagcaggaattctacgtcgttttccaacggcgtcttgctagctccacgacggtgttctccctgtgccttaaggcttaaactgatcagcatcgccttcaacgtcgtgcgcccggcgtgcccgccatcgtcgagcatcacctgcactgtccgtcctccagccgcgccgcagccaacaacgatagattttttttaatcagactattataataatgtgagatcatgttgtaaagatttgattacaatgaatataatggtataatcagattataaatggaattgatgatttagaaaaaaatcatttggaagattcataatatgcacgtcatcagcaagtgatcgatcgagctactagcctttacagtttccatcgcctacattcccacatcctctctcatgtctctgctggtgagtaggattgggcctaatcagatttcacgtcgatgggcgtccgatcgttcgtgcgctcgacatgatgcattgtcgaacctgcattgtcctccagttaccgccatataactcctaaagtatttcatggcagtggcggtctggggagaaatgctcgagggaattttgagcttcgcatgccaggtcatgaactccaatatcttacagaacctcagtgtggaggcatcctagtccgacattatcagatggcgtggggcttattcaagggcatgcccaccatgattcaagggtattcagacgtatatcaagaattatataaataaaaaaataagcatatatactatgtattacacgtatctatatatttttaactctactattataaaaattaaagatgtttttgtcaagattttgatacgtcatccatgtttgagtaggttttttaattatatctgtcgtggctcatgtgggaaccaacaagcttttaaacttagtccgactccaattttggtccatatgtccatcgtccgtatgtatcccgctcacgctcctgtccgtcttgccgatttttctttctttcatgtgcgttaaggattcagctttgtggagattatgggtaccccatacccacacggcatggttatccgagtagtgtagggggtaacttatatttatgaaatatgtaacagatcatgacttgggtattacgtttccttgtatattatggaacggactaaagttctggtttgataagattgtaaagtagatttaggaaaccgacaccgtgttggttaaggtttctatcttgtaatcctgccccccatcctatataaggtagcaggaggccctctaaggggcatgaggatataagatcgtcagatctatactatactcggcggattcaaatccccaaacaggagtatggtgttacctctcattgagagggcctgaacctgtctaaatcccatgtctccgcatccatccacttttaggtctcgtgcgctacccccttttattattgccgaattcatgtttcgatagttggcgcgccaggtaggggttgcgtcgagtttttcgtcgagaagtgcaatggaatcaatttgtctggagatgtgatgagatcgatctcaatgagttcgacggtttcaattttccactcgggtttgccgttccaatcaaacttttatcagattagtttttcattactatttgatctcttgatactttctggttctttatatgcaactatgagatcaaggctaagcggtcggtgacctcgcccatccggccgctgatccgaacaccgtcacgtggtccagcagttgtccctgcacgcggagcagtgctgaacatcaagctgtcatcggctacagggggttatacacgctgcatggcgcgtcgtcggctgtcactcatgattcagcctcattgctcgatccgagtttttcgtttcctatccatatatattatatttatttctaattgcagattgatctgttctagcactactttttttttacagtaccgtcgatgccaagtgatagcttatttttgggcagtactcgtgcgtactccacctcggctatggaggctcaacggccacgtcatcaagttgttacaagttgtacatgtatatatgcacaaatatatatatatgcttgggctagcatacgaacacatggatctgcatctggagtacatgtactccctaatggcggttgtttatctaatcgccttcgtcgttatcgactggtgttctcgccttcatggttggttggtcacaccaccattgatgggcgtctacgtcttcaccgatcggccgcctcgtctgctgccgactggtgtctccggctacatggctggtctattataccactgttgttgggcgtctactacttcaccgccggcctgcctccgtcgccaccgactggtgtccttgcctatacggttggttggtcacaccaccgttcatgggcgtcaacgtcttcaccgactagcttgcctttgccgccgtcgactggtgtctccgcctacacagctggcctattatgccgccgttgttgggcgtctacgacttcaccgctagcctacctccgttgccgccgaccggtgtcctcgcctatacggttggttggtcacaccaccgttcatgggcgtctacatcttcaccgactggcctgccttcgtcaccgccgactggtgctttcgcctatacggcatctacacctttactgtcggccgccgtcatcagcgccgattggtttcttcgcctccatggttggtgtactccgccgccgttgctgatggcgaccatgtcttcactaccggctgcagtcatcgccgccgactggtgttttcatcaccattgatagactattttgtttccccatcggtcacctctatcgccaccgagggaaataaaaaaaaagctaagtcatcaataattttctttatatgatattttccttttcctctgcctcactacatcaactggttcgccattgactagtgagtcgggggctacagatgttatatcatatttttttcaacacttttcataatatttatcttgattgctcgcgacataatctgagtacaaaagtgcctatcgaattatggagtttcatcttcctttgctttccgtttggtttgccaatggatagttgcttttgggctgattcctagcacccgggggctcgttggatggactgaataacacaaggtgctaagtattactcggaataaatcaaaagcatagagataagataatttattttctgctcttaacaattgcaagagtacctgagtagtaaacttcgatccgtgaaactttgttccattaatgacgaactcatgtcactcgtatgcatatttgggagatgcttgggggctatgactagtcggacagagtgtttaaacgtacggagtcatctgctcggggaaatcgaaattgacaagaggagaaatacatatttataaacattttaaaatacttgaaatttcctcgagtattatatttacatcagatactactcatcccatatgtttgttctgtaggattcagatccagatatgcataaaagagattcatggctttaaacttatctcttacgctccaggaatggatcagtcagaacatcatcaaccggcttgccttcgccgccgccgactggtgttttcgcctatacggttggttggtcacaccaccattgttgggcgtctacgtcttcgccaccggtttgccttcgccgccgccgactagtgtctctgcctgcacggctggcctattatgccgccgttgttgggtggctacgtcttcaccgactggttgcctcgctgccgccgactggtatcttcgcctatacggttggcctattatgccgtcattgttgggtgtctacgtcttcaccgatcggcttgccttcaccgccgccgactggtgtctccgcctgcacggctggcctattatgccaccgttgttgggtgtctatgtcttcaccgatcggcttgccttcgccgccgctgactggtatctccgcctgcacggctggcctattatgccaccattgttgggtgtctacgtcttcaccgacaggcttgccttcgtcgccgccgactggtgtctccgcctgcacggctggcctattatgccgccgttgttgggcgtctacgtcttcaccactggctcgccttcgccgccatcgactagtgtctccgcctgcatggctggtttattatgccgccgttgtaggacgtctacatcttcaccggccggccgcctcgtatgacgccaactggtgctatcgtcttcacggctggccacgtcgccgccactgtaaataggcgtcatcaccttcaacacaagctgtctacgtctgctgccgactggtttcttcacttccatggctgcatgattctgccagtgttgattggccttatcgtcttcaccaccggtcatctcgtctgctgttgactagtgccctcgcctctacggctggtttatactgctaccactactgatggacgtcatcgttttcattgctggccgccttgtctgacgccgactggcatgttcacctccacggctgcacgtcttcgtcatcattgactgacgtcatcatcatcgccggtttgccttcggcaccacccatggtgtcttcattttcatggctggcctattttgccgctgttaaagaacattttcgttttcatcatcattctacttcttccgtcgccgactggttatgccgccgccaactggtgtttttatcttcacaactacttgtcttcgccaccggtttgcttctgttgccgctgactcgtgctaacgtcattacggctatgcaactttgtcaccatggtggagctatttcatcttcattgtcttcggcaccggcaaattctattgcctctacttttggtgttccagtattcaagatttctactcgggcatctttaatatgtatcttcactcaagtaatgagtactcgacgacaagaggttacagtttttgactctatgttcagttgttttctaactaaccaaagagttagcggctacgcaaatacaaggctcaaaaattcgatcaaccaggagattaatcagcgatcgaatcgatctacaaccaggcttgttctcgtcatttttactctatcagtgagatcaaatgcatcgccgccatgctgccatgtttgttggtccatcggtttcgtcaccaaggcaagatttaaagcaatcagcaagtagttgccgtcgaaatgatgcaaatatcaccgtcggccgagcctgtatatcaccaaggcaattctatttggatacttatggcaagacaagaagtccaggattcaaattaaatatacctggtcaaacttgtggtcaaggaaattaatccatacacaaatcagatattacatacacaaatcggtttccaaactaatccatgcatgtgctagtgtgctaccaagaccccgtgtcagactcggctgaacgtgctccagaatctggccatgtgcatctcctgtttgatcactttggcttgtgccacgtacatagaaaatcagcaattaacacttataatcagaaggttgaccaggactgtgcatgtaaaattgacaatatacggtcatcaaggtcaccgatcatcaccagcatctgtcatcgtcatcagctggtttctacgcctccacaatcggtggatcccgccgccgtcattgatggcgacatcgtcttcatcttcaccaccggccgcctcgtttgccgctgatatcttcatcttcaccaccggccgcctcgtctgccgctgttgccgactagtgttctcgcttatacggttggtgaactccgccgccgttgatggacatttttatcatcaccgctggtctacctgcgtcgctgccgaccggtgtctctgccttcacggtttcaactctgggagtcattatcttcgtcttcgctttagagcttgtgttctacttcagcaactctaattatttcaccggcaattttagcttctccaagtttctcaagtatcaagtccaagattaaatctacatgacctgtcagggagtttggagttatcaaccaattagctcagtttcgatgtgttggacaacagtttctactttccttcagcacctctacttcattggccctgacatctccaccgttgctaagggatgactacgtccttgccgtcggttgcttttgtcatcaccgactttcatcgctgacttgttatttcgtcttcacggttggcctactacgcaactgctgagagaggacctcatcgtaatcatggttctactttctatgcttgaagactggatcaatcattattccccgtaaaagctatcaaccgaatagttgcgccagtcgggattcgattttatatctattttggagtatcccataagggataatcactcagatcagaagctattcatatgagctacacttggtctatatcacccggaagatttattactcgggagcatgttacatgcgtcatcctttaaagggtgccgaaggcatattttttggcctaggcctaatatgtctgcagcccatattttcaggtgtggcctgtcacattcttttagggacttaggcactttttgcttaggccaaagtgcgcgtgatcaagtgcccaataccttaaaatccttttattccgcagttactcaactttttaggagttggtacaatgcattttaaaaggtgcctaatagtgatgtttttcatagctgccccgctgacttttttatatagtcaaggcgttgtttgggtttataaagcaattgattggatacaatatcgttgatttttgctacgtaagtgtgtgtttttgttgaccaatattatggcttaggctgattatatactgtggtcattttccaggtggttggtaaatcctttatgagtttatttactcggattttataccacatatgccatatatttctaggtgtggtgaaaccatgtgtcttttagggacttaagcacatctgttaaagcagtgtgcgcacgatgtgtgcccaatactttggaaatttctttactcacagcatataagcttctttatagctattttgctatgtgaatttcaatgatgtagtcaactttacaaagcaaacggtatatcacttggatcatattattcagggattcacaccacatatgctatatattaatattaagtcactcggttgactacaattattaaaaccactcatttggttagattatttactccttgactatatgtttagtttgttcaactatccacatagtcgggggctacacctaataggtgcatctagtcgatgcacctaagactacattcaattatttttcagccctccacagtcttcagatttggtaaaagtactcgagagatcatggcaaagatgattgaagcacttggctttggagtaatctagttcgagagaagattatctttttgactgtgaaggtctcaggggctactgtggagattatgggcaccccatacccatacggcatggttatccgactggtgtagggggtaacttatatttatgaaatatgtagcagatcatgacttgggtattacgtttccttgtatattatgaaacggactaaagttctggtttgataaaattgtaaagtagatttaggaaaccgacaccgtattggttaaggtttctatcttataatcctaccccccatcctatataaggtgggcaggaggccctctagggggcatgaggacataagatcgtcatatctatactacacccggcggattcaaatccccaaacaggagtaagggtgttatctctcattgagagggcctgaatctgtctaaatcccttgtctccgcatccatcaacttttagatctcgtgcgctacccccttttattattgccgaattcatgtttcgacaagcttcatgtcagtatcccttcatgcatgcgtccccacaaatcaaccagatatggatcaaagactaatatgcgatatgttgatcatcttagcggcacgctcagcttctgttcttatttcctttgtgcttgctgttctaatcctttaaattttggcttaagctttttcaacgtcagtgcatattttgattgattacagcatatcataggtgcgaacgttttgattttgttttcttttccatattcaagtagagatttgagtgggttgggtttgagtgtccttttgagatcgtgtccatgtgcgactaattaaaagtctgtgtcaaggtccggtctcaattattttgcatcacggtgttgtgaaaatagaaatcacgcgacaaacgtttagcaaaatcgatacacaacagaatatatgcaggtttttgtgccgaagtgcttatcaccaatcattttaggatcgcatgaaatggctacaactatcaaaccatcgtctccatgtaacgagagagtaatgctataccacttttcatgctcagtccagtcttttttttatctaaattaaatagctaattatgttgtctagcaaattacaattgtcttcgttttcttttcaatttgactttgccatgtactattcataggtgataaggatggctagatctcatcccagtggactaccacattgcttgttaaatagatttttctattatgaccgcggtcatcgtgctctcactggtgcgaattaaatcaatattctatcctgtaatgctttgccttttttcaattatgttgtccatcctgaactcagtatgggaggaggtattttggatatactctcgttgttttgcgtgtcacagcaaaatttatcaaagtaagatggatcaaaatgcgaaatatcacttcacaaacatgcatgtaaggcgcggtttgacacggctctagctcccaactctaacttacctagagctggagttgtgctaaatggtacagattctctattttttttagcagaattgatagagctgctccataaatttatactatggggtagagctattttctgcagctccactccactccaaaagacccactaccatttcatttttaatatatttacacaaaaaatgccactgaacaaccccttcacacctcctctcctattctctctctcagtcctcccaatcgacctagggcggcgaccggcagcccgactgcagcggcggcccgtaggttggctgcggtgaccggcgatgcgtagcctggcggccgtgacacgcggcctggtggtgacgcacgggctggctgcgacaaccggcgatgcgcagcctgggcggccgcgcgggggctggcagcggtgactggaggtgcgcgggttggctgcgacgcgcggactgggcggcatcccgcgcgggctgggcggcattgacagcggtggatacaggcggcgggcgaaagtggcgcgggctaggtggtggcggcgcaggtaggcggcgcatggggtgaccagcaacgttggcgcgacaaggaacacggtggtgtggagctaacaagtcagccaaacactttcaaactcacctcggctcctattggggctagctctcactggagttggagtttagagttcagagttggagtttggagctctaccaaacggggcctaagtataaatataatatacacaagtcaaaataaaaataagaaatatgattgtgcatagtgtgcattattgacaaaaacaatgggacattccctcaaggggaaaagactttcacataattctcctattgggattcaatgtatcatcgtcgatttgacgcagtctaggatgaccaaactattgggataggaacgatacggcaccgagttggacggttcgggtttctatcacattcatgttttttataaatgacatttcatcctctgctacatatgcaattccaaatcaatgcaatagtcatgtgtcaacttctttcttttgatctggtggagagtcgtgcgttttctaaccctttccgcatgttgtactcatgcacaatgaagcatttgatctgtttttgaccagagagggtcttggatacatattttaaaaccgttgaactcatgcaatggctcatttacagaaggtcaattgaccagtgtttgaatcatcaaaaattatttatataagtgcagaagatacttatcaattgtgactgtaaagttagcaaaaggcaactcataccaatgatatgaaattttcattcataatgcatttttttcttcaaaaaattcatagtgcatgttagaaatggtaatagtatcttatatataccacaattagccagggatgtgaagcatcaaaaaagaaactatgctatcaatgtatacatttgtcagttatgggtcatatgttttctgccaagttaattacctgaggtattggagtctaccaaattcaatcgtagtgttttcaacacggacatgttgtcattatagagcttgttctgcgtactttagggatcggtgacatggtgcttttccttgtccttgttgggcctgatcgtgtcgtcgttctgactgacaatgagctcagtacggttcacatgtgggctgatgacagcggtggttcggacctcttcggctttggacctgcttggcctaatggcatcatcgttcttatagatgagatagcgctagcagcagccgcgtaacgggtggaatgcttacacctcgatgatgacatccagttgtccacattcgaattgcatttggcagctgcattaggcattggcaatctacatgtcctttagtttggggaaagtgtcaaatattttttccgatatgatcacgtcattgtactcagtagtgccaaataaatcaaatattctatcacataatgacttactcttttggagctttgatgccgctaccatatcttactatgttttgtaatgtaattgatcatacttggtctattcgggtctaattcacgtaatccttgtagtattaagtattataagatcgttaaacaagacatcttcattattagctattatgtatgcacaaaaccactaatgcatggtatgatgccgggaacacaaatgatttccaatgtcttaatccaggctggcaaattttcaccataaactacgaaattggttgtttgtcaaccccctcaactctcaagaacagagacaaataacactataagacatatttttactagttgtttcagatgaagctggttttctgagtctgtacatacctttatcatgaattttgctaatgtagaagcctccacaacaatgaaacttacctaattaaagttcatgtcaacataaaaacaccacatgtgatatgttgattcaaaaccatcaataaactttgagaagtttatggctttgacatggatagtagaaaaaaaaagaagtacatcattgagaaccataggatcattctcatccaaaaaagaatatcgcaagttactactactactactattattattaaaggcaccaaatttgaatttaaaccaataactacataatttaaacccaatgattactcatatcaattaacaggcaattaagctgcacaatttgtataggtggttcaaaatccttgcattatacattatagggcaattaagctacacaatttgtataggtgcttcaatttaagggcatgtacaaccagccaacaaagcttccatcctctcaaacactcgttttgtttttagaagcaaatcaaaccccatggttctgatttctatcacattcatgtcttctgtaaacattcttcttcctttgcaacgggttgaatttcatatcaatgcagcagtcatgtgttaacttccatttttgctggagagtcatgcgtttgctaacccttcccatatgctgtactcatgcacaagctaaggaagtgtttgatatgttgttgacaaaagagtgtcttggatacacatttaaaactgttggactcatgcttttgctcattacagaatggggattgaccactatttgaatgataaaaacaatttctaagggcagaatatactcatcaactgtgacagtaaaactggcaagggaattcataccaatgatatgaaaatcccgttcaaaatgcatgttggaaagggtagtagaatttttcacatggaaattagtcatggatgtgaagcattaaaaaaaaaagaaactttgagcatgcaaagggtagtagaatttttcacatggaaattggccaactaaatttgcatgtgactattattcttcatagtggacaatcaagaatttttcaagaaatcttcaacgcacagaacgcaaagcaacttagtggaacttcgatttggttgattaattctgctctgtttcgctactgattttacagagtatgaaaccacaagtacttcctgtcaagtttttcagccaatggcatccctctctcagcaacattaatattttctgtccaagcgtaaacagttctacattggaaataatgaaattgacgcacatataaatctaaataaaaaaaccgtaatatcaaataaatagaaggggtgaggctttaaacccaggccgacaagcccaccaccttatagagctagccgaaacatccctagtcatttctcgcatataagtctaaataaatatccaatgaaattatactaatcatgaacaccaacaaagaatgctgcaacgtgcagcaggacgatcaacgcgttccccaattatcttcgacacttcttgtgtgataattggggaacgcgccgatcgtcatgctgtacgatgcactccgtcaagtttgtcacagccggaaggaacggcatcgccgcccgttcggacacatctgtccagaggcggcggcgcacggatcacggctggcgtcgccgccgccgcgatccccacgcggcggctggttcttcaccgtagcgagttttgtccgcgcggcgccttgcaagctccacggctgcgttctccctctgccttagactgacaagcatcgccgccaacgtcgtgcggccggcgcgccccccaccgccgtcgtcgagcgccacctgcactgtcctccagccgccgccgtagagctcctcgaggatctcatggcagtcgctgctcgggaagagatccttgagggcgccatgcgggtgtggctctctcctctccagctcctcagaaaaacctcatggtggtcaccagcttcgagtaccacgcgatgaactccagggtcttcctaaacgtccgcgcggcgtcgtgcgggttgtcggtggtggtgacttgccagcacgcgtcgctctcctcgccgtcgtcgagggggtgtcgtgtcatgctgttgatgtctgcggccaggggcttcttggccgcacggctcggcaacacggcgccgtcgtcatcgtcgtcgtcgtcgccgccgccgtcgagcgcgctcttgctggtctgggggtcggcagcgcggggcttcttcttgggcctgacggcgtcgctgttcttgttcacatggaggtcgacgtggttgatttggaggtcgaagatggcggcggtgaggagctgcgtggctctggccttgctcggcctggtggcgtcgccgttctgattgatgtcgacggcggcggcgcacttcgacgacgacgacgacggccggtgtcccacatccggctcgccgtcggctgcggcatgtggcggcggctggtgcttcggtcgagggaagaattcatcgatgccatggagcaggtaggggtgttccgcggcgaggacttcctccaaccgggcgtagacctgatgcgcgtccagccctttgtccttgttcacgtcgtggattacgtgttcgaccctgtcgtgaagctcgacgccgcctacgatcttcaggctcgccaagaactgctcggccttggacaccttcgctcgtcgctcggcggcggcggagctctccgccacggcggcatcgtccgggcggcgccgctgtgcgtcgctcctccgacgcgtccttgccgccgccgctgctgctgcatgatcgccatcgtcgtcgtcggcggcgggtacgagctcgaccctgttgcggggataaataaccgcgttgatctcggcgacgagatcagggtggccacggaggagctccgccgtgcggcggagcaccggcgcggcgggggcggcggggtctctgccgtacgccgtgagcacatcgcagagctcgacttacacggccggcctccgccggaaccgggccttaacattgccgaggaatgccaccgcaccggcggcgcgggattggacgtcctggaactccggtggctgcgccatggcggacagtctgagagagagttgagacggtggtggtagtcaagacgttgttgacgctggcgatggttagtctgtcgaggtattgtaagggaagatgcggtatagaaatgaatccgagtcggagttgattctccgttctttcgtgttggtgtgcgtcccaatttcctcttcctggatttatttctacctctctttttgctggcccaaagcgaacagcacattgctcttccacatgcaaactgagaaaatagacatttggacaggtttgaaaagcgattttgctagaacaccatcccaaaaacgcgtttttgttaaaaatgccaatacggagagcgcgccgtcactttgccattttagggtgtgtttagttctttaggtgtaaaaactttgaagtatacagatacacatttgaagtattaaacgtagactaataacaaaacaaattatagattccgcttgtaaattgcgagataaatttattaagcctaattaatccgtcattaggaaatgtttactgtagcatcacattgtccaatcatggcataattagactcaaaagattcctctcacaatttacatacaaactgtgtaattgattttttttattttcttacatttaatgctccatacatatgtccaaatatttgatgtgacctttttggccaaaaatttttggatctaaataaggccttagccttttgtatattttcaaaataattttcgttagaataccgggtgatgagacggaattgcctctgctcgccgggtgaaaggagatcgatgcgaggccatctataggcccgaggggcgcggctgggttaggacggcgcgacaatcctcagcgacagcaaggacaagatggtcagcgaggatggcgacgcagcttcctactgatcaggatcaagtgcagtgcccacgctgtccacatcctcccgggcatacacgcgcccaagcggagccccatcgccttcaccgtcggcgacggcctctacgtcatggaggcggcgtcaccagagccactgccgatgtgctgggcggagcactgcttcgaagcactcatccactgcctcccgcccgcgccgccgccatcgaggactggaaccggcgctccctcccagcggtgcacaaccccagagacgacaggcccgccgcatcgccgcgcacgcggtggtcggtgactcccaaatttgggtgtccacggagcggcatagcatgttctccttcgacacggcgagcgatgcatggcccaacttcggtgactgggtgctcccgttccgcggccgcattgagcacgtcccggtggacaacctctcgttcggcttctcaccccacgacgacggccacctccgcgcctccgacctcactgccacgcccccattgctgccaccgcacaaggtttgtccagccccggtggcgtcctacctcatcccgctcggtagcagcatgcctcgaagacgacgacctagcactggcgattcaaggccgccgcggaggaagatgaggaggagacggaggtgagggagcggttcgcggtggtgaccggcatggaggtggaggcgttggggagcatgagcatcaaggctgtacgcatggcgagcatgcgcaattccgtctcatcacctggcattccagcgaaaatgatttcaaaaatacacaaaacggtcaaaatggcaaaatagcagttggtgcacgcttcatattagcattttaatgaaatgcattttcggaatagcatttcagtaaaaccgttttttttatcgtggccaaattaccattttctcgtgctttctggcgcgcatcacatcgcacgccatatccgatctttgtttctcttttgtcttccctagcgcctcagttgaagaatactgaaaacttaagactgtctagcctttaaattcctatgtccacaaaccaaaccatacttaaaacatggaaatgctaagcggtcttaagcctcagtccaagatttcttaaaactcctacgtctataaatccatatatatatatatagatctatgattacatagataacatttcgataaatcatttattttatattttctatataaaatttaaaattttaatccactataatttaatatacaaacttcgaatccaccatatatctgagacctgtacctatgtcaaataggccattattctctcaacaatattgtagtaggagtggagtccataacaactagtgttctcaatctcacccgaacgaccatccgcaagaaaaaatacaatataacaaagcaaaactcaccagataatgctttgggtcaggaacctgatcccaatcataaaatcgggtggtctccttcttactgctttgtttcatgcttgtatgttacgtaacttcttacttgcacgtgctattagaattataagtacatattttttttcttatctaattgttctctcttttaaccccatgcatgcaataaccttattattttttctaaattattttttcttctaaattatttatctgatctacaattcgattgtaccaataatttcttacagttaaatctttacaacaaaaccgcacatgattatatattccgacaaaaaaaagttaggtttttaatggatttgtttaaatatcgcaagtgcttcatttaattgtttcggttagtattttacgttgtttccttagttgatttgcaaatgtaccacattgtgttcttcgaaagtaatgttggttgcatgatataaaatgtttaagcagcatcaagtagttgcaaaaatattttttatttcatatgatgtttttcgatgtttcactcattggattcaatatttcatatattggttgttgatgttgtagtcagtattttttagtgttgcgtttctctgaaatattttataaagtgagtcgatacaattttctacaagtagtgaaacaatgtttaagttttcgtcaaaatataataaagtgtgataacaaaccaatacgccgccatatatcgacgtcagagataagcctagacataccccattcggtgcctgcgaaggccggcaagagggatctagtgccatctctgatctcgacgagtccgtattcgaggaggaagactaccttgtcgtcgactgcgagttggttatctagccgccaagtcgatgatagctagataggttatctcatatattgtatttgtgtgatccagatgaataaagagcaacaccggcttcggccaacaagatgtagggctattacctgtcagataaggggcccgaacctatataaaaatttatgtctccatctcttttacctcaatctcgcatataccctggtaccaacgatcctcatactatccaaataccatagtcgcgatctcaaacgtcgacacacatcatatcttcaatcatcggttgtaatggcaacaatttcaacttcaatatcttgtaccatcggcttgtaccctaacgccccctgagccaaatcattagcttcaacattctgctcccgagagacatgcctcaaagttaccaaccaaaaactattcatta

SEQ ID NO: 20468 - DNA, 4246 bp, Oryza sativa
agaactgcttcatactcagcctgattattagttgcatagggtttaatagtataagcaaactcaaaacttgctcccctaggtgatattataaccaagccgatgccacaaccatgagtgcaaactgatccatcaaaaaatgatgtccaaggcactaactcaaccgagccgattgaatcatctcgatgttcaacaataaaatcggctatggcctgccccttgactgctttaggtgattcatatctaagatcaaattctgtcaaagcatatatccacttcccaactatccctttcaaaactggagccgataacatatatttgactacatcggctgcacactatagtgcactcgttggataacaaataatgccttaactttgtgcaagaaaaatataaacataaacacaacttctccaccggagaataccttgtttctgcatccaagagcctgtgactaaaatagaaaatagctctctccttgccttccaactcctagagtaaaccgagccgattgacttctcatcggctgataaatacaacctgaaaggcactcctttctgtggaggattaaaactggaggggaacttaaatattccttaatattatccaaagccctctgttgttctgccccccaagtgaattcttgatcggctttcaatctgagtaaaggtgtaaaaggctctaaccttccagacaaattagatataaaccttctaacaaaattaaccttgccaatcaacgactgtagctgtttcttgtcctctggaggtatattagaaacaggctgctggttgtcggtcaccaaattcctatattagggaaacacaccttcaggaagaaacaccgagcccttagcttgatgctcagcaatcgtaccatcaaccacagacttgatcatatttgtcaaagtattgacaagcactcctgattggttgatcaaagcatgatagacagcatagtcaatcttctccctctgatttgtcatctttgggctcatcatctttatctttatcacctttagccttgccatctttagatgtgcctgtctctgaaccatcattgggaacttttagcttatacctctagataactgtgcatgaacgagtttgtttgaatgaatgcaggtactgagtctttaaactgttcatcatctgttcgtattctaacatctgttctggtgtcagcttatccagtgttattgggatgatgttttcgggggcaggatcagacggtggtttagaagtctgcttaccgtccaccatgacgaaaaatcgttacaactcgtgtcccactaggcgtgccaaaagcgtgttgatgcgaaaaaacacacactggcctgggagatctgcttaactccagtgcaggtcctaaatcttgctcttgggttcaaaggcatgccagttgatttgatcctgcaatcaacaagaaagaaagacaaggaaaccgaggttaaatccataaacaatagccgatcggctagaagccgatgacatatcgtcaatcattaagccgatgttattggcattagatcggcaatgaagaataaagtaatataaagctaaatctactccgataccactctatattaagatatcaaaacagacagaatatatcaaacagaaggcccaatatatttttgatgcaataagatcttaatataaagggcggacttagcatggcaagcaagcatacaagatataaaatagctaaatcaggtaagattggctgaaaccctgatactatctctatcaataatcataaaacaggctagatattgcagttatgaatattacttaatagatcaaagtcaaccgatgcagcattaagcataagaataaatacaagatctaaactagatgatgaaaacctcaaagagatggtagatatgctatataatctagattaacaatgatatctaactctatcgactactttctactgatagatactagccgattgcaggttagattgtgaaactaataaagattatgaagcatatatgataactcgacgatttacataaacaagattagagtatcataacgatggaagcactaatcccgataacgcaagccgccatgacaagtttacctcttgatgaagattgaaatcgatgcagctcaacccgaaagaaagaactcgtcgaaacaatgaaagtagaaaaagggtggcgatgcgccgaaagtgttattgaactgtcgttgttaaattacataggatcgggttatatttatacccgagatacatgacgggtccttgtcggacacgactcttatctctaacaaacttctaagatacgaacgagtttttacagcaaactcttgtcgagacatatctctaaagaaactatttaaaatatcctaattaatagatacaattgcctatctgagagcttatctccatcgtggcaattctcatgtagcacgttgatcgatcccagaaacggttctataaccatctcaacaaaatcggctacatcggctatatcggctatcttctgtccgatccatctcagccgatgccctcgcagccggtgtgtactctgttatttgaatacaattttcaccgaatccactttgattccgatgttgaatctggttcatggtttaccaaaattggtcgttaatagagcctcaggggagtaataattcattgataagggaagtttgggggactatcgtaatactcagagggtaattcggactataacgttagtattaatactggatcaaatatagtaaaatccctgaaaagccccaaggaccaattaggcaagggcaaggccgtgccattggataaaaaaaattataggcggtgctgtactgcacggattgaaaagagcactgagtaaccaaaattttgacaagaactagttttcaacccatgcacgggctatatttgaatgcaaaaagagaaaaaaagtacaaatgctataacattgtactccgggctatattggtgtactaatttggatagaacaaaagtctatctttgagtaccagcacgtcctccgtgcattacactatactccgggttatactggagtaattatgaaggtaaccttttaaaaaaaataaagcgggtaaagtatatacaagtttaaaaaaattatgattttggatttcagatttgtgtaaaaaaatcaaaacttatatttttatttcttctatatcatccatgtaatactcaaaccttaattttatacgattactatgtgtatacattgctatagatcatataccctactttacagcttactagagaatcggcgcacgcccaataatttataacctgttaatcttgtttaattggtttttaaatatatatttgaaatgttgatgaacaaaagaaacagtggactggggggattatttcaggttttatattgaaattttttagtaaggtgatgaagtcgttggtatatgactctgtccaccatggttaaaatcctactagatacttaaatatgaattatcactaatactagaaaagagcacttcatatcaatgggatgaaaatctcatttagaatgcatgtttgaaatggtagtgttgcactgaaaaggatagcactatatatatgcactaattagggacggatgtgaagcatctacaagaaactatataggctactaaaagatcattatttatagatcttgtctttttcagccaagttaattatctgagatattgaagtccaccaaattagatcttagtgtttttatcatatctgacattgtagaaggttaacatagacagctgggcagctagccacggttataaactacttcaccatactatttgaacatttttcttcctcccaacaacgcggtatcaccatactatttgagcatttctcttcctcctagcaacgggatcatactatttgagcatttctcttcctcctagcaacgggatcagatgaattagtaccatactggttccacaatgttaggatacaatttgaaaacattaagcatggatctcacaatgttatggtacaacttgaaaaattaagcatggatacatgcgcgtacttataggtagcgattctgcgctaaaagcatctgcaatgtaggaatgtaggaattaagaggtgtactaagagaatctttccactatagcaaaggttttatacataaccatacaactgcacggtttgttaaagtgaaaccggcgaaaaccttacacagaagacacaaaaagcctgaggcaaaacaactacgaattgcagatgatggagggaagag

SEQ ID NO: 20469 - DNA, 8403 bp, Oryza sativa
aagacaggacaccaagacatcggtgtcaaccatgtttccggcgtggaactctgggcttcgcaggaccaatcccaaagcaaactatggcgaccacctgcaacttcaccaccagcacaaagagaggagcgctgggaggagggggagaagggacggtctccccaacagcttgtgccgagaggcagcatagataggaagagaaagaagaggaggtagagagaaaggaagggaggaagggtggtcagaggggtcaggggtgcttgaggggggcagcgagccgatgcacacccctagcaggtcgatgcaccgccgacccagagccggttaccgccgcccgccatctcacgagcggcctcgcgccatgacatgccgccaacccgtcgcactggcgcctcgcgagcgccggccgaaccgcctccgcaacgcacttcccgacactgccgttgtagatccggcagcggaggggccggatctgctgctgcccaacctgaaggcctcgccacagccggcgaaccgcgcatcccctgcactgagaagcggcgccgccgcaagaaggccccttctgtcatgtttttgaaggagttctgttatgcatctgtattacatagtctgaaacaaagcacacttgtaaagttgttaggctaatgccgttccacgctcagcaacaagattcttgtctaaaccataattagatcgccctggaaacaatgaaatctatgtactaaactaccaatctcaaaaaaatagaatgatattcatgtactaaaatcgatcaggacaaagaatgaaatcaatgtacaacaagttgttggggaaatccgtcgtgtgttgcactgtatagctaattcttttaaagcaaaacagccattcaatagatgctgttgtaaacactcattttgatttgaaaagcacagtaaatgaaaaaaaatggatggtcgactgttgcaatgttgcaacgctcttgttatgtcttctataaattaacttcattgcatcctatatattctctgtgtgcaataccagatcaatgcaatagtcatgtgttaactttcttttcatctcttcttttttcttttgcggagagtcatgcattagctaactgtttggatgtactctactcatgcacaaggaagcgtttgttccgttgttgaacagagagagagtccgggatacacattgtgaagtcactgggctcatgcacttgcacgcttaaaaaaggtggatagaacactatttggatcaccaaaaaaaattataaggcgcaaacctacaagatacttatgcattgtgatagtaataccagcaaaaaagtaattcatatcaatgagatgaaaatctcattcaaaatgcatgttggaaatggtagcgttaccgttatggcactgcaacacagggcagcattatatatacaccccaattagggaaggatgtgacgcatctacaacaaactgtatatagctgctaatgtgaacattcattatttatggatcatatttggtaatatgatccatgtgaaaacaccatgagatattatttatggaacatataaaaacgctacattggagttcaccaaattagatcatagtgtttttatcatatccgagatatcgatatgatatacttagtaagaacgatgttggacagacacaagcatatatcacgacattccttgatcatgttaagtggttgtgtaattctcgaaaatgagatcatgctgattgcagaggagctccgtcaacggaataattaactatttgccactcttacaagtggttctaaaggatttactattgaacccacatatcatagacatgagaacccacacatcatagacaacaagtgacaaattctaaattaccatatcttaaaagtggtatataaggtggtatatagtttaaatgtccctccatcaagagacgcacaccacaatagtgaaatatgtgaccgggtctttaccgaagtctttgtggacatcacttagcttgtttgaggacgtcacatagatcatcatagacggccagcctttactggaagcggacctcactttccgcatgacacagcagcgccgacaaggcctttgcatactcttaaaaaagaaaagactttaatatgttttactttctaaatttatttcttgtttcttttattccttaattgtgaggaatggagtctaaataggttgtaatgtttgcctgtgcatatccatgtatggatatagaaaccggatttttatctattataaaaaaatactccatccctagctttcgtatttatttctggtaacttttttttctattttctgctcttacttcctttctttcctcctcccttgcatgtgtcttcattcgtcatcttttattgctgtgttttgtttgtctcaactcaaaccaaatacaccctccgtttcaaaatatgtgacgccgttgattttttaaaatatgtttgaccattcatcttattcaaaaaatttaagtaattactaattatttttatatcatttgattcattgttaaatgtacctatatttatacatataattttacatatttcacaaaagtttttgaataggcaaaatttgctacaagacattcaaaaaacgtgtaattcgctagaggacatcgaaagaatgtgtatttgctgtagggcatcataaaaaactggtaattagctcctggacacccactgcattactttattatttctagaggaataggagagagaaacgatcattaaagacaaatttgcccttagctcaaatgaatccacgtgggcccacatgtaagcccctctctctcccggcacagcgccgcgtcggccagccagaacatgccggcggtggcaggctcttcgccgtgcaatcatgtctcgcgtcgcgtcgtcgtgcagcgaggcgtcgacggccgaggggaactccatgccgtacgaccaccagtccatgcctgcgccgtgcccaccgccgcgcgccacctccggcgccacatactcgtgtgtgccgacgaacgagctcgaccgtgcgtgcactggttctgcccgcgatgcccatcatgtgcagatactcgagcgcgaggagcacctcagtggcgtagaacctggcgaacgggattgggaatcgacgaccgggcatgctttggcgttgtgagtgagggagtagatctggccggcgtcgaagtcgtcgaacatggcgagcatgaaagggtggtcgagccaacgcaggatgcgcttctccgcggcggcgtggcccagcttgcccttcttggagagcgcgcggcagtccaccaccttcatggcgtactcgcacgaggacgatgagccgacgcattctccttcagacgatgtccctggcgccgacgtggtggatgagggtgaagtcccgcgggcgtagcggcgacgaggatgggcgcccaagcgaggtcggccgcgtggtgcgggcgtggtagggaagaggtgggtgtggccatgtcaagtgagaacatggaggagctgaaagcgacacccactgacccaccgtgctactgctgccgctggcctgctgctacttatgcttgagctgggcatggaggcagcgtgtatgtgcatgtcgtggtaggcctgcgcgcgacagcgcagtgccgcaccaggcccgcgcctcgccgcaccgtagctgatgctctccctctccctcgggcttgcttggagaaaagagcagagagagagagaatgagagagaaaagaacaaggaagaaggagcagggaaggatagagaaaaacaaaaagaaaaaaattcgaagggtagaaccgtacttacacagtttttctctctccaatttctccggatataataaaataatcccgtgggtgtccagcagctaattaccaatattttgtgatgccctatagcatattcgcgttcttgcagtgtctcccagctaattatacgttttttggatgtcctgtagcaaattttgccttttgaataagacgaacagtcaaacatttgctaaaaagtcaacggtgtcaaatatttagaaatagagggagttttacgtagtacacaccaaccgatcgtgccctagccacactcgtactcattgaaatcatactgaaagcacatcaacgtgtgcataatatttatgagcactatgattgagtcatgcacacatgattttaccatcacactgcgtttctctaagttgaaatgaaagttcaagttgaaaaaagaatgggcttagagaagagttttgaaggctaaaaatgaaagagttttgccattggctaggctaaaaaaaaataggttcaaaccacaacgaagctcaccagaaggttagaagagaaggtgtgctagtatgacaggagcatcgcttcagtatccatgtaataaaagataaaaattcagttattgacagcaagagatgataatattacgtatgatcagagaagtgtggattgacgtggtctgaactcatcttccgggtgcacgaacacgtactattcgaagcatctctagaattagaaagcagaaattgcaggtgtatttatcatcactggcaaacaaaaacctacagtacatagtagaaaactcaaatcaacgtatcggatggatgatggatggtcttgttgcatttttcctgtgtccacacttcgcagttcacacaaataatttcggtcgcgtgcaaagcaatagtagtaaccaataatgaaccaactaagggacaatttgaaccatgccacacaaattttgcaaaatttgtgatatgccacctgacccacatgtcattgactcatgtgggtcctacatgtcattgagatacgggtggcatatctcaaattttgtaaatatagggtggcatggttctaacaaacccactaactaattcatagttttgatcgtttggccaacgggtgatagcctgtaaaatggcttattagaaacaaattatttatgaataaactttttatattttatctttaacgatttaaaagtatgctgaaaaataaactacgaaaaaaaaatctcgaaatcaactacaaagttcaaattttggctatggctcatgagccaaaattcaaaaggctaacgttggcaacttttacatcgagatgtcgacaggatcgatatgaatatcttttcttgaggcttaaaatccaagctacggagtcgccgtgaacttgcgggtgaaaggacgtacaggtgccgacttgatgatccatgtccggcaccatcatttaaggagagcactgtccaatagaagctgtccatatataccatcagacattcagagtttcagacggcacaagttttcattccatatcatcaggagaacttcaggtacaaactgcactttctttgtttccgttcatattttgccaggccggttactgttcatgttcctcagaaagtaacatcatgcatgatctagggcataatgatctcctgttgaacctggtaggctatgcttctatttttgatataagctaccaagtcattatattataatagacaaaaaaaatggcaaaaccaaccagaggttaatcgactggagattctgagttcctgacctgatttttcttatacctgtacaaacagattgaaaatttaattcacgtcttgtttttcctgctttgcttttagaaattcaatttcaacgaagaaaggttcaaggtgtgaccaaattgccacatatatgagaacacgtgaatggcatatttaatgaaacactcattcgttttggacaataccagagcatgtttacttattttaaagagagcggagatcatttttatgattagaaaaataaaatgtaaggatttagctgaataactcttaactagccatggagattatcgacaaaaatagatgcaacctatcatgcataataacaacctattcggcgaacaaccaccgctgttgtacttcttctccaaaccatcataccagttaaaaaatatatttaaacaaatgcatcaccatgtcattgtcctcagtcataatgcacacatgacaagaactgtttacaaaactacaacagggattatttgcacatgtcctcatattttggagggtggaattctcgatttcatgttccaggaggttaagtaggccaaaccactgtatcatgcaggcggttaagtttccaacctttaaactttcaaaagtttagattgatacatgtagatttgcttgagtactttcatagcattataacactaatgagctttataaatagtattttatataaagatcagatatcaaagttttatttgggagaccatgtcaatgtccaaaatggcgtatttctgagttgtgaccgatgggagttttttctggcacacttattattccaagtgaaacttacctgggcatggaattgaagactaattcttttttgtttttagctgccagaaaagtgcttcaaaatgtttactgccctaaaattgcttctcttgccatatctgctcctactggcatcagcttcatgtactcaaggattgcctttcagcaataacactgatctggatgccttgctaggattcaaggcaggtctaagccatcagtcagatgcactggcttcatggaacacaacaacaagctactgtcagtggtctggtgtcatctgcagtcataggcataagcaaagggtattagcactgaatctcacctcgactgggctccatggctacatatccgcttccattgggaatctcacatatttgagaagtctagatcttagttgcaatcaactttatggtgaaatccctttgacgattggttggctgtcgaagttgtcatatctcgacttgtcaaacaattcattccaaggtgaaattcctaggacaattggccagctaccacagttatcctacctgtacctgtcaaacaattcacttcaaggcgagatcactgatgaactaaggaactgcactaaccttgctagcatcaaacttgacttaaacagcctgaacggaaaaatccctgattggtttggaggttttctgaagctcaattccatttcagtagggaagaacatcttcaccgggatcatcccgcaatcacttggcaacctctcggcgctgtcggaacttttcctcaatgagaatcacctcactggaccaatccctgaggcccttggcaagatcagcagtcttgagaggttggcactgcaagtaaatcatctgtcaggcaccatcccaagaacactcctcaacctttcctcgctgatccacattggcctgcaggagaatgagttgcatggaagattgccttctgatttgggcaatggcctaccaaaaatccaatacttcatcgttgccttgaaccatttcacaggaagcatcccaccttcaatagcaaatgcaaccaacatgcgctccatagacctctcttctaacaacttcactggaatcatacctccggagattggaatgctctgcctgaaatacctgatgctgcaaagaaaccagctgaaggcaaccagtgtcaaggactggaggttcatcacgttcttgacaaattgcacaagacttcgtgctgtgacaatacaaaacaacaggcttggtggagcactgccaaactctatcaccaacctatcagcacagctcgaactcctggatatcggatttaacaaaatttcaggtaaaataccagatggtattaacaacttcctcaaactaattaagttgggtctctctaacaatcgtttcagtggtccgatacctgacagcataggaaggcttgaaacactgcagtacttgacactagaaaataacctattgtctgggatcataccatcctcactcggaaacttaacgcaactgcagcaactctctctagataacaatagcttggaggggccattgccagcaagcattgggaacctgcaacaacttatcatcgcaaccttttcaaacaataaacttagagatcaattacctggagatatttttaatcttccatccttgtcgtacattctggatctgtcaaggaatcattttagcggttctcttccatcagcagtaggtggtctcacaaaacttacatacttatacatgtacagtaacaacttttctgggttgctaccaaatagtctcagcaactgtcagagcttgatggaacttcatttggacgataacttctttaatggtaccattcctgtatcagtgagcaaaatgcgaggattagtactgctaaatttgaccaaaaatagccttcttggtgcaattcctcaggacttaagactcatggatggactgaaagagctatatctttcacacaataatctatctgcacaaatcccagagaacatggaaaacatgacatcattatattggcttgacatatcctttaataaccttgatggccaagtcccagcacatggagtgtttgccaatttgacaggatttaagacaggatttaagtttgatgggaatgat

SEQ ID NO: 20470 - DNA, 1885 bp, Oryza sativa
ctgatgagcttatttatatgtctcaactgactttagagaagtgtttaaaggatgagaactgattgagatttgagaaatgaattcaccatttttgttgagttgcataattttttgtatcgctatttaccagaatcataaaccattgaaaagctcatagttgtccctggaggtggcaagtggcaacagaaactgcggaagagttctgctttccatgcccattgggagatgcagacagcattaagaaggaaacaattagacatgtggaaattgttactgttattgttcttttcctgggaatgtggttgggaaaagcttgggataatccaaatgcactctcagttggctggttgaaatcttgccggactagtttctcagcttgattaggttgcatttctgttttacaaacgagccccaatatagcatcatgctcattcttgattgtcagaattgtttcttgcatagttggaatatgtcctttgttctctgttttttttttaactgtgatgttctttgttctctttaactccctagataaatggatatttaaaatttaaaatttcctattctatcaggtgtcttaataattatttggagttgatgattgaggaaccacggtttagttcaattgcctatgttcgtctggattcacaagtcaagaaactcgataaggagaacacgtctgcgatggatttatcatccagtttgcaccagatgcttcagaagttaaatttaagagtacaagatgaagaagtctgggtgtcacagttaggctcaaatttgcaggcttcattcagaaaaatcatggatacctcctcagaaataggaaaattagaagatgaagttttgcagctgaaggtcgatatagctgagtttgctccaggtgaagtaaccagttgtgcagtatatgaaatgatcaagacacttcaaattgttgaactgttcatgaataattccaccagacatttgaaacttatcgatggaattaattctgaaatgagagagtttggaagtatctttaatggcaaagtgagatgccttgttcgctttgctagatatcaacaaactattatggagaagtctacacaggtttgctctaacttactttttaagtgttatgacaagttctggatcacttactcatttgacagataaatttgttccagataatcaatttccttggtgacatccgtgctaaagttgacaaaatgactcaaatgtatggtctatctgaagttgtgcccattgtctcaaaccagtttatagaggtgtgttgcaaactgaccagccttcatttaatcacttttggaactgtatctttgttatgcattctattgttgattccaatcaaatctgacatggtgtactgcatgtatttctaggggagcttcaatgccgatgcatatggttagtctagtgatattgatagcatttgttaattcacatcttgtttcagttttgatcaatctcctttcttatgcacagcttttgagagtttgaaagagcacagcactgatctctgttttagttggagaacaaggaagtttcataacagattaattctccctccagtgaggcaacaaacttctggtatgaaataaatgacttcttgatgaaaactttatgtatgtcataagaataaaatatgtcgttatgatgccatgaaaataattgaacgatcagcaaaaattgcaccttttcctgtcgcaatcagttttacctaataatttacttcctagactgatattttacatacatgttgatattttactctgctggctcaccctttttatgtcctgcttctgatggcctcaagtacttcccctcacacctctttctagtcatttgatcatggttgatttgtctactagggcccacctcgacacag

SEQ ID NO: 20471 - DNA, 4069 bp, Oryza sativa
tcccaatacatataagcataacaacaagtaatataatgcccctaaaaagtggcatataggattcggtgatgaggtggaggagataaatgataagctacccctaaattaagaaacaacctccacacaaacactaagaagagtctgagagtgttaaaggtattgatatttgtgtattagggatgacatattatatatgttgactcttaatttataagtgaacggcatggataaattgaaggtagcagtcacatctattatagcacttgctctaatgcatccaaaccgggattcgatggcagcccgacagcccgacacctctaattttccatctaatcaaatacttaactcccataggcgcataggcatcagagcaggagcttccaaaattgcggagattatcctccatggagagtagtcctatttttgagtctcttcggtagataggccagtatatatttttcagtaaagtttttacttcttctctatgaatataatgtggcaaagctttcgcctttcttaaaaaaaaacaaaacaaaacaaaaggcgcataggcagaattaggcatacatcagagattgagattcagagtatggcattcatagcttattaggtcatgtatccatctggccaagaatttggtactgaccaattgagccaaaaattttaaaaatttaatgcgctccacctccgctgcttagcttgcaaatctactactacttaaaaaataagaggtgcttccatcgtccgtaaaaaaaaccgggtgaaaaaaaaccgggcgaaaaaaaccagtttgtccgatcaaaaaaaaaccggtaaaaaaaccgggtgaaaaaaaaccgggcgaaaaaaaccagtttgtccgatcaaaaaaaaaccggtaaaaaaaccgggtgaaaaaaaaccgggcgaaaaaaaccagtttgtccgatccaaaaaaaaccggtaaagaaatttccgtttttaattataaaaaaattacccacaaaaatagtttctgtccgattccaaataaaaaaaattccgagcgacaaaagagtttccatcttcctacaaaaggaaagaatagtgcgaaaaaaaaagtttctatccgaagggaaacacgcgtgaataaatacctaattaaaaataaatatctatctctaaaaaaccttctgtcgtaaaaaaaggaaaaaaaggaccgactcccgtagagaaaaaaaaagtccgactcgtgaaaaagaggttttctcgtccgtaataaaaaaaaagaaaaaaaacatctaactcaaactccgtaaaaagaaaaggaggaaaaaacgacccgaccaaacttaaagtcgccccttgttatccgtatatatctctttaactctaatctaatctatcaatctaatctaactttttagaaagagaagtttccatcatccgttaaaaaggaaaaaaatgcgcaagaaaaaaataatttccaaaaaaatgcgcgggaaaaatacggtttccttcgtctgaaaaaaacaaaaaaaatgctattaaaaactatcagaaagaaatacaccatttctaaaaaaaatggtttcaaaaaaccacacaagaaaaaaaaaactgtttataaaaaaaagccgctctaaaaaaactaaccgatgaaacactgtttataaaataacagatccaaaaaaaacaaacggactcaacacgcgaaaaaaaccgatgtttcaaaataaggttcgagaaaaccgtccgacttaatgcgagaaaaaaaccatcatttcgaaaaaaaaatagaggaaaccatccaactcaatgcgagaaaaaaaccgccgtttataaaaagaaccgctccgagaaaccatccgactcaaagcgagataaaattgatggacgcttgggtcggataagatccatcgatattttttcatctcctacacatcatttcctacacatcatttgtttcctcatctaatccctgcactttttgtatgcaattatcattatcagactttttttaataacatattatatgaaaatagtattaaaaataaacatatttttaattgttatttagagaagagtgcacggtgactattttgtgtagacttgatcctgagtgtaggatttgattaacctattattggttgcaagaataatattgaaagaatatttttttattatatgtatattgttatatgaataatccaattattttagttaaagcaagcattggtaaaaagattgccatcatcgagtttgggtcattacataaagatgctctaattttctaattgtgttagctacaacgatccatagaaacattatcattgatatgggtacgcttgaaaaatgtctattgtcattggattattttttttacccgttgcaacgcacgggtatttttgctagtaataaataaataaaaggagaaagcaaacgagggcgggggggcttaccgtggattgggcgcggcggacggcgacgccatcgctcggcgtgtgcttttcgcggagctgcgtgcgtgcgtggtccggactccggcggcggcgcgcgagggttttaatgggtggccgaccgacggcgagccggagccggagttggagtcggagaagggttcggggcggagtacgaaacggactagaatgctgcctgcacaatcggtgcggcctatatagcccatcacatcttatcatctatttctagccggcccataaattttttttttattgaaccgtgtgttgtgcctaaaattgcattcattaatcttagatgatcgcccacttctaaaattcagttttctttaggacaaatagatatagtttctaaatatttgtggaaacaaacgagggacttgcctattgaacagttgacagatttttgtagattgaaatcttgcagattttgcagtcactggatgtagcatccacgttgtttgttaacgggcccgcaacacactaatgttgataagtcgacccgttaagacgaatttggggctacaaatcactttagcctagcccattagctgctaagcaacccgtttggatcaaataacaaagcaaaaagtccactttgactcccttaaaaaagtaggccgaatctaattcgtatccctcaacccaaaaaccggatatgacgactccctgaactattgatgccagtgcaatttgactcctccaacgattttggagggcggttttgctaatgtggcactgttgacccggtcttcatctcacgtggcgtttatgtggcattagaattaaaaaaatatatgtgagacccatttgtcattcacacacaaaaatatattgtggggcccacatgtcatcctttctccttcccttcttcctcctccctctctctcacttctctctcttttctctcccccttttctcttccccttccgacgcacgtaaggagtgggagctggactggcgacggcgacgtgcgggcaagggctggagcggagacgggcgggcagggccagagcgatagcggcgacaggcactggagccgcttcgacgtctgggcatgccacgccacctctcgtctccaagccggcccgccactgcaccccctctaggccgggccggcgctcgcttcgccgccgctctgcttgaggccgggcctgcaacggccgacgacgaaagaggagaggaaggggaagagaaagaaagagagaaggaatggagcaggcggtaagggcaaggagaaggactagggaggtggaggcaggtgcagggccaaggagcgggagcggcggcaacggtgggtagggggaggcgcagcggcagtgctcactcgacgctcctagaatcgattgggttgtcactatttgggctaagccacgccgctctccccgcacttgaggccgttgtcgctccggccctcgcccgctcgcctccgccgccactccagcacctgttgtcttgcctgccgccgccatggctgagggggaaatgaaaagagagagagagagagataagggagagaggaaggaggaagaagagttagcgtgagaggatgacatgtgggccttataatatactccctccgttcgaaatgtttgacgccgttgactttttagcatatgtttgaccgctcgtct

SEQ ID NO: 20472 - DNA, 15832 bp, Oryza sativa
agctagcagttataatcccgatcgggaggccggccgagacgatcgatcgaccttggcgacgagatgaacggatcaggggatggatggatggatggaacgaggcggctggccgggagggaggtgtccgagttatatatgggcgtgcgtggtggtggcgcggcgggatcggagttgggatccgaatcggaatcggaatcggaagccaggaaggaattaattcttctctccgattcggtcgccgtcgggctcgaacgtacgtacgcgcgtcgggcgcgccgcatcctcacgagatcgcacgcacacgcacgcagctcgggagccgatggccggcctcgacaccgacacgtccacgtccaccacgtcgaatatccatggctccatggcccatgcaagcagacgcgcgcggcggtggcgctgtacatgccgcaggagtgcaaactgcaaaggcaagagcaagttcgtcctggagcaccaggccatgtgggagaaggaagggaggaacaaaggctacgacaccaccgtgcaccgctggcgctttgccaccgtgcctgaaggcaaaatccttgccggctgggagaaatcggacattctgccactgtcaaagagggtttcactcaaatgtcacttcgcggattgaatttgttaaaaagccactctcaaccgatgccaaacggctgctttgccatattcactgttacctccgtcacatattactcggccgaggatttcctagtggccgacgacgcgccaagcctgcagcacctcggctgcgacggacggggtcttgccgtcttggtatgcctcacggacgacgagctgaaagtccaagacaaggtgtactatgatgggttgttggagagcaggtgggcagaggacactggctcatcctatgctccaaggacggcggcggtggcgagctccgtcactggacgacggcatgaccaacgtggacagaggcacgatggcggtgatgaggagcacagcggcggtaaggtgccacagggccaggacagtggcgaagctaggatttgaggttaggggggtgtgggggagaaagtcataaaaccgattaaccaatatgaatagtaaatgagccaaatagtcactaccgataataatcaatgtgtatataaatatagcttcgttgtagctagattataaaaccatcatatgttatgtttttttcaaaaaagcggttcaaatgttcaatataacaagacatcatatgttttgcctaaaaaacttgaattcagttctttcataatatcattgaaagtttggaaccagtccttgttgctaaattctttcaatgtaaactaccaaatagtctcataaaaagcattttctgttttactttgaaaagatgaaaatcataagactaagtactgagagtctgcctataatctaacgtgctaatgccctaacagtggatgctgcctaattgcctaaccctgtaatatactactagcagccagggggttcgggataggggggtgctggccccctccggcacccccggtagcttcgccactgggccaggagcttccacgggctgtggctgacggtggccgcgggcggggagatgcctgcggcggccttggtggttagggcagatgacttggcggaaatggcagtaccatttttgcactttggactagctagggttcataatttgggtattcatccttcagccatgcatcgtgcaagtttttcttgtgaaactgagcatcatgagagcagaaagatcggtagggcagcaaccaaaaacacaaaagtacaaagatttgttcttgcaattgggtgtttcacaaaagtgtgagttaaaaaaagaatatatagtttgattttcggtattaagtgacaagggctttggttgtggtggaatccctcaaatcaattcatatgacttatgtcgagtgtttgaaatatcgagctaagacatttagcgattggccttctcaaatagtagtagctatagcggactaaatggatctatagcggcgaaattctacatgagattaaatagctagatccttctcaaacagctagccggagatagcggcaactatatatgatattaagtgaaaagatagacttgtctctaattcattgtaaaactttggttaataaaggtggatccgatgtgaaatttactcttgttacaagcaactagccacatttaggaaatgagcactactacatgcccgtaaaaaatacttatgaaagtcttacaaataattatcttaaccatttaacttaaagagatacaagctataggaaatctaaatatactagcaggatggcaacatcagtgttggtaagagtatcagtgttagtatgagtgaaataagaaaaaaaattagtagtgaataggcaaattttgctacaggacatcgtaattgtgtggttttagctcagggacaccgtgaaagtgaagttttgggggaagacatcccataatcgtggatatttactgatggacaccgcgccgtctgccgtgctgacgtggcggacgggaggcccttttttgatgcgatcggacgtaaatacccctgcgcaagagataataaggttatgtggggcccacttgacagtgtcccccctcctcttctttttcctctctcggtttcttctcctctcgatctctcctcatctctctccctctcgtttccctttctcctcacgcgcgtgcgcgcctgagcggtatgcggcaggcgtgcgatggcgcggcaagcgaccggccgcagcggcgcgggctgaggcaatggcggcggcctgaaggcggcccgacggcgtcgggtggatggggaggcagcgtggcggacggcgacagcgtcgggcgacgccggcggcgaacgagctgccgagcaaggccatgggcgacgccgccgtgatgaaggtggacacgggcggcacgtcgcggagtgcgcgccagacggcgctgttgcacttgaagcctgagccgaagccgatctgccagacacggtggccgcggcggacgcgccccttggcctcggcgtaagcaagctcgtaccagagcgagccgttactggtgttaattgcacattaggctcgacatcccgtggttaataggcacattaggctctctctttgatttcctgcatcaatcaagctaagcttggttaattaatcaactagcagattattgtatatcactcatcattgtttgtactagatcaatcacttttgtgcgtgtggttacctcgatgccgggagcaagagcaatggcaggcggcggcggcggcggtgcgagccagatgcagccgtcgtcttcgctccaccactcggctaccgcccgaggcagcagctccacttccgccggcaggcgtcgtgcgggccggcttggccgcgcgtgggggcggcgctcgcagcgtggtggtggccccgagcaagacgaagacggcggcggtcgcggtggcgattcgtccgggcggagatggaggttggaggtgctaacagtcatggtggcgaagcggcagtggcgcgcgggtggtgctcgcgcgggagatgtggccgcgcgcggcggcagcggccgagcgtggcaacggctttggcgcggcggcagagaggtgaaagaggtagctggcggcggtggggagtggcctgacgggaggcccttttttttttctgacgtggcataggggtatttacgtccgaccgcgttaaaaaatggactttcgtccgccacatcagcacggcaagtaccctttagatggcgtggtgtctatcggtaaatatccacgattatgggatgtcttctcccaaaactaaaaccacacaattgcgatgtcctgtagcaaaaattgcgtagtgaatataggctagattatttcagttgtggccccaatgtgctccatattgacccgggattgcatcgggtcggagaataagttcgttgggagtttgttacctgatgcaagcgatgcggcgatcaggggatggagatcgcgtcagtagcgtgggcgtgagtttagcgtaggtgcgcgagtaaatgaattcaaagatttgtggatcgtggggtggtggcacgatttagcctcagattctttctttgtgttgagtataagtaggagattagctcaacttctaatttgtatgttttccaattcatttgaatgaaatccccagtaaatcgctccacaaatttcttcaaaatcttcagttttttctgaaacttctctcgttcctacgttcgtcagtttcgtcagtcgaaactgttttcgtctgttgccatacaagacaggagcaatgtgcgcacaaggtattcgacaagcgttcttctccaacatgcccaacgtacaccgtggcggatttaggatttaagatatgggtggtccaacctaaattttctttttaaaacacagtaaatgtaatgatgctaatatatgcaatgcaaatatagatagtaaaatagacaaaatcaccaaaagtgtaccatgatatactagtaatatacccgtgctaacgctacgtctatgtttagtaatagaaataacagcacatggttcggtatccaagtatctaataagataaatttaatatttaggaaaaaaactacggagagagttattatattgttgctaattatatagcctccaaaatataaaatcacaacttttgtatcttaggaatacaaacaaaacttattacctacaaataatacaaaccaaacttcatattacaaggagaagcgttttgattattttatactatattaatcaccggagacaaatctgacctaaatggaaggatataattatacagaaaagacctaccaaagtttcaggagtcattgtctagctcaagtatgatcataagtaacaagaaccctatctggaccagtcctcatgccttcgcaaagcatgttaaacagtgcaaaagcattttttgtcattctgcataataaattgaaatttgtcatttatgaattagtttatagaacatgctgtaaatttgaaccgcaaatgtatagaatatataaggatataccaactatcctgaattctttcaagtgcatgcaatcctataataaaccagatattaagagagtatttcatcaagtattcgctactataattatctttaaaaataaattgttataaaatggcagcaaaccaccagcagtactacttcatgctttgtaaaattagaatatacttgaataaattcagatgcatcaatggctgatgaatttttcatgcaaaattctacttactttcggttatgaagaatatagatagcacttaccatcaccaactggcttgccatcccatttgacaatgggcagaaaaggatctgaatgctgcatcccagcacacttccttgcagttggtgatatagtcaaaccttctccccatgctcattagttttgcaccttccactgttctccaccaatattattggcaagggaaaatcctaaaagagtaaaatattattaaatttaacattcaaagaggaaaatggcaagagattttacaagcacgactgtttgtgaacacctaaaaaaagggtacagtttatgaacaaatcaacagtccaaatgaaatatattggctatgaaatcaacagagtctgtagtatatagagaatggttaattacagaaatcatttgctatgaaagagcatgtcaaaaagcaaaacattgggtctaaatgaaatatattggcataacttaagatgactgacgcactacacacatttggctatggatgagaaaaatgtggagttcaagtccatctacataattgcatcttgtcatatttacaacatgcagctgtcgggtctttccatggacctacagtgcatatgaacatggagatataaaaaaaatacaacaaaaatacaagaccaagaagttaccattagagtaatgtggttatagtgcacatgaaaacagtttaatagaaatataggatcaagactcgttgcatgacagcctaaattccatgtgtaagatttagattccaattgatttaagacaagtatcaccataactcaagatgaatacctatttatgacattgacagcctgctcattaattatccacttacaatgaggcggggaagacaggatcacaggaaggagtactgcatccgagcaacaactgtaatggtggaggaatttcctaatgcccaatgatactacacatgaattcttttttccaatttcaataattaattggctaataccatgaacctgcagccatatgaatggagggaaaaataataggagaaattcaagcattaggcaagccccaaaaatatttcaggaaaccaatttttttggaaacttgggtattgcaagaactgaaaaaacagagacactaagaaatgtgttcccttgccttttagtcataacaacaaacatgcatagtggcactatgactggactaaaaaagagagaaagtacattatgtgttttttcaaccctgtattccaacagaatagaagatgagcctattatgtgcagtcatgtatctctacaaattatccttatgaaagccaaatcaattctagtaccataatctaaggaaaagcaagaaagatactgtaatgtgagatcaaatcatacaccctaaagctctgttcatcttttatgtgcttactaaagcaagctaatatatcacccaaaattggatatttgggcacatggtataatatatcacatgataatagaaatattctcttaaatagttagtataatgtatagctttgtattaactgaaaatggaaaacaaacctttccattgtttgtgtatttaaaaaaatcactatatacccctataggaaataaagcagcatataccctctccaaggaaacatgcagtatatacgatttttgcactgcactgaatatcactaaagcaaaatattgttaaaaaggaagcttaacataaacttgtacttacatacataccaacaaaaataagggagaaccagatgtgcattcagtgatggtggcagtgtaggagtctagttctaactgtataagttgcctataggaataatagtaaacatgaacatcacaagaaaaattacctgcttggtggtcaatacaatcaccatcaccaagtccgttttgatctttgtactgtatgaataaactctacataaactatcatgacacactgaatgagaacatgaaaaggaagagaggaaattcgttgtaccttgtagggggtggaacagagaggatgggggccagcttaccccaaccgccaaagaagatgcaacccaactgccaatgctgcatatgtctatgcaattaacccttttctccctaggatctatgaggtttagttaaaattcagtgacaaccagtgatttttaagtctcctgtatacttgcatcagctatcctactattcctaaaaagcttatatacatgtgttaggttataaaagcaagtcggaaattcttaactatgcatcactaaaagtcttctattgttcaagaatcaagataagagaggcataactggatccaaactgaccttggccaaagatcttggtcacaaattttcttaaccaaaacaggggactgagttaagcggaattctcacggttagcaacatcgtgttttcctacaatacaaacatgctaggaaaacacaaaagcaatctctgtggtaaacaatttggcagatctgcaatatgtatatagtgaaatcacaatctgagaatgtactgaagatagaaatctgcaccatgtaaattgctaaaatatattagccaaacaaatgaagcacaaaaaacttaattttgaaagaaatataacataacataacctttacccccagaacctcagtagtgtacctgctcaatcacacttaaggatggagctttatccctgcagcttgattccggttctttgcacatattctgttgccggcgtttgcggccatagaaacggacaaagtgttgatctccccaactttggtccatatcacctgcatagtttatggtcagtataacatttttcgcttttagcgtaagcccacgagaaaaggtctaaaaaatcatctcataataaactttttgaaaattactacaatattaaatgattggcattctaacatctatgattgggctaaaaacggcataactgtagaaggaagcaacaactgacaaacaaatggtcaatatctgaattggcaaatgtgtttagtcagcatatcagtgctgcattgcaggaatgaaaatgttacttccaaaaagcaaataatttcactgtcaaatatgcacatggtaccatgatcttattagagaacacttgccattgcaggcccagcaccatctgccactgcttccgagttccgacctggtcgcctctggctgggatcgattcgtaaccgccagggagagatcggagaggcgatgcggcgtgcgacggcggtggaggtggtctaacttctaagggggagagagcggagcggagatgcggagggaggcgtctgcctgctgccaaggtctcctcctcccgccgccacccggagtcgtgcgacggccagcggaggggagagcggagcagatcacgggcgcgcatggtggatggcgcgacggggctgcacaggagagggagacgaagggagacggcggcggcgggggaggggtcacgggctaagagagaggagaggagagggggaggagatggcgtcggtaggccgcgtcggcggcagaaattacgggcggagcgtttcggtcttttgggagggagaggagaggtgaggtgggagcgatttgggacgtaggatctgagagagataatctggaccgttgagtgatgaatgaaagaatgagtgaaactatttgtttaactataggctagatagactagatagaattatttaataaagcatattgaaacatataaaattagttattatgtaaaaatttagcttcaaaaacttatacggttatagaagtttaaagaagactaccatactactttttctttttatcaggtctacgccttctaatggccagaaaagtattcattatatcttcttcacccactttaaagaaaacatatttgttgtatacttttgaagaagagatgcaatatcttcatctttcttcgtgattcaacaatctataatatagtactacaatttaatattacaatgtacaagagttcaaaaattttaaatctagaaattaaaaaaggtacacaagtggaaaacctaaaattgttggtgcaggcggccagacgtcggcggcagcgcactgcacacaagaaggcagatttccgtgagtatgtgactctatttttcagttttactcggctcgacgacggctcctcgcggcgggggcacacacagcagcagtgcggcgcagtggcagccaaggcggcagactcgcgtgcggtgcagtgtgggcgtgggaggcgcgtcgtgcgtgggccggcgacggcgcggcgtggcgctcgctctaatcgcgtgatcaaatgagattgcattgacgcgtcgtgttacgaggctagggcgaggaggagagagtcgcgcgacacttctgttctgatcaatacacgcgcgtgtgggcggcgggcgccatgaatcaggaagaaataaggatcgctattttccttttttaaaaaaatagtcactattttctttctttttttttaatagtggggtcgatcgtcgtttgtttgccccggaccacctatggtccgccattgaggattcaatctatagtcaatcgaagtaaagagtcttcctggtgataaattacttacttaactcaatggtgctttcatacgcaggagtcattgattcaaatccaatagtaggtaggttggtagaaaaattactagatagcattggccctacttcgcttcgctatctaataactttttctacccctcttctctttttctttgtatcaactaaactgttgggttgtttttaattagatggggaatccaattaatagcctcgactcgtatcctagctcgtctgagagctagcttcgcttcaaccaattttttcgtaccctcagctctactcacgttagcttcggctattccaggaatacgtaacctattttactgctgattatgtgtaaactgcttctggcgacggacggtactatctattctgtcaaaaaagttcaatagtagttttttaagcaaatcatgcaatggtttttcatttcatccattgacgtgttgatcacttaaaagttagttctcggaaggagatggactaatcaccttatctcttctttctataaagttaatgcccactaaacacctaaaatttatcatacaaacatactctctccgtctccgttttttaatagatgacgccgttgacttttaaacatatgtttgaccattcgtcttatttaaaaaaatttatgtaaatgtatatatataaatcatgcttaaaatactttaagtgataaaacaacttacaataaaataaattataattacgtaaattttttggataagacgaatggtcaaacgtgtgataaaaagtcaacagtgtcatctattaaaaaacagaggtagtagtatttattagtactcctaaggctgtgttcgggagacaaggttcctaatcttgccttccaacacgaaaaacaaagcccacgcgagattaattaagtattagctaaaaaaacttaaaaaatagattaatatgattttctaaagcaactttcatataaaaaactttttaaaaaaagcatgttcatgtaagcatagagtaaaacaagggaagtgaattaggaaagagggaaaatgaacacagcctaaagtctacatgcaagcatgccacatcaatccatttagcacacaaagctcaacatgtaagcatagagtaattatacctacaatttatttcattataaaactcaacataacatgctaaatcatcattctcaaatcattttcataatatttcaatacaaatcatttcatcatttctccaatatttaatatatatcccatagcaaagtacaaggtatcatctaatattttattatttgtgtggtatttgtgcgaactttacgagtctcggggtctgccttgtgcacccaagcagcgacaagtacatcctctaattagagagcaggtacaatagaagactataagctagctacaaacatatatcgataagataaaataggagagagaagcagcggactatagatctatagccagctacagcacgggcttcaagatataatgtgtgtataacatatgagaccatgtattaataatatagtatatgtttataggtaactattgtatgaattggctattaaattggatatagatgatttgaagccattagttggctatactattaaacttgctcttaactaatgcaaaattttcatgtaatcttcataagctgctaggttttgttgataggattatttgtagtatcttctgatattgtgtaggtaatgccgattgaaaaaaaaaaaagatgaagttgtatccatagctaatatctatatgttcctttagtggcatgttgggatcgtgggaaaattgcatgagaaaatgcatagtacggcaatcactgctactccctctggtttaaaattttttacgttttaaacaatgttaatattttctaacgtttcaaacaaaggcactagtctccaaaggatatatttagctacaattttctattataacctatacaataaataaaaaatatttatttttattgtagtacttttcaaaactaattaatctatatatgttgttctagtgcctttaactaaattaaataaatagttttatatagttttatagtaattgatagtcaaagttcaaaatattcgatctcaagctttttcagagcgtccagagaatattgataacgtaagtagtacatgccacttggatctcagcatagaatgaagcgtgtctgtcaggttggcttcaccgccaccactacatactttttaagtagtaaagataaagatgctaagatttgtgcactgtgaaagttttgtatgtagttttgggtttttttgattgtttgccgagataaaaatattgtttctttccttgtaaccgaaaatcccttttataaatgtaatctatttccatatatttcacccatgtacggctcggtccccaccaccgtaaaaagctaggtcgtgtagtcgtcgtcgtcctctcgtcgaaaggttggtgggcatggacctctcctcgtcgttggcggcggcggcgtcggcgtcggcggcgtcaccgtcgttggccaaggcggtggacacctacagaaaggcggtcggcacggcggccacgctgacggcctacaccgtgctggcgcgtggcatggcgagggagctcgtgccgcacgacctgcgcgcggcggtggcatgggcggcgtcgctcgtccgcgcccgcttcgagccccgccccgcggagcgccgcaccgtcatcatccggcgacggcgacccgtacggccgcggccacgagaaccgcgtcttcgctgacgcccactcgtacctcgccaccaagatcgacccccggtccatgacccggttctgcctcagcggcggcgcctcaggcggcgagcgacgcgcgcggagcagcgtcgtgatctccatggttcccggcgactcgatgaccgacgtgttcgagggcgtggagttcacgtggacctccgttcccggcgagggcgggggcggcggcgggagatcgaacggcggcggcacggcggcggagtcggactcgagggagctcagcttcgacgcggagcacacggacacggcgctcgacaggtacgtgcccttcatcagggacgaggtggagcgggcgcggcggcgcgaccgcgagctggagatcagcatgaacgagggctcgtcgtggaacggcatcgtgcaccaccacccggccacgttcgacacggtcgccatggatccggccctcaagaagcagttcgattttaataaaagtcaaaacatcttgttaaccttaaacgaggaagtaccttataaatgacatgtgaaaacgaaaggatatccacttgagggatgaatagtgtttcccatgccaatgaggcaacgacgtttgttgtttgtgagtccaggagaaggagaagctgacgctgtccgggctgctcaacttcatcgacgggctgtggtcgacgagcggcgaggagagggtcatcgtcttcaccaccaactacagggagcgcctcgacccggcgctgctccggccggggcggatggacaagcacgtctacatgggccactgcggctgggacgccttcacgacgctcgcccgcaactacttcctcgtcgacgaccacccgctgttcccggagatccggcggctcatctcccaggccgaggtgacgccggcggaggtgtccgagatgctgctgcgcagcgaggacgccggcgccgcgctcgccggcctcgcggagttcctcgaggtgaagaagaagaagatgaatcaggccgccgtgtgaatgtgaaggcgagtagcgtcgtcgttgcatcaagaacagtcggatgattcagttcttttgctcctaatttcatgtgaaccgtcactgctttctgaatctctgattgttctggttctctcctagctagttaggaactaatttgggatgattgatttttgtttcaaacaaatttcggttagttgattggtttcacaatttttttgggtgattattgtattcgtgattggataatctgtcctccacttgggttatgtagagtgcacaaactgattcagatttaagtatgttatccattatgcagaggaacaagttagctaagaacaccaattggtcctagcttgtttcctcttctgttctttcacttgagagcatcatgtttcaattatgatcatttttagtggtgatattcttcagggacaagtattataatctcgtagttcgtattcgttgtatcttaggttcagggtaggtaagtgtagatgttaggtgggtagatgaattggggtgctcgatgggagagtgaggcctgccgccccgctttcttgattaccttcaaatgactgtcccaatgctagtaacaaccctacgtaatactccttccgtctcaaaatataacaacttctagcgtttaaaatttgtcctagaatataataacttcttcacatatattctcttctcaaccaatcacaatcttccacctttcaaattctccatcaactttttttttcccaaccaatcacaactttcttccatttcattctacttactttcttaaatattaatacccgtgtataaacctaaaactctagttggcgcgtgcgtggctccggcgcacgttttctgggactaaaagttagttaactaatcaattagttttagataattacagtatgacataatgacattagtaattaggatttttcttttttccacgagatttttttacctaacaaattgaaaagaaatcaatatctgaagtctaattttcaaattttaaatccagatttgaaaattttaactcaaaatttgaattttttaagtcaaattttgaaaactttcaactttccatctcaaatttgaaaaactttcaactcaactttgaaaactttgaacccagatttgaaaactttcaactcgagatttgaacactttcaacttagatttaaaaacttttcaactcgagatttgaaaatgttcaaatcgagatttgaaaactttcaaatcagatttgaaaatttttaagtcaagatttaaaatctttcaactcaggatttgaaactttcagctcgaatttgaaaactttcatatcaaaattcaaaacatttctcttacatttaaaaaacattcaaactaaaaatttaaaacttctaactacaattttaaaaacttttgactccaaatttgagttgaatcacgtgcctagattacaaaagttcaccaaaaaatcaccaaaaagatgttgggaaaagagaaaatcatgcgcatatggaaaaaatcgtaaaaaaaaaaaagcctaaaagtcgcaagtgggcaacgcgcgcgagatagccaactaacgcgtctgcgcgaattagttttttcggcttggagtaatggagttggatgcatatgctgcagatgcactacagtgggaatgcaaaaccgcaagcaaaaaaaaatgaacgccgttgccggggatcgaacccgggtcacccgcgtgacaggcgggaatactcaccactatactacaacgacttgcgtgtcccctcgttatacagtactttacttctccgcagtccacacgaagacgattgttcgattgttgtagccattccaggcaatcctaacatggttgctgctaaaacgtttcagcaaaataacctccattttttttttgtcatcacaaatggcgacaaacatatgctctccacttttttttcgcaggtagaactacaattgatcttcaatggacatcttaaacacttgttgatcattttataaataaattgattaactaggccattaattgagggttttcgttagttggccacggacatagcaaaagcattttctatttttttaaacaaacaaaactcaaattactatatgtatatttacaattaaatttattatttttgttacaacttatagaagttgaatttgaactggcatgtttatagagtgatatattacatattaatctatcttgtcattttttaaaaaaaaattcgtaatcatctagttgatatgcaataagcgaatgaacgttcactcgagctattagaatccatctccggattttaaaggatgtttgcacgacttgaactaaatcttgtgaacacgctataaaatacttgtataatagcctaataaaaaatcatacatatata

SEQ ID NO: 20473 - DNA, 1049 bp, Oryza sativa
tccctgtaactaactaaccaaccgcctctgggacccaccaccaccaccacccagctcaacccaagaatccaagaactcgtgcgctgcacgcgcgcgccacgccacggccatggcgacggaggcggcgccgctcccccacctgctcccctccttcggctcgccggcgacgacgcctacgacgccgcgccaccacctcgccgagctccgcatcgagcgcgcgcactccgcggtcgccttctccgcgccctgcgacgccggcaagaagcggcggtgcctcctcccgccctcgtccccgcgcaagaaggtgctgctcgagctccaccccttcggctccccgaccccgacgccctccccggccaccgctccgcctctgctttcctcgcgcgcggggacgcggggttcttgccccgacagcgacttctccttcccgttggcggtgggcgggacagggggcggcggcggcggcggcgggggtgggaacatgttcgcgttcttggaggacgcgccgagggcgccgacgacgccgacggggtccagcggcagcagcgccttgtcgttcttggtgtctccggccgcgccggagacgcccacgggctccaccgcgagcggcgggttcgcgttcgtggcctcgccgaaggagcccacggcgccccccggggccttctcgttcttcgcctcgccgaagcaagcggcggcgaccacaggccccacggccaatggcggtttcacgatcttgggtgcaccggagcaaccgctgacgccgacaggctccaatgccagcggaggctgcggttccttgtcgccgaaggagttgcacggcggcagcgccatcgcgcccttgccttccccgacgccggcgagcacggactccaccggcagcggcggcttctccttcttcccttcgcctgggccggcgttcggaaccgcggcttctccggggctcgcggcggccaatcagtcgtctcccacaggcggcacctccccctcgccgccgttcgtcttcacggcctggccagcgcacaagtccggcggccgaagcagcagcaaca

SEQ ID NO: 20474 - DNA, 2761 bp, Oryza sativa
gcagcaagtttgaggcaactaagagcctagtcttccacaagcatgatctaagttaatggcaccccaagatctaaaaatagaagtgaattgatttctccttaatctgattgttggtactatctggtagaaaaatccaatactgaccaaaatattctgatcaattgacaaaattgggcgacacaaaacttgtagataccataagagctcttccacagaaaaccattttatgcaagtaatcattagaaatcatcagttctgtgcaccagtgacctgttctgaatagaactatcgacccattacttgtgtgttgttatttttgtactgccaaacaataagttaattaaactaaaataacagctcaaaggacaattagacccagctccagatcaataagtgaattataaaaataaatcataaaaatatcataatcagaatgcgagaatgactacaacaacaggaacaaaaatgtgattacactaaccaggggagtcccgtggatcaatcatagtaaggtcaacccccaccagtatgttctgtggaagaggatcccatgtttttctctcagccaagaacatgatgatttcagtatcagaccaagagtcccccatagcaatgccaagtggtggtagtaccctagaaaataactccattttcagcaatgcactgcgataagatgcaatggtgtttctggtccaagaaaaactacatacatgctatgttcctcaaaaaaatatctctgattgaacacacttctccacttaaagattcaagaacttgcaatcccaccaagtagaataaacatatagctaaacaaataataagcagggttctcttgtcagactaatggaagatcaagaaagtacacatacataaacatgaagaaagaaaaaaggcacttgaagttttgtaatgacaagggccatgcagcagattcacagttggacagtaaggtgatgacatcaattccagccagagttaggcagaactgggggcaatggaggcagcattgacattctcgtgttggaggatggaacaaatagctagctgaggtaatcgtttgccaatatcatctaaatccaaaaaaaaaaaaagaagaagctaatggctagatggagaacagcaaaccctgtgaacaaaacactcatggcatgaatagacaagattaaaacccagcctaactaacaacaaaacgaggaccacctaattaacagtgatcaaacttcaccataataactaagtgaacaagaagctggctaacaattcactatgaactgaccagctgacagggatgacaaacacaaatatctcaataaaaaatcaggattcaaaccaacagtctctgcctaaaaacaataccagatggataatcaacacaatctccagtttctccacacatgtcaccacaatgcaggagcacaaatacacaatctacataagtaaaggactactactaacatgtcacaattatcacaattcacaggttacactcaccaactcacgtccacacagatatgagatattagtagattaacaagtagtaaacaacaatatccatgagcatgaaaggtaaaaggagtgagtgcgaagggcatgggggtgaaccggagaggcataatctgcgaagaagccgaggctcgatgtcgacgacgaaactgacgaacaccctggggtcgccgtcggagcagaggaaggaggtgcagtagggtaaccaagcacagaaatccacgtactctacggcggcggtgatccttcgccctagggaggccagaaatggaggagcggcgcggtgccggcggcggtgcccggatgcagaggatcgagtggattgggaaggtcgcgggtcgccggtggcctccggcgaggggagcccggcctcgccggcgccgacgatgacttcccgcggcctcctcgccgcgccttggcggagaagggagaggaggggacacaaactttgggctcaatttggcgcttgcggcgcgatgggtatttctagggcttagcggtcgtcgtatattttcattttactccctttatctcttcaaaaatacgaatacggccttccaaattagatttcttcgcccgcagctctgagaatccgacctgatcagaatacaagattaaaatcgagccccaatagcggtcgatttatcagattaaaatcgtgcattaaaatcgagctctgagttgcgcctaggaatgcaacgaggcagaaatatcaggtggagtgcgcatgctcttcattttgtatgcgtatcgaaaaaaaacacttttctatctactttctttattttaaaatgtataacgtcatttactttttcgcataacatttaaccatttattttattagaaatatatatatatatatatataatttattttttgacttgttttatcattaaataaaatataatcctaacttatacttttacatatttatactaaacttttttttgaataagatgaatggtcaaatgttgtaaaaatattaacaatttcatatattttgaaaaggatggagtattttgcaaaaagaaaaaaatagtagaaaagaatggatggaaagctagaggaataagttcaccggaggtccctcaacttaacagtgagattttttaaggtcccttaaccacaaaaccagaaatatgtacccctaaactcacacaaaccgtgcattcaaggtcctagggcaatatatatgggtggtttcgttgatgtggcatcctagtcagcaaaaaaaaaaaaaaaaaagtacgtggggcac

SEQ ID NO: 20475 - DNA, 1183 bp, Oryza sativa
tccacccaccgccgcctatcatcgctccgcccgcagcccggcgccgcttcacgcactgcgctcgctcgccgttgcccatcgccgctccgcctactgccgcgctcggccaccgctgcccatcaccgctccaccctccgccgctctgctgccacgcgggcctgccgcctgcccattgccgttccgcccgccggccgccggcctccctcactgaagaggaagagaagagagaaaagagaagagaaggagaagaaaagaggagagggtggctgacatgtgggcccacacacttttttttatttttttttactgactaggatgccacgtcagcgaaaccacccatatatactgcataggaccttgagtacttggtttgtgtgagtttatgagcacatttctggttttgtggttaagggatcttaaaaaaatctcgctgttaagtcttaaacctccgatgaacttattccaaagctagaggagaggagcaggcggcccaaaaagagacacgaacttggcaaatctcaaaagtccggcccaagcgtactggcatatcacaccgaccaccggcgcggcacggcgcggcgggggcggaagggcgggaaaaagcgcgcctcgccgctcacctcaccggaaaaggcggcggcggtccgagggcccccgaccccagggcaggggccactgcgctgctcgcacgcttcaaggtgcggccccgagcaaccgccgacggcgaatcggcttctccgggagcttgcctgccttgccggcctccccgtctccccgacgacctcgctagctacgaccgcagcttcggcgacctcctccgccgcccttcccgacgtcctccggccggcgccctcccgcgcaacaccactggatcgacgtcgtcctccggccgtcgccctcgccggcatcccctgacccctgcaggctgcagtagagatcggtggtgtgtactagacgtcattcactcgctgtcctcgttcagatcgactgcgaggtggagaagccctggtgccgtcatcctcaagaacggagaaccaccacagtacaccggtcatcgtccccagccgtcgccaccggcccaccgccgccgccaactccagtaattctttgtgtccactgtctactactccctacttttatatttcatattatataagtcgtttaacttttttactagtcaagt

SEQ ID NO: 20476 - DNA, 4706 bp, Oryza sativa
cagggtgaagacgcctcgccgtgtcacttctctgaatcttacaaatcgaggtttagtagggaagatttctccttcacttggaaacctcacatttctgaagtttctgctcctgccaacaaactcgttaactggagagattccttcatcctttggttacctgcatcgcctccaattcctctacttgagtaacaacacattgcaaggaatgatacctgatctgacaaattgttccaacctgaaggcgatatggctggatagtaatgatctagttggacagatacctaatattctccctcctcatcttcaacaattgcagctttacaacaataacctcaccggaaccattccttcttatcttgccaatatcacatctctgaaagaacttatctttgtttccaaccaaattgagggaaacatcccaaatgagtttgccaagttgccgaatctgaaggtcctgtatgccggtgcgaacaaattagaaggtaagtttccacaagccatcttaaacatttctactctcaccggtcttagcctcgcttataataatcttagtggtgagttaccatcaaatctcttcacatatctaccaaatctccaagatcttggtttagccgcgaacctctttcaaggacatatcccaaattcacttgcaaatgcttccaaactatatatgttggatatagcactgaattatttcactggaatcatacctacctccattggcaaacttaccgaactatcatggttaaatcttgagcaccaccgactccaagctcgtagcaagcaagattgggagtttatgacaagcttagccaactgcagtgagctgaacattttctcgatgaaggacaatcttctggaaggccatgtgccaagttcattaggcaacctttctgttcaacttcaacatctgctcttgggaacaaataaattatcaggagattttccttttggcatagcaaaccttcctggcctaacgatgttaggattggaagataacaaatttaccggcattgttcctgaatggcttggatctctacaaaatttacagggaatagagttggcaaacaactttttcacaggacttattccatcatccctagcaaacatatctatgttggaagaactctttctagaatccaaccagttatatggatatataccctctagtttgggaaaactcaacgttcttagtgtattgagtatgtccaacaatagtctacatggcagcataccagaggagatattcagaattccaaccataaggaagattagtttatctttcaataatttagatgcaccccttcatgatgacattggcaacgcaaaacaactcacatatctgcagctttcgtcaaataatataaccgggtatattcctagcactttgggtaattgtgaaagtttggaagacatcgaattggaccataatgttttcagtggaagcatccctacaactctgggcaacataaagactctaaaagttctcaaattatctaacaacaacctgactggatcgataccggcttctcttggaaacctacaacttcttgagcaactagatttatcattcaataatcttaagggtgaggtcccaaccaaaggcatcttcaagaatgcaactgctatgcgggttgatggaaatgaaggactttgtggggggtcactggagctacacctactcacctgttctaacaagcctttggattcagttaagcataaacaatctattttgctgaaagtagtactcccaatgaccatcatggtgtcacttgttgctgcgatctctattatgtggttctgtaagagaaaacataagagacagtctatctcttcaccctcatttggtaggaaatttcccaaagtttcttatcatgatcttgtcagagcaactgaggggttctccacatccaatctaagtggcagaggaagatatggctctgtatatcaagggaaattatttgaagggagaaatgtggttgcagtgaaagtcttcaatcttgaaactaggggagcaggaaagagcttcatcgcagaatgtaatgccctgaaaaatgtacgacatcgcaatctagtcactatccttactgcatgctccagtattgattcagctggaaatgatttcaaagccctagtctatgaatttatgccacaaggggacttgcataatttactatactcaactcgagatggtgatggatcttcaaatctgcgcaatgtttcacttgctcaaaggtaagcattgcagtggatgtgtcagatgcattggcatacttgcatcataaccaccaaggaaccattgttcacagtgatataaaacctagccacatccttctaaatgatgacatgacggctcatgttggagactttggactagcaaggttcaaatctgattctgccacatcatcttttgtcaactcaaattcgacctcttctattgcaataaagggaactataggatatgttgctccacgtattgtgaattatgcattgacatttcttgctattcgactgacacattgcaattttttcatattcatgtgagcatgtgaattagtgggaactaaactcttcctttcttgatctactcaatgtgctgaggatggtcaagtttcaactagcccggatgtttacagcttccgaattgttctactaaatatattcattctaaagaacccgacggatgacatgtttaaggacggactgagcattgtaaagtatacagagatcaacttgcctgagatgttgcagattgttgatcctcagctgctgcaggagttgcacatttggcacgaaaccccaacggatgttgagaagaatgaagtcaattgcctgctttctgtgctaaatattggacttaattgcaccaggttggtcccaagcgagcgcatgagcatgcaggaggtggcctccaagctgcatggaatcagggatgaatatctgagaggagactgaagattgaagaaacagatcactgatgattccatctgagattgaagaaacagatcactgatggatacgaggggaaaattatctgagatcagtactttttccctggataatttgtgaacgaactataatggcatgatttttgtaccatcataaatgtagttgatgcatggagtaccggcatcacatgccactgatgcatccggtacataatttactgtgttccaaatgtttctgtaatgatatcagttcttgttaatacagtgttccatctgctatgtcaagaaaacggaaactaatattgttgcttatcaaattatgctaatgaaataactcgcatgacaaaatactgaagtgtaaaacaattgccttctcatattttattttgatcaggtacatggcatttaggggacatcaagaaagatcaacaccaggattgaagtcgaagtctcagggggagtacaaaggtgagcaaagaatagacagtatcataaaacatctgggagcacatatcacggttttgtaagctaaaaacaatacaaggctacacaatgatgttcatgtaggataatctctactgcctgtcattccaactcaaacaaattgacaacaactgacaactcatgaaaattgggagtagcaaaaattgagttcggatgggcctttgtaataatttgatatacgtgtgacgtcttcgtcacagctcagttaactgctgcctcccttctgtttgagggtgatcttgtcgcctaagctgagggcgattccttgggtcttactccgtattctgatatagccactcagcttgccatcggcttgcttttcaacgctgatgttcaccaatgcatcctcaccaaaaacactcttggcatagagattagcagcgataaacccacattctccatcaagcgcagatctgatgttatcatatacaagtataatagggtcagcggtattagcaaccaagcagcagtggcattagacatgctatgaagaacccagctttgatgttggaaaaatgtaaatatgacactcagataaataaattggtgagggaaaaagaacatgattcaaccaattcactccatcaagacaaaagaggggttcttgcagtgagattattctgtttagctacaccaaactaaccaaccatgtacttactacaagccatgtacagatattttgaccatttgggttgttctagtttctgatatcctataaaggtgtctcaaaagaatagctgctaataaaatgattaaaaatagattcagcatatttgatttattacgcgtgcaatgttggtttggtaggatggaaactaaatcacgtgtctagtttgtgagaccctacgcccagttctcaatagcaaaacaggtccacaaccatcccattctagtatataaaccaaagcacctggtatatctttattaagtaactaggaaataatgcagaagctactcttggcccaagttgaccagccttatatgcttaatgtacagcgcaagtgcacaccattactctagtttatctggcacatgcataagagaaaagtgggcgactttccaattaacagttgtgtatgtacaaggctgtacccatggagacaaatgcagtatatcaaagaagaaataaccctaactgcctgttaatgtggaagaatagtttcattgtaacttacggtggtgttagacacttcatatttgtcgatttgatgatatgatccaaaaattccttctcatcctgaatgggggtgcagg

SEQ ID NO: 20477 - DNA, 5546 bp, Oryza sativa
taacccaccaccagtcccccacaatgttacctcttcataacacaaatagtgaattacaattttggtgttcacaagctaataacagaagtaaaagaatatgttaataaagaggagccagacaaaaagatcacagtgaagaagaaaatctagcagctgcaaataatacatgaaagaatcttgtaaaacaagcatttgcaaaagctgaagcttgagaaagaaccctaccttgttttcccactcaaattctgcccacatgttccggaaagcaacatcggcacaagtagcaggtgagatataatccatgatgtcaatgtgaatatcgtttaggaccaccactgatcgctccattacatttgaggtctcataaacaatgttaccgaatataactcccgtctctgttgatgaaaccttgatgttggcccgaatttgcttgcttgactcaggagccagcgtgtaattctgggggcggtcaacaagtttgagatcacccattgttgctaactccaagcacaagttctgaagtgtttcctttgttcggtttatgactgtaacatcaagcacaatatcatagtggtgaacagttacatatgcttcagcatacacaggatcactgaaccctgttagttgaagaatgcgattcagtctgtttgcgtcatctgcatcttttgtaaattcaccagtagcagccttcaaatcatcttggactgcatcttccaactcaagttggctcattccctgcaagaatgaatggcatgttttagtgaagaaagaaccgcaggccatcttttcaaatactagacaggaaaaaacagtaacatagtaacacgtcagtccatgtgttaccatattaaacaataacattaaatctctactgtacaaacaaaatgttccatgcccatttctgtcagaatagtctacacaagcctatccaaatattcttacagagaatcaagttttctgcttaattattacctttaaattttaaaagcatgcagaatatttggataatttgattcctgaaccagaataataacaaatccaacagaacacttatgtagccatcaattgaagtatttaactatccatgttaatacttactagtactacaagacatattcagtttataatttgatggggcatgggagtattgggaccattcactgaaacacaaaacagagaaggaaaatgatattgtctatcgggtataatattcgtggaacaataaagtaaacacccacacagaacctgttaatgacatctgacatctggttaagtaaaatctaattgagacaggagaaggatattgataggcctttttcttttgaatgtttagaagttacttgtagcagtacactcgattgtacacaattgttcaaattctatgtctagcactcaccaataggaaatgcttcatttcaacctgaacactagacttaatcattctttcatttgttaaggatatgcaacatcaacagatgaccgataattggcattatcaatgcacgtgtcattatgtggtttgattaagctttggatgtttgtaaacagctgatacccactattagccaatacatatggatgatgtggattctataaagcaaacagtgaaataagcttaccctccggctcttcaggtggtagaaatcaatgagatcatcaggctgggcatgagagatctgcgccttggccttcatctcctcagtctctcggaattgtttttcagcaagcatctttgtaaagctctggcggcatgactgcaaccagaccttcctcacatcatcaccagtattgcaaagcaacctcacacagagcacaatcctatcatatgagtcattgtcaatagggtggggaaggtacgaggactgccccaactgcagtatggacaccatgatcagcaaggccccagtagaagccttgtttgcttcagcctttgatggctggacctcctccagcctcagcacaagcttggtgagggtacaggcaacaacagcagctaaaaagaaatcaccagacagaatgagagatctgagattctgtgtggaactcagtgaccctggagcaacagctggagacgaaatggcagtctctgtggcagcactctgtgtggcataagtaccatctgcaagaacaacaggcctcctagaagatactgtgacagagttcaccacaggctgggctggctttgacgcatcagttgattctccttcctcagagacagtgtagaatggcagatcaccaaggcactgcttgatggtggaaatggcactctcaacctcagatagtgaaagggagtactccccaaggatccagagagcacatgagcagacacgggatgcacggatctgataaaatgtatcaatcagcctctgaatcattgacacacggagcttggggttggtctcaatgatctcgcgcacaaacaaaacaacatcaaccgctgcagcaacattagtgtcaccaaggaagtccatgaggaggtggaccaccgatccagccacctctgggtactcgacagcgcaggaatggatcgcctgcaccagcatctgccggtactcaccacccttctcgagatccccggcctgtgtcttaacaacctccttcttgaggtacatcaccacctcctccacatttcggggggtaagcagatcaagcaccaaatcaagcaccttcctcctgacatccacattggggctagatagcgcacgcagcacatccatgaccacatccaccatgacatcacggtgcgaggcacgcagctcgtgcaggcggtcaaggacaataagcttcacattgttgtcgctctgcgacgacagcagctggcagtaggtgttggcagcagcacgcacggcagtgggcgccgacgacagcgacacgagcgcgccggcggactcgtacacgacggcactgttgggcgcggagaggagggagatgataatcttgatataccttcccttgtcagcgcggttgggcgagcggcagaccttgcggatgagatcgacggcagccatctggaggagatcaggccactcggcgacgcgctcggcgttggtgagcaggtacgcgacggcgcgctcctgcgcgcaggcgcagagcatgaggaacccgttccggcgcgcggacgcgtcctgctccccggtgagcgcgcgctcgacgacctcgggcgcgtcggggaggagctggtcgccgtgcgggaggcggtagatggcggagatcgcggagagcgcgtgcctgcggatgaagtggtggcggtggtcgaggttggcgaggatggacgggatgagcggctcgagcagctcgggctcgttgaggcggcagaggaagcgcagcgtgaccccgcggatgtactcgttggggtgctggaggttgttgcggaggttctggcagatgaggatcatctccgggagtaccttgccggaggcgacgtcgcgcttgtcgacgatctcgaggtagaggaggaggagcttctggatggtgtggtcctcggaggggaggacgtagcggacgacggtgatgaagaggtgggggagggtctcgccgttgaggagcagcatgatggcgcgcttcatggcgtcgaccttggcggcgacgtcgctgccctcgaggtcggccttgatctcgttggccatggagggggagcccttgtcgaagtggaccaggagggtgcatggcttctccatggccgccgacgccgccgctgcacggccgccggtggggggtggatctgggggagtggtcggtggatctgggctctgtgcggggatcggatctgggggggagaagcctctctatgcctatgcggcacggggaagacgaagacgaagaagagaaaaaaagagtgggctgttcggtgcggtgcgggggggcacccaccggtagacgcgctctctctcttcttgggccgaatgaaaaaggccgatatattttggcccattaaaacaaacggccttctgcagcctggtctttcggactattacgccatacgaacaacgggccggatgcaatcgggtaagggtaaggttgtcattatccagaggaataagttcatctaaggtcccttaacttgttaacgaatccaattttcatccttcaaagaatccaattttcgtccttcaaaaccagatacaacgggtccctcaactgtcaaaaccagtgcagatgagatcactcggtggtttggacagcggttttggctgacgtggctaatttgactttggtcttcatctaatgtggcattgacatgtcgattacgtggtaatttgattcgaaaaaataataaacctcatgggacccacatattagcttcaaaaaaaatatataaatggtggggcccacgtaagccccatgtgtcattctcaaccctcctcttcttcctcctctctcccccctctcttcaacagttcatctctctcccctcttctctcacttcctcctatctctctctttctcacttttctccttgttttcaaaaatgacagggcgaggcaggaaagaacgggcagcgagccaggcgtaggcgggcaccacggcggtgggcgcggaggaggggggtcctagtcggcgcgtacgcgtcagggacgcacgtttttttccacacttaaggcagttaactaatctagttagagataatgacggtagtagttaggattttctttttttcgtgagattttttaactaacaaattgaaaatgaaatttatatctgtagtcaaatttttcaaaattttaaacccaaatttgaaaactttcaactcgaaaattgaattttttaagtcaaaatttgaaaactttcaacttttcatcttaaatttgaaaaactttcaacttagatttaaaaactttcaactcagattttgaaaacttttaacccagatttgaaaaatttcaactcaagattcgaaaactttcaagttcaaatttgaaaacttttaacttgagatttaaaaatttttaactcgacattaaaaactttcaactcgagatttgaaaactttcaagtccaaatttaacaatttttaagttcaaattaaaaaattactagtaaactaatcactagtaaaaataggaaactaatcactactaaaactaattacaattttttctcctacccatacggcatcaaactgcgagaaaaaaaaaaagaaaacgacgataggttagcgaaaaaaattgcgcgcgcgccctacgtgggccatgtggaccgggagtgcgcgctgccggcgcgcgaacaaattaggattctggcggaggaggcggagccgggcgccgcggtaatggacgcgaaggtggaggcaagcgctgtggcaaccgtcaacgagcttcttggcggtgacagataggctaataggcatcggaggagcgggaggacctctggatcgaagccgaagccatggaaggccgcaccgagaacgactccgccacctacgccgactctggcaagtggcaaactggcaacccctgcctcgacttcttcttccatgtcgcagtcatccatggagctcgcggtcagagcaaccgccgcggcctcctgctcctacggcaccgcacctc

SEQ ID NO: 20478 - DNA, 3890 bp, Oryza sativa
tcataacaatttattcttggtaagtattaaggctggcccaatcagatcagtttattcttgattccatgttaacaagctggcccaattaaccattgatcaatattttttttggaagataaacttcatttaataatgccatgaattggagaaggatgagaaaacaaattactagacaatattcagtggtattatttgggatgaaatgttttaggctaatatatttttatttacattccccttttctaccctctaagtaaataactgaaaatagacgtcttagcttcttttcgattctcagaaatttcgctaatttgagcaagttcagcagatcgccatgcataaccccgcagatcagagatctcatgtgtccatatcctgttgtttccggtcgacatccttggttcatcattacctcaattgaaggtaaaagcagtttcttctctcttttttccctgttttccttgagtggttgatatgagaagataatatttttcctgttttttttttgcatgtgctggaatttagaataaaaacaattgctctcgttcatcacaaatctttatctattaagatatcatggttcagaatttatcgtggtttggttgttagaggggtttcagactgttactccgttagccattctaacgggatagaagcactacaatgttgtgtagttgcctggagaacatgacctaaaattgataaaatgatgacaaaatgaaggacatttcctttatccagaccatcatccctttatctgaataactctggtttttttaatttttttaatccattcttgacatttggtatggtttgtggagttgttcagataacagctcaaatctggactctgctcttcttttttttaaaaaaaaaaatgtaataagtttgaagttctgatgttatatccccaatccatgcatgctgtgttgctttcatcactaggcatcctagcatcatggattgagtaactacaattttggttgcggcaagtatttctgaaataacctattaccctgaatagggtttatctgtacaatttagttaggtagcaaagatacagaatgcaatctactactactaacttgaaggcctgcacttcttaacctctacatttttggatctgcaaatcttgcactaatttgcctaaggacactcaaacaacattataatttgctgcacaacaccatggacattaaatttgaatactattataagaatggtatcttgaatattttgtagtattgaaaaccacattctgaacattagttcaagttcagaaatccgcattcttgcaatgtatcttacctatttcagtacatgcaccatgtgtttttttcttcattttctgcagtacagtctactcatctactttgctggtagcttttgcatgtcattatccccacatcatgatgtatgattttcagttttaggtgccagttttggtgtgaagaactaaattgaaaccgaacaatgattttccacagttgcggttaacttctaaacaagttagttctgcaatggataacaatggtggcggttcagcaccaatatcgtccaaaagatcatgtcattgtttcatccatccagccatggtaatatccattgctcaattgatatatttttgcttcctaattttacgtacactcttcctttaggtctttttgtggatataactaatgtgattaatgccaagttgacaaataagcatgccgcggttatccaaagtgaaatcaatgttccaaaagaccgtgagaactatcaacagatcaacaagaactctacatctaagattcagagagcctcaactattggatttggtatcatacttatattggctttcttttttttttaatatatgagatatttgttttaggctaacatcagcattctgattttgtggtgcaggcaatgaaaataacgcttctgtcattaggcatgtgcggctaccatgtacagacaaagccgaattgtcgtacggtacacccaacatgcatgaagatgttactaatctcagtacggctgaactaaaaaggaagcgtgctagagagaggtacgcatcattgacaaaagagctaaaggaagatggaaacaagaagagacgtgattccagaaagcggaggaaggatgaatcaataggtttttataaattaacacatctattgttatcaaaatttggactttttgaacacaacaccttattattattgaattaattcaactctttcagatcattgatctcaagattccacgaccaaaatggctactcctgtgtcctcaactgtttcaggttgatgtgtaatatggtaacatgtagaaatttgttaggtgtttcgtaccaaatacgttctaatctgtttggatatgagcagccccgcttggagatattacaaatgtacgtgctgacagattgcttctgatagtttaacaaattttcactcaatttcttttcacttaataaaattacccgttgcaatgcacgggcaccttactagttttctacgaaaacagaactgaaaaactaagctatatgaccggttctgaaacaaccaagtcgtttttttgactaactcactggggggagagattccccacctgaattgtcatttcataatagggagaatatagttctgttacactagattgagagattgaagacaggaggagaaaatttgtttccacacatctattacagttctatcctgcaccactagcaattctgcccaaagacctgcttcgctaacagcacgataaagggaagcagctaaagaaggttgaagccctctgaaaaccacatcatgcctgtgattccacagcacccagaagcaaagtaggtagaatacatggaagtgtttggccggcagaagctgcgatggacttagccgataaaaaagtcgaaggtcttggattgagggatgaattccaatacttagtccagaaccttacagcaaaaggacaagagaagcataaatggtttgccgtctcgtccgcacagttgcaaatcgcgcaagttgctgactgaacaatctttttcttcaatagatttgactttgtggacagtctatttcggatcagcatccaagcgaaaagttttaccttcaacggtgctttgcatgcccagataatcttccaatttggtgagataaactctgccgggaattttgcctcatatatctgcttggaagtaagaatgccagaacgatcattttgcctgatgtcaggttcctcattcagaaagcaagctgcaagcatattctctaaattatgaagatcagcttgggctgcttgcgatagtcttggtaccaaaaacgataagattcccctgctaagcacttctttgacatttgcatgaccgcttgttgagtgcgagtagagtgccgggaataggtttgcaagttgctgaatacctagccaacggtcatgccagaaagaagtcctcgagccatctgcccatctccaacctttactctcgtcagattttgaagggcaggtaagagtttttgcatagagttccagtgctggcccagaggtaaggttttcatcaaagattgcccatcaaattctctccagatccagtctgcccaagatgattccgcagaatccaaagctaacaaactgaatgaaaaacatgtgacaaatgcgcaagattacatcattttcctcctttgctatacgtgcataggaggccatctgcctacaagaccagccggccggtgttcgagcgggccagagtcccgccgccaccaccgacgcagccactcggactcggccaacggcacgccgtcctccgccatcatcatctctaccgaacccgcgaacgcgccagggagcctcctcctcctcgggctccgtctcggtggctcgtctcctctctccaacgaaccggtagc

SEQ ID NO: 20479 - DNA, 14368 bp, Oryza sativa
ttccctagcatctgcgtggccgccgccggtggtggtggcggcggcgcacacacttcgtttggtcgccggcgagtccctgcggccgtcgtcgaagctcttggggggctcgacggggagcgacacgtactgcagtcgggggctctcgtcgaacgggttgcagagcatgatgccacggtgcaggtcgacccagcacagccgccggtcgccgacggggacgaccatgtcggtttcccacgctgacagctcagcgccctagccgccgctgtcgtcgcggtggatgatcggtgcccgcttgaggctccactcgccggagcggaggaggaggagtttggcctcgttcggcggcatgtcgtcgtcgctccccttggtgatgagctccgccaccacgagctcgtcgtcgccacggcgcaggatgccggtggcacgtacatccatgtctggatttggctcgtcctgctctgtcgcatcgacatagttgtgaggcagcagcgtcaacgacggcggccgcgcggcgtcgccggcgttgtagacgaagtaatcaagtaatcgagcgcgtcgtcggcgttatgctcgtcgtagtattccatcttgatgagcacggagtcgccgtgggcagcggcgacaaacatggaggcatctagatctttttgctccaagtcgaagaacatccgcgacgccgccggtggcggctcgaggcagaacgagacgcggacgcacgggccgccggagaaggtgcaggcgctcgccgccgtcttggggtcgccggtgtagccggcggcggagtgcttcctcaagctcctcacgttgtgacctttgtgctcaagcatcacccaccgcgggtaactgccgccgccggcggtggccatcaacgtcgccggtgattagttgcttgcgccttgcggttggctctagttatcggagttatataaaagatcgtaacagatgaatgtatgtctgtgttttctgttaagatttaacagggtataaataaccgtcacgtttatcgttagagatcctatcgtgtcatcaaaaacactctagcccgaatttactgttaattgtgtcgattttttttttttgtgtgggttgtggaggacttttattttcttttttttatccaatccccaatgaattttattatgaaaactaacgatccaaacacctatttagagcacaaatttgctacatatctatcttgtgattttttaaaaacgattttttcacctttggcttttgccgtacagatttgattttggaccgatcaaatatgttaggttaaatacattgccgttgagtgatttatcatatattaatctattttttgattttttttaacaaaaatcataacccatttgaatgatatgcaaataacgagaggatattccctcgagattagaatccactctcctcactcattcatattgttgccgtcagtttctcaaaaaaaaaaaaaattgttgccgtcaggctataaatggccaaaaggcccgaggcccgatggcccaacccatggcacggcattttggcccggcccaagcacggcacggcccgacggaggtcgagccgtgctagcccggcctgaccaccgagccgtgcctgggcccctccaccggcacgttgggccggcccggcacgatgggccggcagctaggcccaatacacaaaaaataggggagtaaaaatagacatattatattccatggatgaaagaatagggatctaaaatagacttttttttatctatacatatgtcagccgaagaggagggacggaaatagacttattttagctatgcatatgtcagaccaaagaggagggacggaaaatagacttattttagctataaatatgaaatagcccaaagaggagggaagaaaattagacttattttaaaaaaggaacgatgggccacccatgccttcaggccggcatggcacgtcgggccgtgcctgggcgggaggtgcatcccatgggctggcacgaagtgcctatcgggccgtgccggcccgatggcttctgggccgtgcccagccgtgcctgggcagggctgtgccaggcgggccctttggccatctatacatcaggctatccgcaccacattggtttcactgtaaaaaaaaatagcgattgaatgtaattatagtatttctgttggcgtctttttggctaacagtagtagtgaagttcccactccgcgtcggtcggccgccatgaggttttccgaagctttgactacaaggaacttatctatctccttctcaaacttgatcgccgtttttgggagaacaaaaggacaaactttttccatttttttctctctgggccggcttcaaatggccttttcttggcatagataaacactttatgtcctacttccctacaaaatctatttccttatgctcccttctgcattccgtgaaactcatctaatgatttgcggtgttaacggagttaccaatcacctcgatccaaaattagtgtttcgaaaatgttttcaaaagtctccgaaacaaacccatcaatcctttgaagccgacatactcgcatgtaaccacccattgtagttttccccctcccctgggaagacaaaagtaaagttgaaggttagggtttccttcctaatactaaatctttgcttgtggattaggtctagttgcgctaagtttcgctgctacttctctaattatcgattatagagcttgcagtcatgttccgaatatgtgacttccaaaagatatagtttatttattggaatgatgcatctcagtactgccgaaactagtgcttgtgcctatcgacatcgtggttctgtgggagtcggttcacaccgatttcctgtggcgcaccctctccggtgtcattgttaggtggtgctaaggcagggtgtggcaataaacctgatgagtggatcagcttgtgtcttttttctttttttttttgaaaaaaaaattacctgcttgagtttgtagctgacacggcaatatccttgagataacaaaactacaaaaaaatatgtctactagaaattaccatacgttacgtttaactccaggagatatctctcgtgctggcaaaatacattagctagatggtggtatatgccattacagaaaacaataaaaatgcagtgtaatatattccttcgtactaaaatatatggcacctatattttaaataaaaattaaattctaaacctttgatcgatgtacatgtttagtttttcagagaaagaggtaattaaagcctctccgtttccattagagaacaaaactacagagttcaaacgaaacatcaaaagttttacggcgccaggacgttcctctcatctaatttatgctaaaaatgatgccatccccagttcccaccactagcacaaatacaagagcaggcacttaaccacattgcatcgatctaaaggaacaataaaacaaaagcaaatttcatgaaatttaaggagatgaagacatgtagtccagcagcaatttcatgcacacacttttgcccctttttcttgcaaatttagatcaagtacagtcttcataaaactcgagagagatgtttgctcagcacatcagagccttggagttcagcttcagcccccatccatgttgtgggttgggttgtgcatgcggagcagatggaacaagcctggctattcttcacttcaatcagcagccatttcttcctgagacccattggcagcaccaagagagacctgaatcggcgtccactgccatcgttaataagaaggctatacgcctcgagcaaatcgtcacatcccaaatcaggtatctcttcaagagcagccaagatctcctcaggagaagccatctctgacacattggtggacagttcatgtgatttcttactgatgacggcagtcgtcgtcgtcgtcgtcgctgcagctgcaggtagtacgtcgacgacgatggctgccggctttgttgaatcgctgctgcatgaagtgaggaggtaaccggagatctcgctgggaatgcaccgtaaacatggcgaagactgatttttgtaggcaaagactgatggcagcgtcttgttcgtcgtgtcaagcatgatcttccaaaatttctctttcacgcagtaatcgtggtcgtaaaccaggaagcagatgatgtgagagtcgcgtgtactcacgacggggtagtacggtcttttgtgtggtgggatgccggcgtcggcgtggagggagagggaccagagctcggtggcgtcgacgatggcgtccatggtccatgtcatgtcgctcgtcctcagtgtccaggtgttgatgacgaaggcggagctggaatggtcgcaggtggtgacgccggggcctccgcagcagcagcgggggaagatgtcgacgaacttgagcgtgtcgccgccgccgccgccgccgttggtggcgcagacggttcgatctttcatcaggcaaagccgagggttgcggccgcggcgccgccgctctcgtactcgtagtaacggtagccgtagtcgtcgtcgtcgaattcaccggcggggggctcgacgggaagtgacacgtaccgcggccggagaggctcatcgtcgtcgaacatgtcgcagaggatgatgccgcgatacaggtcgacccagcacagccgccggtcgccgacggggacgaccatgtcggtcttccaatggaatagctcgtcgccttgccgtcgtcgtggatgatctccgccggcgtgacgctccactcgccggaacgaaacacgaggagctcggcgtccactccgtcgtcgccctccgtcacggtgagcttcgacaccacaaggtcgttgtcgccgcagcggcggcggcggcggcgcaggaggccggttctagcgtcgtccagccggttcggcgtcctgtcactcaacccgtagtgaacccagtgaattgggagcagcgacaacgatggcgggtcaccggcggcggcatcgccggcgctgtagacgaagtgatagaggccgtactcgccgccgcggcgcgcttcgtttttatagtgcatctggaggagcacggagtcgcggtgggcggcgacgacgcacaccaggggccctcctccttcgtcgtggctcggggaggaggtgtaccacatgcgcgacgacgccgggggcgcctcgcggcacagggagaggcggacgacatggccggcggagttgcggcagctcgcctcggtctcggcgcagctgccgccggcggcggagcaggggttggaggagtcgtcccggtctccctgatcatcgctacctttcttgtgcttgcgtcggacgtcgcgctcgagtaaagcccaccgtgggtcgtagcagccgacgcgtcggagagtcgccggcgtcggttgggtttccatggtcggcggcgatggcggcggcgactggtggaagcttagggtgacacaaaatctgaggccatatataatggacagtaatcttctttaaattgcaaatataacctcgtgtatgacttgcagatcatcaatgaaaaaaaactactaattgctgacttaattacggatcgatattatggggggaaataatctgaataatagggagaaggatcagctggatcgtaagctgatcttgcagaaacagaaatgccctcacaaatagtgtaaacgagctaatcacggatagtccggccgtcaattagtttctctagcttgtcagcaaagatcagctaatcacgttcacagatgaggcccggctcagactcggctttgcggtttacgagtacaagttttttaaaaaaacgacacgacacctataaattagtttgttataatgttggtttatcttaaagaaaatactactccatccgtcctaaaatataagtatttttggattctaacacgatctccgagatgctattttggtcaacgatatataaaagtaagacgttttgaataaaaagagttgcatgttattatagtttgtgtaatgataaatctagctagtaacatcaattttacatggttgatctttttttctttctattaatagtcaaagttaaaactgtttgacttgtcactatgttaaaaatgcttatattttgggacggatggaatatatgtttttatggaggaccagcacatattgatacttatatataaggaaactactctaaactctcgatgggatattctctcgttgtttacatcactcaaatggttatgagaaaaattgaaaaaatatattaatatgcggtatatcactccataaacatgcaagttcaaattaattttttacatattgcaacaaaatgcaaattaaactacagctagtcaaatttgcttttttttctttgcgatatgtaaaagttaaattttaatttgtatttttttggagtgatatatcatatattgatacatcttcttaattttttttcctaaatatttaagtgacatgcaaataacgaggggacattccctcaaaagtttaaaatccagtctccttataggtgccctttttttacctttagccttctatggatgtttggatggatgggaaaagctccatatggattgtttttaaattaatcgggacatatgcgccacatgttatggattagggcatccacaatgtggtgtaaaagtagtacataagcaatataatattccattcagccacctattaccattgtgcaactagtccatatagaaaaaatagcaaaagatacccatatgcatatggactacccatatgaaataaattatattatctatctcctctctcttctcctaatgataccttgtatctgtatacgttatggagattgccataaggataaactatttatgcgggtcccatctatatggatcactttaccatatacattggtgatgcccttagagatttgctcaagtcaaaaaaaaagtatctcaaggtgccggtacctcatggtaccaaatcgtttatgatcattgaaaaaaaaaacctaaagtacccaagcaattgtacaattaagcacaatccgactgttaagcagtaagcacatgtatactatcaataccaaagcaagtttacaacaaagtatttcatgcattttgcaagtctgtcatgcaaccacagcagacagcgcaatcttcgcacgtctgaatttccatcaacaaccaagtcttcctcaggctcatcggaagccccaaaagagatttgaatcggcggccattatcatgacaaagcatgctataagctcttagcaaatcatgacgagacaactccggtatctcttccagggcagcaaagatctcatcaggagaagctactgatcctgacactctgaaatgtttagcaccagatgactcacatgaaattcgcactgaatcaccgatgatggcatcatgtgttggcgccttgtcgatgatcacagctggctctgacatcgctccgccattgctgcagcttccattggaggaagtgaagtagctggagaccttgctaggaaggaaattgcgtccatggctgcaggagatcgctgacaagagtgtcttgctccttgtgtcgaagaggatcatccatgtttctttgatgcggcaatatctcccctcggattctcgctcatccaccatgaagctgatgaggtggggatcgtctatgctcacgatggggtgttctggaatggcgtgtgggaggccggcgtaggcgtgggatgaccagagctcgctggcgtcgaccatggcgtccatggtccaggccatgtcgccgctgccgtcgtctaccctgagtatccaggtcttgatgatgaaggcaccggtagaatggccgcagtaggtcgggccggggcggccgcagcagcagcgggggatgacgtcgatgaacttcagcgcggcgccgccgccggtgacgcagacgcttcgctctgcgatgacgtatttccgcgtgtggtcgtcgtagtcgtcgtcgtcgtcgttggattcatcggtgagggcctcggggggaagtggcacgaaccgcagctgcggattctggtcgaacacgtcgtcgacgtcgcagaggatgatgccgcggtacaggtcggcccagcacatccgccgctcgccgacggggacggccatgtcggtgatccacgacggcagcttctcggctctaccgtcgaagtggacgaccggcgcccgtgtgacggtccactcgccggagcggagaacgaggagctcggcctcctccagctcgtcgccctcctccatcacggcgagatccaccaccaccatgtcgtcttcgccgcggcgcaggaggccggtggtcctttcatccagatcgtggcgcggccgccaggtttcactctcttcttcatccgcgtcggtggtgacgtaggcagggagcagcgacagcgacggcggccgtggcgggtctgggcggcggagccggcgttgtagacgaagtagtcgagcacgccgtcgtcgccgtaccggtatccttctccttggtaactcaaccggacgagccggagtcgccatgggcagccacgacggccaggctggcgccccgccccccgccgatgcgcgggaagaagtcgaagcatacgcgcgacgacgccggtggcgcgtcgaggcagagggagacgaggacgtggtggccgccggaggagaagacggaggccgcctcggtcttggcgtccggtgtggagaagggcgggaaggagtcgtcgcgctcgtagccctggtactcgccgtagcggcagagtatcacccaccgtgggtagccgccggcgccggcgccgccgttgccgccttggtccgccgtccgttgggtttccatgggccgccggtgagaggccggaacaaacgatttgatctgtctcgtaacgtaagcggagagatcggttcctcggtttacgaaaaaaaagaagaaggtgtttgactatatagaagagtttgattatgaaacaaactaatgaatcgtataataggaatccgcctcgttgtacgtactcctacatgtctttcataagagcaatttaaattttctttttatttaggattaaataatttgaattctttccccttgccttaattgacctgttctccggtggccgacggtagagcactctaagaggggaaattgaaattttttttagcaagatagatttatatggaacatatcattagtaagttattctaccaatataagacacgacccgaaaagaaaagagaagcaaagtaaatatattctaaggacgagcataataatttggtcgtgactttgggctgacacaacatggtctaagtcttattgggccataagtgaagcccgtgagcgggcatggctgccaaccgcagccttggtcgtgcttaggctgggtcatgcccaggcggcctatttagtcctctataacctcaacagaccagccaagccaccctcttcccttgttatcctctctttttctctctgacagttcatccaaaacgtcacattccttctatggatttacgctaatctaatataaaaggcaccatttaataaatgaatcattaaatagcaccaattaaaaatgggacaagtgcatgcatgcccttacttcgaaccccaaatgttgttttatcctactttttagggtttacaattttgccccatctttttgaaaacgaacccaccgtttgccctcacttttaaggccgttagttgggtcccacagttttgggttaaaaaatacaaatacaaatagaaaattttcttttctatttgtatttagaactacgggcatatatttagaactgtttttctctcttattcaaccaaaaataaatattttaatgggtacgatatccatgtgcccatgtacatgcttatttgaaaataatttaatttgcataaaaaacaaattctcaaaaatttggttaaatttggaaatttcggttgacataattgcttgctggggggcgaaatttcgaaccgaaattgacaacccttgaatttagacacgaggctatgtccaaatttacgtctaaaagtaaatttattttgggatggggatagtagtagactattagagtactagagtcctcttcttaacaagcagcaatagtacaataattcagaacaatcaaacagctggaaacactagtatttcatacattttgtagctctgctctgcatgcacaccaaacagaacgagcttcactggccttgatttccatcaacagccatggcttcctcagggtcattgggagccctaaaagagatttgaatcgacggccaccattgtcagaacaaagcaagctatacgctctgagcaaatcatcacgagacaactccggtatctattccagtgcagcaaagatctcatcaggggaagccactcctgacactctgatcagatgtttgccaccagcagatgactcggaagaagatcgcaccgactcatcgatgacagtatcatgatcaaccacatgtggctctgatgatgtcgcagcattgctacaataacttggatcatcaaaagtgaagtagctggagatcttgctaggaagagtgagctgtcacaccccaatctggcaccaccgtacaacggcacctgacaggagcgtgtcgtaggaaaacggcgtgaaccgcgtcctacgaaaccgcgatctcagtaccagtcctaggacatagcgctggtacccacggtgacaaacatgaatcattgcaaatccttataattaatagaggacttatttaccttaacttaggttgcagctcagacagcctgagaatgcaaccggcgacacggacaaggcaaacaccaacaacagcagcagcagcagaaccaaccaacggactaacaccaaacgccacaggcaacggcagggaactaggacgaaaccctaatcttcacttcacttcaacttcatctttggagctggcagaactatatttatatagagagcaagggtgagtacttacgtactcagcaagccaggggaacttaggtggttaatgcaagcttcaagggaaggctgttattttgcaaacagttttgttttcaagttttcaacaatctaagtgtgtgctttccacaaccagagcgagacaagtctcagctcggtcgggaggtgagaagtaacaaatttatttatcaagatttgcacaactcctagagttggcttcaaatttggttttcccaaaccaaaccaattttccaaacttcccgataatagtggtccccaaacgaccaatcacttccagggactcccggtcccgctgtcccccggacagctaaatgcttcccaagcattaggtttcccaaaccttaacaccttttcataaaacagggtaaaacaaaaactacgctaaggaatcaactcacatccgcccatgaccatgggcacgactgttcgaacagtttgataacctctgcagagggggtacactttacccacacgacgttactaacctgggtcacccagcctgtgcagaacagccacgtctggcgactttgaggctttcacgacaaggcatttctaaagccgacacagggtttccatatgccaacgagaggggtcccaaaccaacaacaggttaggtcccagaccatacttgtcacgccccgaactagtaccgaccggaactagcccgtgacgctccaaattaacctgttaatcgataccagtcccaggaaacagtgctggtatcacaggaagacggattatcacagcaacagaggtctctttattatagagtagaggtacagtcatgttgggctgcggacagatcccgagctcacaactgcattacaaaagggaaacggaagccaggacttggaccaaacaacacaggcgcgacttgggaactaggccgaaaccctaaaactcatcgtagccggcttgctcctggaagaactcctcatcagtaggatccgcttcatcttcttcagcaactgggggggattatttatatagagcaagggtgagtacgggagtactcagcaagccatgggaaataagtgtttaatgcaggcttcaaggaaaggctgttatttttgcaattgattttatttgaactcttttctaaaaacaactaagtgagtgcttctcaaacgacacggatgagacagtgcgtctcgtccggtcggagtatgtgcaatgtatcagtctttagaattgttcaagattggcacccggccaacaactttcaaacggccacccgggccaacaactttcaaacggccacctgggcctagctgatcccatcagcagcagatttttcaaacatcgaacccctttcaacaacagcaatctcacaaggcagtagtcaaacaaaactacgctaggaatcacctcacatccgcccatgaccgtgggcacggctgttcgaacagtttgttaacctctgtagagggggtacactttacccacacgacattactaacccggatcacccagcccgtggggatcagccacgtcgggagacctccaagctttcatgacaaggcatttcgaaagccgacacaggtttaccatatgccgacgagaggggtcccagaccaacaacaggttaggtcccagaccatactgtgccaggaagcccaggggtcctccccgacaccaccccggtgaatccacatgtctctcggcatcaaggctcccctgataagctagttactcagccaggggtgtcccattccacccatgtggtcatacttgtcttatgtttggatgaaattccaaggaaacggtccttaagtgcgagagcgggaaaccgtacacccggtacgtcccccggtccgcggttttggaaattcatttagttcgcaagcaccgacccaggtgtcgggttttccaagtcttttgtaaaacccaagttttacccaagaagtttttcagattttaagtttgaaggcgtccgtcgatactcgcacagggtgcacgaatatcgagacgcaactagatggttacaaggggacacgatataacaattatcaaaggaaggatcaaatgcaacaaattaggtaggtccgccaatctgccttgcagacgggacaacagattaagtgcgatcctatcaatgcataatatttttcaagcaacataactaaatttcaaatataggctcaagatgttcaaaggtggcttgccttgctcgagatctggagcttgatcctcgaaatcctcgcactgcgggtcttcgggctccgaaactacacgcgaaacgggacaactcaacaaacggtgaaaataaagccctattaatgacctctaagcgtgccattagatagatctcgagatttgagaaattttggaagttgaacggagtcaaacggatttacggttgggaagatattgaatttctaagattattggatttttggtctaaaggaaaaggatttaattaaatcctttttggaaaagaaaaagaaaagtaaagaaaagagggagggaatatagactttcctcgggcggctagggcgcggcccaagggaaatggagcggaccggccgagctaaatgggccggccggcccaaggcggcccaagacgcgcgcgcgcgggagggaggagagagagaaccggtggaccgggctcaccgtgcgcggtcccgggtgggacccgcttgtcggtgacacggctcaccgtgcggagcgagcacgcggcgtacgcgcgcgggcaggggagggacgcggtgcatgcgcgtggttcgcggtggacgcggatgcggcgggcccacgcgcagcctcacggctcgcggtggaacgcgcgcatggggaggggctgaccggggtcggctcgacccggtcttggccgagctggcgccgacgtggcgcctacgtggctgccacgcgggccggcaggaggtagacgacgacaccggccggaacggacggcggacgacagcggcgagcggtggagcgaaccacggcgatacaggcgaaagcgagcacaccgggtggttgcacgagacgaggggagacgagccaacggctcggattcgccggagggagcttgacggcggcgaatcgcggcggcggcaaccggcggcgggagaagggggaaacggcgacgaggtcacgaggggccaattcccggtggtgagagcatctacgtggctacgggaatccgttgctagcgtcggattgggcggagctacgccgagcgaggccggcgacgagtgggtgctacggagctcgggcggcgacggcggcgagtacacggcgagcgacggcaacggtcggggcggcgccggctagctacggggaggctactcgtgctactacccgagtctaaggggaggagatggaacgaggagggagaacgggaagatgcactaccgtgcgggcaggcgcagtgacgagaggctgacggcgcgggagtaatctctccggcctcgggccggggaagaggaggaagacgagcgcccggagtccccttccgcgtccacgaacgcaccggctcctccgaca

SEQ ID NO: 20480 - DNA, 1981 bp, Oryza sativa
cggcggggcggtttggagcggcgcgacgacacgggcggcaggcgcgggcaggcgcggcagaggctgacggcggcggcgaccaggcggtcggccaccacggcacgcgcgcgcgggaagcaacgggcgacgcggtggttcgagtggcgcggctcgggcacgcgcgctggctcgcggggccgagcggctgcgcggctgcaggcgcggcagggcagcggggccgggcggcgaccacgcagctctcgcgcacgcgcgggcagagcgagggaggggcgctcggcgcggcgcacgcgcatgagcgcgcggcgcgcgggcagagcggaagagggagggggagagagagagagagcgccggggagggaggaggagatgggccgagagagattcggcccatcgaacccgggggaggcaaaatagacttttgcggaggaatttgatttggaaggatttggattcggaattgatctcgacgatagatcggggatttgagatcttgagatggcacggacactagacatcaagcaaagaaacaaattttgcaattagggtttttaagagataattttcccgctaggcgccacgacggaacgggcgctacaatactgtgccaggaagcccgagggttctccccgacaccaccccgttgaatccacatgtctcttggcatcatggttcccctgattagctaataactcagccaggggcgtcccattacacccatgtggtcgcaatgttgtatggtcggatgtaattccgaaggaatcggtccttaaatgcgaccgcacaagtattccacccaggaatggccttgtgtcgcgagtttcatttttaaaactcattttctttcacaaggcaccgactcaggcatcgggttttccaaagcttttgtaaaccaagttttacccaagaagttactcaaattttaagttggaaggcgaccgtcgatactcgcacagagtgcacgaattatcgaggcgcaactagatggttacaagggaacatgatataataatttacaatagaagttcaaatataggctcaatattttcaaaggtggcttgccttgctcagggtcttcacgaagcttcacaaatcttcgagaattccgcttgaagaaaaatatccagtaaccgcaactaggcgcaaacaatcaaaaacctaaaaaaagaccaaataaaatatcctatttaggctaattaatagtgccattagatatatcacaatttaatggaattattggaagtggaacggaggcaatcggacgaacggatcaagggatatgaattttggaagtttaaatgaatttttctgaacaaggagatgatttgtcggaattttctggaatacgggaaatggtttatggaatttatagaaataatattctcaagaatattattgacatccactgacatgcgggctcgaggggacgaattattggaatctccggattaagacattctctagaatatctttgactcattgacacgtggggccagcaaacggtggggaggatagatggacttttgtgtaagagaagtgatttggtggagggaggaaacatagacttcggttcatgggtggctgcaaggaaatggcccatggcctggcgggagagagtgagagaggatatgggccggctggtaggccgagctcacgagcgggagagggaagaggcggctgaccgagtcaagcagggccgggtggctgaggtggtggccacgtggttgtagcgcccgttccgtcgtggcgcctagcgggaaaattatctcttaaaaaccctaattgcgaaatttgtttctttgcttgttgtctagtgtccgtgccatttcagatctcaaatccccgatccatcgtcgagttcaatcccgaatcccaatccttcccaaatcaattcctccgcaaaagtctattttgcctcccccgagttcgatgggccgaatctctctcggcccatctccccctccctccccggctatctctctct

SEQ ID NO: 20481 - DNA, 13744 bp, Oryza sativa
tccaagggacggaggcagagcccctcctccctctggctcgtcgcccccgctcccctcctccttttcccaaagaggcaaggggcgagccccctttctctccctccttttcccctttttcctcccgccggcgtcatcctccctccgccctgtcgccgatttggccgctagccggagcgccagctcgctggcttgaccgtccaaagtcggttcccctctcccaaaccgacattgccatcctataaagcccaggcgccctccctcccttctcctctcgttgtcccatcgcctccactccattgttgctgcccctctgtttcgccgtcaccgttcgtcgttgcgcgtgtcagaggagccggcacgagcgaggacgcggaaggggactccgggcgcgccctctccttcctcttccccggcccgaggccagagagattactcccgcgccgttggcttctcgtcactgcgcccgcccgcacggtagtgcctccctccgttcttcctcctcgttccatctcctccccttagactcgagtagtagcacgagtagcctccccgtagctagccggcgccgccccgaccgttgccgtcgctcgccgtgtactcgccgccgtcgccgcccgagctcggaagcgcctctcgtcgccggcctccctcgatgcgtttcctcctaatccggaacaagggacggattcccgtagccgcgtagatgctctcgccaccgggaatcggcccctcgtgacctcgtcgccttttccctcttccctccccgccggttgccgccgccgcaatccgccgtcgacgcactccctccggcgaatccgagccgttggctcgtctcccctcgtcctgagcaaccacccggtgtgctcgctttcgcctgtatcgccgtggttcgctccgccgctcgccgctgtcgtccgccgtccgttccggccggcgtagtcgtcaacctcccgccggcccgcgtggcagccacgtaggcgccacgtaggcgccacgtcggcgccagctcggccaagaccgggtcgagccgaccccggtcagcccctccccgtgcgcgcgttccaccgcgagccgtgaggctgcgcgtaggcccgccgcatccgtgtccaccgcgaaccgcgcgcgtgcgccgcgtccctcccccgcccgcgcgcgtgcgccgcgtgctcgctccgcacggtgaaccgtgtcactgacaagcgggtcccacccgggaccacgcgtggtgagcctggtccaccggctctctctctcctcccctcccgcgcgcgcgtgcttgggccgccttgggccggccggcccatttagctcggccgaaccgctccatttctctcgggccgcgccctagccgcccgaggaaagtctaatttccctccctcttttattttcttttctttttttttcaaaaaggatttaattaaatccttttcctttagaccaaaaatccaataatcttagaaattcaatatcttcccaaccataaatccgtttgactccgttcaacttccaaaattcctcaaatctcgagatctatctaatgtcacgcttagaggtcattaatagggctttattttcgctgtttgttaagttgtcccgtttcgcgtgtagtttcggagcccgaagacccgcagtgcgaggatttcgaggatcaagctcaagatctcgagcaaggcaagccacctttgaacatctttagcctatatttgaacttaattatgttgcttgaaaaatattatgcattgataggatcgcacttaatctgtttgtcccgtctgcaaggcagattggtggacctacctagtttgttgcatttgacccttcctttgttaattgctataccatgttcccttgtaaccatctagttgcgcctcgatattcgtgcactctgtgcgagtaactccttgggtaaaacttgctttactaaagacttggaaaacccgacacctgggtcggtgcttgcgaactaaatgaatttccaaaaccgcggaccggggaatgtaccgggtgtacggttttctgctctcgcacctaaggaccgtttccttggaatttcatccgaatataagacaagtacgaccacatgggtggaatgggacacccctggctgagtaactagcttatcaggggagccttgatgccgggagacatgtggattcgccggggtggtgtcggggaggacccctgggcttcctggcacagtatggtctgggacctaacctgttgttggtctgggacccctctcgtcggcatatggtaaacctgtgtccgctttggaaatgccttgtcatgaaagcttggaggtctcccgacgtggctgatccccacgggctgggtgatccgggttagtaatgtcgtgtgggtaaattgtaccccctctgcagaggttaacaaactattcgaacagccgtgcccacggtcatgggcggatgtgaggtgattcctagcgtagttttgtttgactactgctttgcgaaattgctgttgtggaatgggttcgatgtttgaaaaacctgcagctgatgggatcagctaggcccgggtggccgtttgaaagttgttggcccgggtggccgtttggaagctgttagccgggtgccaaccttgaatcaattctaaagactgatacattgcacatactccgaccggacgagacgcactgtctcatccgtgtcgtttgagaagcactcacttagttgttttcagaaaagagttcaaataaaatcaattgcaaaaacaacagccttccttgaagcctgcattaaacacttatttcccatggcttgctgagtactcccgtactcacccttgctctatataaataatcacccccccagttggtgaagaagatgaagcggatcctgctgataaggagttcttccaggagcaagccggctacgatgagttttagggtttcggcctagttcccaagtcgcgcctgtgttgtttggcccaagtcttggcttccgtttcccttttgtaatgcagttgtgagctcaggatctgtccgcagcccaacatgactgtattcctactctataataaagagacctctgttgctgtgatattccgtcttcctgtgataccagcactgtttcctgggactggtatcgattaacaggttaatttggagcgtcacgggctagttccggtcggtactagttcggggcgtgacagtggtcgtcacgctggcaggagatagggggagaggaggagcgcgtccggagatcggacggctcacggcggcgcaacggcgccagcgagcggcagcgagccagagggaggggacggcgccggaggcaaaaggaggagaaggtgaactcattccacggctcggattagggcgccggggtcggagggggccggcgacggcgtccggcggcggcggcgggagcggcacggcgcgggcgcagaggccgaggctagcgactgcggcgacacttctgggaggtcccaggggtcacggggatggcggcggcgtcgggaatcaaagagaggagggaggccaacggcggtgcgcgaccgtgcgcacgacggcggtggaaaggacggcacggcgcaggagcaaaagaggaggccagcgggcggagcgacggttttggggtggctcaaggggactcaaggagggtggcggcgcaaggtacggcgagaggagagagaggccgacagcggcggaaaatagagccacggcgaggtgagcagctagaagatgtaggggaaggatttaggctcggggctcaccggcaagaggaaatgacgtcggcggcgattttgtggtgggagagggaaggccgacgggggagtgcggccgggatttccgaaggcggcggcgaatcgggaccaacgcggtatccggaaatatggggacagggcagggcggcacagacgggttttgcggtgaggtggcaacgaccgtcgttcggccaaggaaggagaaggacgcggcgaggatggaacgactcgacggcgagatgcctccggacatggagctcgacgcggcggccaggagttcccatggcggcagagcttcgccgcttgggggaaacgaagcaaggggaggaggaagcacggggtggtttttatagagggggtgtgggagcgtcaaggtcggttcgggggagcatgcgagctggcgctcggccggcgttcactggcgacgtcggcgttttcgtgggcggcacgaaacagcggatggcgcggatgcgttgggcagtggaggcggtggatcgtgcggtgggaatcgaaccgcgagcacgggctggcacggctcggcgtggtcaaggtggggcatggcgacctggcgcgcggcgtcaggggcactcgctaccatggcgctagatgccaagcggtggaggcaggacgtcggttcgggagagaaaaaagggaaaaggagggagaaaaggggagcttgctccatgccgctttgggaaaaaggtgaaggaggaagagagggcgagaccgagcgctggctctcgcccttggacgcatgcgcgcagagcagcggggccgagcggcagcgcgggcacgggcggcgtcgaggctaacgcggcggcgaccgagcgtcgagcgcgcgcgcgggggaaaccgacgggcgaaatcaaacggcggcggcggaaatcggcgctagggagaggagttcgacgagagagagagagagaggaaggagaggagagaggcgctgcttctctcgctcggcgcgtgcagagcacgtgcgtgcggggaggaggaggagcggccgagaggagacgatgggccggaaaagggaaaaacggcccaacgaccaagagggaggtgaaatagactttttcaagggaatttcttcaaggaatttgaggagcatttgacattggatttgaattcaaattggatatttgaactcaacaaaatatggagaagccaaggaggggattcaaagagcgaattcgatactttcggaaatgggaaggaatttcgatgaggcgtgattttcgatgtcgatgggtggttgaagttcaaagcgagaattgatattttagggatatatttgtatttggcagctcaaggattatttgagagggaatcaaaaggagaaatcaatgttcggggtgaaacaaaggaggtggcggtagaatacgatagataaagcgagggagacgaggagagggggacgcttggatgttagagctagctcaaggagggaatttgattggagaggttttagggttggagtctggttttggattccggaattaggcgatatctgtggttagggtttctacagtgaaatccgaatagaaggattcaaacttcgagattattttggaacggaaattttgaggaggtgatctttgatatcagggtattgagacaagagagggattttaaattgagatctatggcacaacttagactcaacactcaaagaactaaattttcgcaattaggatttttgtacattagctttttaacgccacgtgaaaagcggagcgttatatgagccaactatcgcggcagctgcagactgacaagagtttcttgctccttgtgtcgaacatgaccatccatgttctcttgatgtggcagtatcttcttcttcttccctcgaattctcgctcctgcaccatgaagcagatgagatggggatcgtccatgcttgcgacggggaatattggtttggcttgtgggaggccagcgcaggcatggagagaccagagctcggtggcgtcgaccatggcgtccatcgtccaaaccatgtcgtcgtcgtcgtccatcctgagtatccaggtcttgatgatgaaggcctccttggaattgtcgcagaaggttgtgccggggaggccgcagcaacagcgggagatgatgtagatgaacttgagcgcggcgccgccgtcggtggcacaaactcttcggtccgtaatggcgtaatcccgcttgtagccgtcgtcggtttcatcggtgagggcctcggggggaagtggcacgaaccgcagctgtggattctggtcgaacacgtcgtcgcagaggatgatgccgcggtacaggtcggcccagcacatccgccgctcgctgacggggatggccatgtcagtgatccacgacggcggcttgtcggctctaccgacgaagtgggcgaccggcgcccgcgtgacggtccactcgccggagcggagaacgaggagctcggcgtccccctcctcctccagcccgtggccctctagcacggcgagatccaccaccaccatgtcgtcgtcgccgcggcgtaggaggccggtggtcttctcatccagatggtgatgaatctgatgatggtggcgcggccaggtttcactctcttcttcatatgcttgccattcttcacattcttcatcgtccgctgctttggtgacgtaggcagggagcagcgacagcgatggcggctgtggcggccgggtcggcggcgacggcgccggcgttgtagacgaagtaatcgagcacgccgacatcgccgtacccgcgtcctccgtagctcaaccggacgagcacggagtcgccgtgggtagccacgacgatcaggctggcgccccggtggatgcgcgggaagcagtcgaaacatacgcgcgacgaagccggcggcgcatcgaggaagagtgagacacggacgaggtggccgccggaggagacggaggtcgtctcggtcttgtcgtccggggtggacaagggtggagaggagtcgtcgccgttgcggctgagtatcacacaccgtgggtagccggcgccggcggtgacgccggtccgccgtcggttgggtctccatgaccgtggcgatcgagaggatatcgatctcgatttgatcttcacgtacacggagatttgcttcgtccgttttttaatttttaaaacaaaaaacgcggttgggtcggactacaattggtatccacctccactactacacaaacctagataggtatcggttggaaacccgactaggtgccggatttttcaaccgacactaaaaaagtggcacagatgatagaaatcaaaggtgccggtttggaaccggcatctttgagatcctaaaaatcccaaaaaaaaaactggctcaatacatcggttcgaatcgcaacgccccccttcacccaacatttagttcatagaattaattggcttcaagaattcaaaaggaaaaagtacgaattacccccccccccccgaactatcgtggtcgaccgaattaccccctaaatccgaaaatcagacattgttcaccctcaacttctaatacccgacaaattacctcccctcggcccaatccagagcggttttgtcatacatggtgtacacaaacctacaattggtatccaactccactactacacaaacctagataggtgtcggttggaaacccaactaggtgccggataacctgaaaagtggcacagatgatagaaatcaaaggtgtcagttctaaaacggacacctttaagatcccaaaaatctaaaagaaaagtggatcaattcatcggcttgaatcgtggtgcccccctcacccaattttacccaacatttaattcatagaattaattggcttcaagaattcaaaaacatcgatccaagaacatcaacacaaatgcaaagcacaaagaagatggagaggatggacaacagcctccgtggagaggatggagctgcagatgagcaacacagctcatcagcaatgacaaagaagcggatcccgcagcacgttggaaggcgtcgtctgccgccgccaccactatcgctgcctgcctcctaccgccgcacgttgctgtcgtcatctcccctcccgccggatctggcggaggggagggcaccacccaaaacgctgtcgcctctcctcccgccgcaacacgccattgccgccgcctacctcctgtcgccacacgtagctgccgtcgcatctcctcccattggatttggcggagggggtggcgccgccagccactgccgcctctcctcccattgccgttgttgttgcgactaagagtgccgaaagagagagagaggggggaacctagagagagagagagagagccaagagagaagggtggatgaggaagagatgaggaggagaggatgcggtggatgagaaggtgtggtgcggttcggcttggctcgatttaagggtggcgttatttttaaaaaagccgatacctataatatattataagtgtcagtttttcatctatattatatgtggaatgtgccggtttattttttaaccgacgcctatagtaaatgtgttagtttttttgtgttttcagctcacagaggtggaagaagatgagttagcacaattagctaaaagaatagctacagtatggaaattgcaaacaattgttatttttttctcgttaattaatcataaaatatcctaaaataaaaactatattatacgagaattaagctgctcgatttagcgcaattaatcaaccaaacagcaatgcacacagtcacacacttaatgtactacaaaaagtatttcacacattttgcatgtctgctctacatgcacaacaaaccgaacaggcttcactagccttaatctccatcaacagccatggcttcctcagactcattgggagccccaaaagtgaactgagccggcggccattattgtcataacaaagcaagctatacgctctcagcaaatcatcacgagacaactccggtatctcttggagaagagccaaaatctccttaggagaattgaccttggaatttttggcagatgactcgcatgaagattgcaatgaatcattagcgatgatattattttttgttgccaccttatcatcgatgatcatcagtgccggctttgttacatcattgttgaaccccccatcatcagaagaattaaagcagtgagagaccgtgctaacaaagtaagcatatccataagacaattgaagcgagcttgactcatcgagacggcagactgacatcaatgttttgctgcttgtgtcgagcatgatgtaccacgattgcatttttcttccaatcttgtgttcttcgggcacttggaagcatatgatatcagggtcatccatgctcacgatggggaattgtggattgatgcgtgggacgccggcgtaggcgtcgagggaccagagctcggtggcgtcgaccatggcgtccatggtccaataagctgccatgtcatcatcgtcgccgtccatatgtagtgtccatgtgttgatgacgaagacaccgctggaatggtcgcactgcgttgcgccgcggcggccgcagcagcagcgcggggagacgtcgacgagcttcagcacggttccgccattggtgacgcagacccttctctttgacatctggcatctccgtcggtctcggtcgtcggcggggggctcaatggggagcgagaagtatcgcggccggagagtctcgtcgccgtcgtcgaacatgtcgcagaggatgatgccgcgacataggtcgacccagcacagccgccggtcgccgactgggacgaccatgtcggtttcccagaaggacagctcctcggccttgccgtcgtcgtggacgatcggcgcccgcacgacgctccactcgccggagcggagcacgaggagctcggcctccttcggcgcgtcagcttcacccccatccttcacgatgagatctgccaccaccagatcggcctcggcctcgccgcggcgcaggaggccggtggtcttctcatcaagatcgtgcggcaacggcgacggaagggtcgtctcttctccattgtagtaagccgggagatgcaccagcgacggcggccgaggcgggtcggcggcggcggcggcgcctgcgttgtagaggtacttatctatcgtgtccgtgtggtgctcgtacccttcttggtaactgaaggacacaagcacgagcagggagtcgccatgggcggcggcgacgctcatgtagggtggccctagtgccgggtcgacgggaacggagcaggtgtagcacacgcgcgacgccgccggcggcgccctgaggtctagggagacacgcacggtgtggccgccggaggagagcgtggccgcctcggtcttggcatccgcggcggcggagcagggatggttgacgtgtaggtattcggcttcacggtcgaggatcacccaccgtgggtagccggcgccggcgccacggccatccgtcggttgggtttccatggacaaggaggggctgaggaggatggatggatggatcggttctatcgttaagccggagagagttaattagaggacctgttggtccgtttataaaacacacaggaaagacgacggtgaatcggatacggatcgatcatacaatactactactctccctcgtacttactaccgtattccaaaattaaactaaccaagtactccctccgtcccataaaaaactaatctagtactgatgtgacacattctattactacgaatgtggagatacctttgtctaaatttattatactagaatgtatcacattcagttctagattcgttttttttatgacggagggagtatgttccaaaataaattaatctagacgtgttccgtacttttggaattcaaaacctgtacaagttggtttaggaattatcaactgatcacacggaaataagcgtctattgcttagtcatcaatttattcttatatagtgatgtcatactattattatactggtacttgtttgtaataagagttaacaagtagtaaaaagaaatatttaactcagaactttaatatatatgtctaatgtgtatgtcatgtgatcaaactcatccaacttatatacaaattagataaaaatcactatgcaaaacaaccttagggggttatatatataaatggtattataaagtttagagggctcaatatccgatttcaaagttcagggtgctagacagtcttccatccaaagttttgggggggggttatttagactttctcctaaaatgtataaaacctagtgacacagccgcagagctcggaatcctaattaaaacatctctaaatatttatttcatcatccgtctaccaattcgatcacatatattatacaattcgatcacatatattatattttggataatgggaagattgccattagtaaatgaaacaaaacctagcctccactaccagaaacctgaattttcattagtgcgtaggatttttatgagggataaaaaagaaccgacgaaaaattgaataaactttggcggatctgcaccataccgaaaaggattaaaccagggggcttaattaacaccgtcacgaaaaagaattaacatggtggtttcatttatatccgtggcgttgcacgaacctaacaatagcatcatttccttggcggtggtttccaccaagaaaataatcacgggtggctgaccaccaagaaaatttattttccttgtcgctctactcgtgagtgttttagcgtggcggcttgccgacacaaagtatatccctagcgttttttatagttttcatgacagttttccacactcacgaaaattatttgtgtttctgcctttctggcagatctgcttacatcaggatgcacacaatcaaaaaggaggaaaaaaaactcaagccaccggacaaaaacacaaagttgaaaacaacgcctttaagaaggaaccgtcgtcttgtgtttaattaagtataagcacgcccaggaaaaaaacatagattaattattgatcaaaagtacaattcatcacaatgaaataagttcaaccacgttgcatgtttgctgtgcaaagagagcagatagaacaatcttcactactcttgatttcgatcaatagccatttcttccttagacttaccgggaggcccaaaagcgatctaaatcggtgtcggccaatgtcatcgcaaagaatactatacgctcttagcatatcatcgcagtccaattcaggaacctcttctaacgccgccaagatctcctcaggagaagctactactccctttgacatctgagaatgtttggtagatgactcccgcgacgaggaagatcgcaatgaattactactgacgatacaacttactgccggcttgtcagtgacaatcagcggcctctttgcaacattgctacaagctccaatggaagtgaagtaatttgagatcttgctggggaaataagtgagccaagaatatggctgccacgacgtgtctgactcatcgtactggctcactgataatattttcttgctcctcatatcgaacatgaccctccactttcccctatcagaaaatgatatttccggttggtactcctcttgcaccacgaagaagacgaggcgcggatcatccatgatcatgagagggtattccggtctgacgcgcgggaggccatggccagtgtaggcgtcgagggaccagagctcggtggcgtcgaccatggcgtccatcacccatctcatatcgttcatctttagcgtccatgagctgatgacgaaggcgttgcgggcgttattgcatgtggtggcgcctagatcgccgcagcagcagcggggcgagacgtcgaggaatctcagctcgccgccgttgtcggagacccagaagcttcgcttctgccgcgggcacatccgcgggttgatggagtagtcgccgcggccgttgtcgaatttggcggcgggggcatcgacggggagggagacgtatcgcagctggggaatttcgtcgaacaggtcacatacgatgatgccgcgatacaggtcgacccagcagagcatcgtgtcgccgatggggacgacgaggtcggatttccagcgggacacctcctcggccttgccgtcgtcgtggacgacgggcggccgcgtgagggtccactcgccgtccgagcggagcaccaggagctcctccggcgtcccgccgtcctcctccttcgcgatgagctccgccaccaccacgagatcgccgtcgtcgccgtcgccgcggcggtgcaagatgccggtggtcttgacacccagatcgcggacccaccgcttgggggccgcccaacgccgatacccacgaccacgataagtttcttctccaccatcatcttccttatcttcttcatcatcatcctcttccttttgcaatgtctaccagtaagtcgggagcagcgacaacgacggcggccgtggcgggtcaacggcggtggcggcggcgccggcgttgtagaggaagtagtcgaccccgatgtcgttgtcgtaggcgcgccctttccgatattgcatccggaggagcagggagtcgcggtggacggcgacgacacgcatcgaggggaaccgtctatcgcctccgcggctgccgcttgggacgcaacggaagcgtaggcgtgacaccgccggcggcgccttgaggaggaaggagacgccgacgtgatttccggcggaggagcgggaggccgcctcggtctcggtgtcggtgaccttgctagcggcgtcggcggtgaagcaggagttagggtcgtcgccgccctcgtcctcgtcctcgagaggaacgtgttcggcgaggatgacccactgagggtagccgccgcctcccgccggcgatgggccgccggaattattaggaagcgtcgccgccgtcggttgagcctccatgggcgcgcggcggcgagatgatcggcggagaaagatggatgtggtaatccgtatttacactggttggtttggtgtggggcccacggagtttatgtagacggggcttcgttttggattaatttacgaacttactatacttgagtttgactaggaatcgaaaaacagat

SEQ ID NO: 20482 - DNA, 1744 bp, Oryza sativa
tggaaccctcccaatccttcaagtattgattgtctcgaacaataatcttcatggtagcataccaaaggagatcttcagaattccaaccatagtgcaaattagcttatctttcaacaatctagatgcacccctccataatgacattggcaaggcaaaacaactcacatatcttcagctttcatcaaataatatatctggatatattcctagcactttgggtgactctgaaagtttggaagacatagagttggaccacaacgttttcagtggaagcatccctgcatctctagaaaacataaagactctaaaagttctcaacttgtcttacaacaacctgtctggatcaataccggcatcacttggtaacctacaacttgttgaacaactagacctatcattcaacaatcttaagggagaggtcccaacaaaaggtatattcaagaacacaactgctataagggttggtggaaatccaggactttgtgggggttccctggagctacacctactcacttgttctagcactcctttgaattcagttaagcataagcaatttatttttctgaaagtagctctcccaatagctatcatgacttcacttgtcatcgccatctctattatgtggttctggaatagaaaacaaaacagacagtctatttcttcaccttcatttggcaggaaatttcccaaagtttcttacagtgatcttgtgagagcaacagagggattctctgcatccaatttaattggcagaggaagatatggttctgtatatcaggggaaactatttccagagaggaatttggttgccgtgaaagtcttcaatcttgaaacaaggggtgcaggcaagagttttatcgcagaatgtaatgccctgaaaaatgtgcgacatcgtaatctaatcactatccttactgcatgctccagtattgattcatctggaaatgattttaaagccctagtgtatgaatttatgccacgaggggacttacataacttactatactcaactcgagatggcaatggatcttcaaatttgtcctatgtttcccttgctcaaagattaaacatcgcggtggacgtatcagatgcattggcatacctacaccataaccatcaaggaagcattgttcacagtgatctaaaacctagcaacattcttctcgatgataatatgacagctcatgttggagactttggactagcagcattcaaatctgattccgcagcatcatcttttggtgactcaagtttgacttcttcctttgcaataaagggaaccataggatatgttgctccaggtattgctcatttcacattgaattctctttgaagttgactggcacattccaaatttttgtatattcatgtgaacatgtgaaataatggggagtaaacccttcctatttgtgatttacagaatgtgctgggggtggtcgagtttcaaccgcctcggacatctacagctttggaattgttctcctcgaaatattcattcgaaggaagccgacagatgacatgttcaaggatggactgagcatctcaaagtatacagagatcaatttccctgataagatgttgcagattgttgacccacagctgctccgagaactagacatctgccaagaaacctcaattaatgttgagaaaaatgaagtgtgttgcctgctttctgtgctaaatattggacttcattgcaccaagttggtcccgggcgagcgcatgagcatgcaggaggtggcct

SEQ ID NO: 20483 - DNA, 1320 bp, Oryza sativa
ttgagagtagtttcttgctcttcatgtcgaagatgatcttccatattgtcctttcgcagtggaagcatgactcccagtgttccttgcaaaccatgaagcaaatgatgtgtgggttgtccatgctaacaatggggtatactggtctcaggcgtggtgggccggcgtaggcgtcgagggaccagagctcggcggcgttgaccatggcgtccatcgcccatgtcgtcgacgtcgtgtcgtcgtcgtcgttcatcatgagtgtccatgtcttgatgacgaacgcgccgctagagttgtggcagagggtggtggcgcctgggctgccgcagcagcagcgcggcgagacgtcgatgaacttcagcgcggcgccgccgccggtgacgcagacgctccggtttctctccgggtatcctcgtgggttgatcgcgtactctccgccgtcgtcgtcgtcgaatttcttggcgggagcctcgacggggagtgacgtgtactttagccggcggggacgactttcgtcgaacaggtcggaggcggagaggaggatgacgccacggcataagtcgacccagcagaggagcgtgtcgcccacggggacgaccatgtcggttcgccagcgggacacctcctcggccttaccgtcgtcgtggatgatcggcgcccgcgtgacggtccactcgccagagcggagcacgacgagctcggcatcctccggtgtgtcgtcggtgtcgcccttcttcacggtgagctccgccaccacgagttcgccgtcgcggcggcggcgacgcaggaggccggtggttttcacgtccagccagtgctgccgccgcgcgtgggtcgggagcagcgtcaacgtcggcgagtcggcggcgctgtagacgaagcgatcgagctgaccattgtatgtcatctggaggaggagggagtcgccggcggcggcgacgacgcacaagaatggcttgtcgcatctggctctctctctctcccggtgccggtgccgcacggcggggagcagcggaagcatacgcgcgacgccgccggcggagccacgaggcggcggaagtagacgcggacgagatggccgtcggaggagcggcaggctgcctcggtgttgatcttgacgtcggcggcggagcagcgggagtcgtcctcgccgtcgtcgtcctctttgtcgtcgtgaacggctcgctgctcgaggatcacccaccgtgggtaggcaccgccgcctccgcctccggtcgccgacgaagcaccaggagacggtgtcgccgtcgattgggtttccatgggcggcgagcagattgatcgatcggttagtcacgcaga

SEQ ID NO: 20484 - DNA, 1605 bp, Oryza sativa
attagccagcagttttctgcaattttgaattagttcaacagaatcactagttcagtcagccacgcgattagcagatatggtactagtttctgaaattttgtagttcatttgagcattgttgatcgggtaacaatttttctgaaattccctggttcagtagagcagcacaaatgaatttccttttatccttcactgaatcagttagccatatgattttgattttgagatatgaatatacaggtttgtgatctttttcgatgtactacatactaattacaaggacgtttccattcttaattttctttcatttcttaatactttatataatgttgaggctcttattgctattcttcttgtatctacgtatttgcccaacagtgcttcgatcgggtcatggtgtgctccacttcgcagtaacatatatgtgttcctgaggtatgtgaaacaataaactgtttcataattttttatactaacaaaaataacttagttcttgcatatgtggtgttactgtcatatatctttaatgagtggggaaaaaaatcaaggtgaaagactgaaacaatgcctataatattccaaattcacattgctttgcattcagctgtgcctcattatattcttcatgtatagaccactgttatgctaaatcttgatggatcttggacttgatatctggaataatcctgttattttcaagtttgtatattttcaataggtgcagtgtgggatactgtagttgaggcacgggttgatggcatgttgatgagccaatcctgctgctccaattgacagcttcaaggggtacatcaagaagaggatttttattaaaatgtgctaattttttgatgtcctgaaagtgactaacagtgatctctacatgctaggcactttctattttattggcttctaatctgtgtcatttagagtcatactgaatgtaaatcgagacttctcgttgaaaccacctattggagacactggtaaggacacacgagcagggccataaagattattatgcggcatggcacaggactagcagcagcgtcggcaaggaggtgactgagtctggtgccggccatatccatcattgttggtggtgttgtaattttttatttgtttttgtgcattctacaaatgtatcacattgcgtgtgtgatcagacagccgttgtaattctaaatccgttcaaacatttgtcggatgtgcataaatgttttgctcctgcagtctaagagtaatttatttactcaaggaaggtggatgaagaaaagcacaaagtaatttatttactgagagaagactggactaatatatgttgctatatcaaaagtttttacttctaacttgagtgtagtttatttagtgatagaacattggagcaaaattttaatgtaaggagtaatctaacagaagggctaagaactacctgtgataagggatgagaatctatttactaagtaataaatttactaagataaggagtgagaactacctgtgagtaatccatttatactaacacagtgaaacaactgagagtaaaatatttactgagaaaatgacgtgggaagaaaaatcaggtgtgagataagggttgagaactac

SEQ ID NO: 20485 - DNA, 4233 bp, Oryza sativa
agggtgggtggggtttgtgaggggagtagtttaattataacgcaccctgggtgcggtttagcgcatccacacatatatatatatatatatatatatatatatatataaattcatttgcaaagatttgattttttagggacagagccaggtagcagtagaccagtagtaattttatgctcacagcatgcatgcacagggcaatgcatggatgcatatcatttcgacttacgcttgcacaggggaaaaagatgctgtctgtgccaacaaacagagagccccatcactctcgatctctctcagaatgcgtaacaagccaatggatgataaataaactgatgcagtacatgttgatcgatgaagtttcaattcgcccgtttttggattttatttggggagggatcgattatttttggattattcatggcacacattcagaggtatacgtatgatttctctaaaagctatgcttaggtgatgtcaggtttatgtacgtatatgataatatttaattcatccttaattatggccgagtttagttttaaaatttttctttaaacttctaacttttccatcacatcaaaactttcctacacacataaactttcaacttttccgtcacatcgtttcaatttaaaccaaacttccaattctgacgtgaactaaacacactctatattatatataaataataggtcatccatcggatccgcttttatctgcatatatatatttcatctaaaaagaacgggcgcccatctgatacgatttatattaaggatatatagaacagttctcactgcggatagacaccgtagcattacataattattaatactccttatgatctttttatttgatattaggagatctaactgaacttaattttcatggcgtcaaattaataaggtaaccgaagagtagtacttgttcggtgtatataaatacaaactgaaaagatcaaattatcttggttaaaaacagttgttgcttgtctttttttctctcactctctcgtcttccaggtgcatctttaactacaagtccacagatattagaaaaaaatagattacaggattataaaatagtcttcaagacaaatctacaaactacataccatttttttatatttttatttagatctaaatctctactattataaaaattaaagatattttttgccggtattttagtacatcatccgtgtatgagtcaatttaagttcgttcgcttttggaaatatatatccgtatttgagtgggtttttaagttagttcgcttttggaaatacatgagtctatataagaaatctatttaaaaaatctcgcatgctaacttgagatgaacgaattcctaactgcagctcatgattttctaaaaaaatatatatatccaaacgaattcccacagcgagtttcaccttaactaaaccatataaaaataataagattaaaattgccttcacccgttgcaacgcacgggtattttttctagcattttaaaagtcctcaagtcaaagtttaagtaggagctttgcgaaaaggtgaaatattcatgaccagaaaaatttaataattctctccattaaccttctacttttccttcattcaaaagctcattttattgtatttacttttcaaagctgatttggctcagaaaaaaatttaaaaggacccagagctagcaagctaggcgcatgcatggatgatgaggtttgacgaatccattggtcagagtcaacaaaagcatatgcatgtgcgtgcgtgggactttgatagcatgcagcacaaaaagaaataaaagcaaaggaaaggttcatgtagcaatggaaagatcaattgggatagcattcgatttcgaccaggcttcatcagattctccctgcctttagatttgatcttggagagacactctcaaagatgatcaaagggccgtacattggattgtgtgaaaagatgagatttatccgtgcatggcaactcgagtagtacaactacactctctgcagtgtagtagcctctgcatcaactagaacaattgtgtcattcagtatgcaaaattcctatctatatgcaccataacaaattatgatcctccaaccggtttttaatgtttaagtgtatggttaacttttaaacgtgggttttgactgttcgtcttattaaaaaattacgtagttattacttatttttgttgtgatttgttttgctattaaaaatactttaagcatgattggaacgtatgactaaaagtcaagaacaatctacatatattaaaaatcggaggcagtacaaatagacatcacatttttgcctgactacttgtataccgacaacattcaaagctctcatccatggcatattcttcacataatttgttactagttccttttggaatatgaagtcttttagaacctcgtggaaacgtgcccatactcttcaaagaggttctctatacatgtattttgtcttgcatataagatttctaacatcaagttcgatgaatatccaacatattggacatgcttatgtttgtagtgtaacccaccctcgtccttcacatctctctttccctagaactagctaccagtcataactataacaatctagtcttgtatgaccaattccctatgacgaatagggaaaatgtcatcgatctatgacggattcttaaaaaataataagtataccctcgcactacacatcttccgctaagttgatagggtatgttgctagctattattgctatcctccctatgttacttgacctctttcttcactgctagtctcctttgctaggctagtgccaatctacttgctattgtcctcttcctcgtaatccaatggttcttatgtatgtcctgactatctgcacttttaatctcacttgtcttcaacctaacaactctagtagcacgtgccatcactgatctcccacctggggtgcgccccaaccaggtggagaacgaccctttgcaccccttggtcgtcctcccgcccctataaataggtaggtaccccttcagggtttcttgagttttgtttagattaaagtttagctttgctactttgccgtgtaatcccgtgatcggttagatcgccggttaactcgttacggaaccccaacttatcatttgtattcaattcctatctgcaattcagattgcttttatcttgttcttgcttgtttctttgatttgcttgcaggaataaggttgatctgcaccggcaagatcaacaacccatggagaggtgtatcgatcgctaaggcgcaatacaacaacatctagtacggttgtagtcgggtcgtcaacgtttctcccaaatcgtagttatcatcaactcaccaaaagatcgggccaacaacaatcttgattgtctcaagtggagctcagggttcatcaggtggtatcagagctttcgttgctcggtgagtttttatctacctataatcagaaaattgccatacaaaaaaaatatatcatgtacctaaccatacttgtgccattgcattgtcgagtcgtagtttatttgttatttgttgagttttttatttgttgagttttctgttgcatcgtcgagtcgtagttgctggtcttagcatctagttcgtttagagtttcgagttctggtcacattttataccacagtcgttgtcgcccccgtgtctctgttgtcatcgggacctacgaaaatgaaatcggcttgctgccacggttctatttttgtagttttcagaagtttccgtcggttggttttggagttgttgagttgcaaataggaatctaggatttatgtcgtgtggttgccctctgttccgtggttctgtatatgctcttgcacggccgtgctgatgcgcgtgaggaagatggaaggtgtgcggaagatggaaggtagagattagattagtttggtttggttcgggaaggaaatagttgattggattggctgaagatcatatttccttttttttttatctcttgcatgcgcaccaaatccaaacacctgccgtatccttccaccccgcacccaccaccactgtgacagagtccgactccctccctctcctcttggtttcagtccacaccgtgagttgctatacatcttggtgaaaatttttggagtgtcggattggagatctcgtccatcgtcagttgccaattcccttaaacatatcatggagccagtggtggagctggctaccatgggcaatagcacaggctccgccagacgcatg

SEQ ID NO: 20486 - DNA, 32948 bp, Oryza sativa
aaacaagtaattgtgttgcttttggtcagagtcctctatatgctacttgttgcgtttcagaattttattggctgttattgaacaaccttctattacgagctaattaagtgtttcctacgacgtgctggcagctttggattcgtttgtcgtttgatgtgcatcccttgttcggacttcggagggctgtttgtcaccagcagattctcttctgaattctaatggagcagattcatatatatgtccggtatacgatctcgaagtatcagttcgtccagtaattaagttacacaattagactgatgattgttttgcctcatattgttaatgtactgttacagaaaattaatatatttggcaaacaaaaatgtatgcatggactgttaaaaaaagagttattcttttttttaaaaaaaacatgtatctacggcctgcaataattgatgctttacctcagctgatcgcttggataatacttatatataatttagatatcccgttacaacgcacgggcgtatgtttgctagttatatacatgcatgtaagactgcaaattacggtgtatcatcatgcaaatcttgataaattggatttttgtttcttgaaatgacctatatgggacatgggacaattatatatttatatgttgtcactgcactatttttttttagtctgaactttgattaatagttatttgaatggaattttcgggcactatgttttttctaccttaatattaggtcactttatatctaagcagttagtaaaaaaaataaacagtcagtttttttctaccttgacaaccccaagttcgtaataaatattggcatcggtcttttcaaagtgtaataaaaacaacaaataaggaacttaattcagcagaattagcacagttaatcccacaagtgtatacaagtaccactataacaaatattttaatcaatcatgttataggccatcagttgtacatgcactgcagacgggacaatctcgacaagccttaatttctatcaacagccacttcttcctcagactcattgggagcccaagaagagacctaaataggcggccattgtcacggcaaagaatactatacgctttcagcaaatcatcgcgagaaagctcaggaatctcttcaagtgctaccaatatctcctcaggagccatccttgacacctgcagatgtttggcagatggcaaagattgcgacagattattaccgttgatttcggttgtgatcgtcgtcgttgcctcgcagatgatggccggtggtggctttgtagcaaaattgtttggaatgtaagtgtgtccataagatggctctcgttgggaaatatcatcatcgtatgtgcatactgatagcagtgtcttgttcttggtgtccatcgtcatctcccatgtcgttctttcgaaatagggtttcccctgtttgtgattgtatggctcggtcacgaggaagcagatgacgtcagcgtcgtctgtgctgatgacagggtactccgggatgacacgtgggatgccggcgtaggcgtcgagggaccagagctcggtggcgtcgatcatggcgtccatggtccatgacaacatggtgtggtcgccgtcgccgtcgatcctgagtgtccagatgttgatgacgaaggcgtggcgagaatggtcgcagagggtggcgccggggtcgccgcagcagcagcgggggaagacgtcgatgaacttgagctcgccatcaggcatctccgcgtgctctcgtcgtcgctgtcctcctcgaattcgccggcgggggcctccacggggagcggcacgtactgcagccgcgggggaatttcgtcgaacaggtcgtcgccgcagaggatgacgccgcggtacaggtcgacccagcagagccgccggtcgccgacggggacggccatgtcggtctcccagtaggagagctcctcgcccttgctgccgtcgtggatgatctccgcccgcgtgacgctccactcgccggagcggagcacgaggagcttgacctcctccagcttgctgctctcgctctccctggtggtgatgagctccgccaccacgaggtcgtcctcgccgtggcggcggcggcggcggcggaggaggccggtgctatctgcgtccagctggtgcaccttcggatcctgacgccgccttctttcgtcctcgtccaatggatcccagtaggacgggagcagcgacaacgacggcggccgtggtgggtcatcgtcgtcgccgtcgtcgtcggcggcggcgtaattgtagacgaagtaatcgatcccgaattcgtcgtagccttccttgtcgtaacgcatctcgaggagcactacggagtggtcgtcgtggtcagcgacgaggtccatcgagggtccgtccttgccgcacggggagcagcggaagctcacactacgccggaccaggtcatctctgacgggcccaaaccctcacctttgacgggtttggtcttggtcagtgattagtggtcactgatgacaaaatcacctgtgatgtatgaaacacccgtcacagatcacccatctgtgaccggtatataagtcatctagtgggggttaaaacttgtctcccgtcacagataagtcatcagtgacgtgtagtaactacctgaccgtcgctgatgactcatctctgacgggttgtaacttacgacccgtcactgatgacaaagtaagaaatataatttttgaattttaaacgcaacaaaaaacctcaaaaaaatattttgaattttactagcaatcctatacatggttacacatcactacctacaaattcacaatttttcacgcaatataacttgtatgctacaagtgagattcgaactcagacctcaacctccatatagagctctcttaccaactcacctactcaacacatattgactactaacccaatgttattattttgtctatgcttgtctgaatcatttaacatatatttaacaccctaaatgacttcaaatgaaaatattatcaactaaatagttatctcatcgtgttttataacttttacatagaaaatatcttcatccgatgttgtttgaagaattcaaaatttcatttttaaaaatatatctcactttataacatgtaaattttgtgaaatgaaaatattttcaattataatgttgtagatctgattgagttctatgactttgatacggggcatgtatccatccatgtcatttgaaaaaaaactcaaaattttgtttttaaaagtagatctgatcacttgtaatgcatgttcggggatgtaaacgatctctaatagaaatgttgttagttataaagttgtggatatcattgagagctacaacttttatataggacatgtttcaatccgaggtttttttgcaaaatttacaaatttgaattttcactcatcactgacgggtcataaccaccacccgtcagagataacgttatctgtgacgtgtgttagttaaagacccgtcagagatgagtggtctcttttgtgatggttcataatactacacccgtcacaaatgacatgtcatttgtgacgagccatggttgtgacccgtcacagacgatctgtgacgggttacaagtgcaagccgtcacagatgactttacatctgtgacgggtcctccctggtagccatatattgaagaggatattttttcggcccgtcagagatgactcatctttgacgagttacgttggcccgtcacagatgacccgtcactgaagcccggatctgtagtagtgtcagctcggggcggaaggagacgcggacgagatggccggaggaggagcgggaggtcgcctcggtgattggcgccatcgccgtcgacgacctcgagcatcacccaccctgggtgggtggtagcctgaggcctgaatctctggccgccggcatcgccaagggctctagggtttcgatgagcggcgatggcggcggcgagaggctctgcacccgcacccggctgtgttcggggctccacggaattctgcctgattttagttaggccgggtttgacaggggtttcggcccaatccactctgaaccccggcccgggggcaaaaaaaaaaagaaataagtccactttgactctaactaattgccaaatctgattcgcatccttgaatcataataccggatatctcgactcccaactattaaaacagttgcaatttgactccatcaacagttttagagagcggtttcgctgacgtgacgtgtaacatcctgaaaattcaagacaatgaaaatcacgaaaatttcgaactttttaaaacttttgcatcatgctggttgttatgattgctattacttgccaaaccgtaaatgatcaccaagaaagtaaagaaaagaactacatttaagcaatagatatgatttacgggaatatatttaatcctacaaataattatgcacaagatattaaaatcaaataaaagaaaagttattattaacctattttatcaaatattaaaatatttgaataatgtaggtgggtgccataatatgtgtacacatgaaatgatgatcattcaaataaactgagctctctgtatatataatagaattacgggagtatttaattcgatatgtagatcgattttgcaccaagttcctaattgcatttagggattgaaatttgatatattaaacccctccatataaaataaactaacatatagataaattgagctaatgtgctattgtgttaataacggtctcattagaaaattatagaatctttaataaaccttaaatattggacaatattaaattttgggaaaaattcacatttgaacacttaatacggtcacctaaatgcttgggagtaaatacaaatttaatttgcaacttttctcaatttataaatcaaccaaaaccctaaaagaagaaaaataggaaaactttgaaaaatatataataataataagaattaaccctaattaaaaattcaaataaattatataaataaaatatgagtaatattaatctagaataaatccattggttggaatgacacaaatattgggtaaacttctttatacaaaatctaggatttataaaatcaaatttacacaaaaaataggctaaaatggggattaaataggaaaagacactattcatcggccgccaggtgttcgacgtggtcccctaacccagcccctcctctttccccctctctctgtcgcctgccaccgcgccgacgtcgccatcgccgtccctgccccgcgctgccgtcgccgtcactgcctcgcgccgcgcgccgccgctgtcacgccgtcctgcgcccgcgcgtcgcgtccgtcgtgtcgccgtcatctcgagccccgcgccgccctgtcgccatcgccgcgcgccgagccccgtgccgtgccgcgccgtcccgtcgccgcgtcgccgtcccgtcgccgtgtcgccgtcccgtcgacgctccgccgtcgtcgtcgtgtcgcccgtcgccctcaccgcgcgccgagccccgcgccgtcccgagccccgcgccgccgcgccgccgtcgcgtcaccccctcccttctcttccctcttccccttattccctctctcccctataagagccaccgttctcccctctcctcactccatcttccccctcctctccctcttccccctctccacgcgccgccgcgccaccgccctcgtgctgtcgtgccgccgcattcgtgaccgccgcgctgccgcctcagtgtgccgcgccgtgcgccgtcgtcgccgccgtcggtgagccgctgcccccctatttgtcgtcgtgccgccgggtagagagggagccaagaaagagagaggaagggagaagccgagggagagaaagaagagggaaggaggagagaaaccggaaaggagagagagaaaggagaagaaaagaaaagagggagaaaggagaagaaaagaaaagagagagaaaggaaaagaaaagaaaagggagagaaaaaggagaggagagattagagtgggccccacgtgtttagtgaatagtaatccccttcttaatctttattagttgagtctattacatgtgggtccgggtggttaaaaatcaaattatagaagttttatggtctcgagttcatgacatgtgggccccacttgttattagctcttcctatttccctttagaaaataattcggtaggaaaaaggaataaacccggggtcccacttgtcaatggatatgtcttggattaaaaataaatcgtttatgaacagtagcttttcgcaatttctcggattaattcaaagttgaatctttacactagcataacttattcattttaactcggatttgagtgaaacttgaacctaaattcatctaaattcataagctttccaatgatatataattcactattcaataaaatatatttataattataaattaattaatatcaaatgattagataatagttaacctaaatagtgtgccaataaataaaaaaaatggatattgtacagtagcataattatctttaatatgtcttgtcactgtagcaaccaaataaattagttataatcaatccttcaaattaatgggtgtaaaggaaaatgttagtgccatttactagcctatgtccgaatataactaattccatgacttataaattatttacataaagtttagcctcatattttgtaactaaaatataaacacacatagatgagtctttaacttgtttaggagagtaatcacagagctagttgtatctggaccacttaaaaaaattagttgatacaatgtcatgtgaagtagaatatatatatatagtcggttgatatccattagttaaccaaatagagccatcttaaaatcaacatgtattgtatagcttacagtaaaaagaaactactcaaatatatgatccaataataagatattgttgcttacacatatactatacatcccattatagtggtacggtatagtattaatttgcgtattgcatatatgaaattaagagggagtgtatgacaaacatgtatattagataaatactagttataaatcttgacctcatataattataattatagttcaactgtaaattaggattattcattgtaaaattatgtgatgggataatctgtaaccatactatgattaacctaaacaattctaacatacaaagcaagggtaattgttaacctttataatttattttgacaagtaaaatatgtacataattaaaataaagcctccatcaataaaataataatacaaatgattcacagtaattatttgaccgatccaaatccatccggcaacaaaacctctagtgtataaccgttctatctagatagatgcatgaatagccatttgctagactaaaccacatagtagccagatacgtatctcattcatactacattggctagctcctaaatagaccaccatgataacagaaagattaagaaactttagcccttagcatgttggaaaccattagcaagcgcgaataatatgagcaaccttaggttcaacctcaacaaatatattttgtttgtgcatatttgattgttgcttgaatattggtttttctcgcgtattatagactttgtgtatcggttagtcgtgaggcaatgtcagcaacttccaggaggtgaaggttgatcaagaattatatcaagaataaggactatcctgagcaaggcaagtcatcactattcctcgaacatgttgatcctaattgcgaaattgttttgtttacaagtaaaaattgcatgcaatgatgaacatcctacttgtgattatgccatgccttgattattgtttacccttaaatctttgtaaccatgtttacgtatgagtccctagtcaactatgacaattgcttagaaatgctattctagaatcatgcatactcatatttatcaaatgctatatgcttgggcaattaccttcgggaaggtaattgagatgcggcatgtggagacatgagcgccacattgccatgatgttgatgacatgatttgtgaaaggagaaataaaattaaaacaactgttttcgactggggcggacggaggatttgggtggtatctggaaaaggctagtaccgtccccagtcaattaaggaccgagccatgaagttaagcatgaaacgactcccgtacaaccgtacttctcgaatgggtatagacctagcagattagatagccgagcggaggcagatccctgcatagatggttcacccctgagtgaggcaggtgcgctacgatgggacagccgttgaggtagggccgagaggcgtgccctacatcggtgttgccattggtaggactgccatgagtgtgtgagagagagaacttaacttgaaccataatttaatatgcgtgtgagacttctctttccccgggagcgccagaactcctctcactgctagaaacatggatgcctagagtgcatgaggatttaagttcatggagcgggtactgccaatgcaaggttatcgaaaagctttgccgtgacgcgtctcatgtgttgggacgaggctcatgtgttgggcagtcgcggagtgcgggtaaagtgtacatccactgcagtgtgagtaaaccagatctattcgaatagccgtgctcgcggttattgagcaccgggacatgtattacacttggctagactctaaattctttaacttgtgtgggatgggatattgcatgatgatttttatgctgatggagccacttcctgagaggcgggaatgtggacgtcctcagaaaaccataacgactcaatggcgggaagctatccttgggatcataatggatagtggacagaaccgtcgttgtttaatgtgaatactggtactaaaatttgatcagtctatgctaggtcttaggcttgtgaaaagaactgcaaaactagctttatgcaaaagaacctgaagccattccttgaaataccctctatcatatgcatcgttgctgtggtggcttgctgagtacggttggtactcacccttgctaattatatatcttttaggagagtgttgaagagaagcccttgtcggtacgcttgcgtatccaacaagatgatcggagtgcggtcttgttctaggtctcattccccagtcgactgcctgtggcatgttaaccgggcccttatattatttggtcttccgctgttgttctctgatagttgttggcctacctggccctaatgtaagtatttaaatcttttagcctgaattcattcgtgatatgttgtgattcaactatgtgtgtaccaactactgatccagggattggtacggataaacacagatgatttccgatttccaaaatcgggggtccacatgacgtccatgtggcatcccagtcatcaaataaattaaaaatagagtgggccccacctgtcatcttcttcctctacctctctcccatcctcccccctcccctctctctctccttctttcttcttctcagcgcatgacagcacgagcatcaccgccaccgcccagctctggcggccaccactcgcgtaatcgccaccgacgccgcgggccgctttattttttaatttagggtgggcccttcactttatttttaaatttatttgatgactgagatgccacgtggacgccacgtcagcgaaaccgttctccaaaaccgtcggaggagtcaaattgcaccgattttaatagttagggggtcaagatatccggtattatagtgtagggatacgaatcagattcgggcactagttaagaaagtcaaagtggacttattccaaaaaaaaatctcaacgaaccaacgacccccgctcgatcagtacggctgcagtacggctgcgtttgttccctaccttttggaactaatccctccgatacataaaacggaacgaccgcattattaattaggtattagctttttaaaataaaaagtagaataatatgattttctaaagcaacttttgtatcaaaatatttttagaaaaaatcaccatgtaaccgttcggaaaatgtacgcgcgaaaaacgatgaagatgagttgggaaagccagtgaacaaactcagccttaattcagcagagaagaatcagattgtatctctacttttagctatatcaacatttattatgtgcctgcttatattgagtaatttattggtatcctctttttttctgacatattatgagaattgattcttaagataatgcgatgtgactctccgtacgtgtttggtggagagaaaaataaatgtgataaatttctacggtagttgacatcctcacctaatgctgtgtcaacttgtgttataatccttttggtcttcctgttaagttcatccttcaccgcttgaattaaaccttttgtgtacctcgtgacaccaccatgaaataattttgatgtacgtttagatctaacaactcaattatgactcattatgatcttgaagaacaactaggattctagcggctatagccataatttggtctgagaaatagcaaaagctacatgttttggtcagtccaccgaaaagggggaaaagcattgactcaagatgtttgtactaatctgtgacaaaaatgtgtttgctgctatatgtattaattcgtgaggtttccttgtctttagctcctaatgcctcgaatgcacttttgatggtttgttgattattatgtttagactttagatattttggatatttctgttggcatgtatgtttagacttagatattttggattattatctgtttgtcaacagtatattttcaacctgacgatatgtcattgtttttttttaacctaatgctgaagtgcaaatctatacctcataaaaaaaatcataaggcttccatagaggattttcgtccgtcgcccagcgcgcacctcctctgcaaaccccaaattatcacacaatccaatccaacccaaaaacaaaatccaaatcaaaatcgaaatcatcacaaaatatcaactcaagagacaaaatatcaacacaagagatgatgagaggagaggaaggagcgagcgggaggccgccgctgctcctcgctggacctctacctcgccgcctcgctcccgtggaggtcccgagctcaggggctagatcctgaaccaccacgccaccgggaagccgctgcgtcaaggagcaactgacccgccatgccaccagggagccatcaccctgccgcgccgccgagagccatcgacccgctggatgtagcgaggagcggggcggcggcagcaccccgacgaggaggaaaggggcggccgacggtgcgaaattattcttatgtgtcaatccgttattaaaagtctaacattgattgtttattgaacaatattataagcttgttgccagggttcaatgtatcagaaaggggggaattttggtggttagaaaaatatgaaattgtggatatttttcagatatttcgaacgaaatattcaaacaaactttaaactctcgaacagaaaaaatgaggaaatttgacaagagatccgtcatttctagcaacttctgcaacaaaacaaacgagggcattcatgattcacaatgaaaaggacaccataggaacaacacacctgcagcttgggctgccgtcgcccatgacacggatgaagagcagttgccgtcgatgtcgccggagattgtggctatcaatgtcttccaaagtgtccgctccaccgctgcgcgccgcatcggtgtggggagcgcccgccccacctcggcgcctgtcgtcgacttcgccggagaggctgctcctccgccgttccaaccgccgccgaggaatagctgcggcgcgccgcctagctgcaaggaagatgtcgcctcgtgaggaaacaatagcaagggaccagggaagtgaatcaagtgatacaaatagggaagagaaagggaggaattaagaattttgactgattttgacccttttgatcaaaatatttgaccggtagccatttccatcggacccctctaaaagaactgaaatttcggaaattgtgaaccttgcttgtggcaacacaagcaatcttcattgtgttcatcttaaaggcttgggtgcttccacaaatcaatgaaaaatcctacttaagaaatatccatcagagaaatgtgcatatgcattaatgttaagacatattgtttcattattgcagaatgtttcaccaacagaaagttcttctcttgtgaatgttcaatagcattatgagatcaattcaagaataaacttgagtttaccttttttttttttactagtgtaggtgctgaattgacatctaagctattagccataatattggctcaacttttacaaatgtaaagaaaatctaaaaataaatatcacagtttgatagaatcaacaatgcatgcttagtgccaccaaaattaatttgcaacagatatttcaatcaatcatgttgtaggtgatctgttgtacatgcatagcagacaggacagtcctgataagccttaatttctatcaacaaccatttcttcctcatactcattgggagccccaaaagagatctaagcaggcagccattgtcacgacaaataatgccatacgctttcagcaaatcatcacaatccaacccaggtatctcttcgagtgccaccaagatctcctcaggagaagccatccttgacacctgcagatttttgggagatgactccaatgctaaaaattgtgacaaattactgctgatttcggttgtaattggcagcttgtcgatgttcgccggcggcattgttgtgacatcgccacagcttactacgtggtcggggattttgataggaatataagtgcatccatatggaagtagccatgagaaaatatcatcgtcgcgcaaaaccgacactagtgccttgctcttcgtgtccatcatgaccttccacatcgtctcgtcgtcgtcgtcgtcgtcgtcgacgcggtgtttacgccgtttgcgttctccgcgcacactgaggtagatgaggtttgggtcatgtatgctcacgatgggtaactgtggattcgtgtgtgggaggccgcttaggcgtcgagggaccagagctcggtggcgtcgatcatggcgtccatggtccatgatgacatgtcgccgtcgttgtccatcctcattgtccaggtgtggatgacgaaggcgccgccggaatggtcgcactgcgtcgcgccgcggcggccgcagcagcatcgcgggaagatgtcgacgaacttgagcgtggctccgccgtcgatggcgcagacggttcgggtgtcgagcaggcaatgccgccggttgccgccgcggcggtcgtgctcctcgtcgaacgcgccggcgggggcctccacggggagcggcacgtagcgcggccggcggcggaggggggcctgctcgtcgaacacgtcgtcgcagaggatgacgccgcggtacaggtcgacgtagcacagccgccggtcgccgacggggacggccatgtcggcctcccagtaggagagctcctcgcccttgccgtcgtcgtggacgatcggcgagatcggcgtggcgctccactcgccggagcggagcacgacgagctcggcgccctccaacgtgtcgcgcctgcggcgcctcttggtgaggagctccgccaccacgagctcgccgtcgccgccgccgccgcggcgcacgaggaggccggtgctcccttcacgcagctggtgcgccttggcgctctgatgcggacgatacgccgttttctcaacctctgacaatgggacccagtaagtcgggaacagcgacaaggacggcggcggacgtggtaggccgtcttcgtcggcgacggcggcggcgccggcattgtagacgaagtaatcgaagtgctcgtcgttctctcccttctcgtaatgcatctcgacgagcacggagtcgccgtgggcggcgacgacgttgatcgagggtccgtgaactctgtgcttgctgcacggcgagcagtggaagcttagctgcgacgccgccggtggcgcctcgaggcggagggagacgcggacgagatggccgtaggaggagcgggaggccgcctcggtgatcttggctccaccggagttggaggtggagtcctcgccatcgccctcgacctcgagttcggcgtagtggttgagcatcgcccaccctgggcagcctccggccgccgccgccgccggcggcggtagggtttccatgagcatcggcgagccgatctaatggggctcgagtggtcgacggagttatggaattaattacacaaagaaaacccagatgagtttatttgcaaaatattccccggccggtgtgcctctaggccctctagttctatgggaaatctgaaacagtataaaaaaacacgaatatcaagaaaggatctaatattaaataaataaataaaaaagatgggactttaaactcaggatgtatcttgtggagctagccgaaagatcactggacgtttctcgaaatctgacccccggacgtttctcgaaatctgatacagatgattttaatttcaagaagatttataactttccgtttgtttagacttcaaaatatttatccgttcaaaaaaagacttcaaaatatttaggattgttttcactagtatttcccaactgatcatctgtcatctttttttttcttttgaccgaatgtcataatgccactttgtcgtatttctcaatccgctctcaaaaataaaataatattgaaagcagtactttttttctgacatttgtttatttattggcagatatatatacggtgtgtgcacacgatagattcctatgatgtcaagtaccgtaaacattaacagcgccacaaacaatcatatgaaaattcttagctattccaaaatgaaaatagttattccaaaaaaatatccatcacatgaacatatataatatagtatgtatgtcaagacaaaactgtttaattattgcaaaatgtttcaccaacaaaaactttctctctgttggatcgatgaaaccacatataccaaaaggttgggcaaaattggtctgaaacgacttggatcgatctatcgtatacacttcttctgtcctaactggcagtacaattacactaaatttcgaaccctttttcatgtttggtagacacaactcctataagcttccacatcaaacttttctttggaaaatgaaatctatcgaaacattcaggcattccatgatgccgaccatcgcatggtcggcttcactggccagtcttcctccatggaggtcattatcagcgtcgacgggtcttccaacatcatacatgccacaaggtagccgatgatggacaatgtccgaaactttctagcctacttgaccgtccgagcttgccgtcgtagtactccagctagccgtctttcagtaggcaagactcggtgagctcgactctagtatgaatgaaaataaaaagatcattgcctgagttgtgtgatgtaaagtgagagtgtctctcctccttttatagcatttaatgacggttgtgaatggcggttaccacccataaccatcattgggagccaatgagaactctccatgtggaaggtgggggcggggggccgtgttggttgttcggcccaaccacttccaccgcctcaagacaccgaccttttctgtgaggctgacatgtgggttcttatgacaatgcatggtggataagcctaattatatcagttttactctgatttatgagcccttaaatccgtgtggtcacgtctgattggccagatatgtgtttcttcgcatagcgggtgattgtgatacaatgtttcttcacatggcaggtgagttttcatacagaattacctgcatacaaatatttcactaacacctgtggaaatagttagtaataaactctaccactatgcccagtgtttcattttagttttttttctgcaggaatggatggcacacttaacatttaaggatcgtcaacaagctatcaaccataatattggacatctaagctatgaaccataatattggcaccattcttccaagtgtaaaagaattaaaaataagaaaaacaatccaccagaatcaacacaatccaatagttaatcacacaatgtatacttagtaccaacaaaagtaatttacaaaagacattccaatatatcatgatcatgttgtacatgtagagcagacatgacagtttagataagccttaatttctatcagcaacaatttcttcctcatactcattgggagccccataagggctttgaatagacggccattgtcacgacaaagaatgctataagctgttagcaaatcatcacaatccaacccaggtatctcttcaagtgctaccaagatctccccaggagaagccattaacacatacagactttggggagatgactcggatggcaaagattgcgacaaattagtgccagttccggttgcagttggtgttgcaattggtatcttgtcgaccatcgctggcaacattgtcgtggctttgctataactcacataggtagcaaagcagtcagggattttgacaggaatacaagtgtatcatgtggctgtcgccaatggcaccgaccgtcgccgcgccaaaccgacactagtgccttgctccttgtatccatcatgatcttccataccacctcttcggcgacgtaatgtgcaccccgtttgcgttcttcgtccacaatgaggcagacgagatttggatcatccatgctcactatggggtgtagtggaaagctccgtgggagggcggagtaggcgtcgagggaccaagctcggcggcgtcgatcatggcgtccatggtccacgccatgtcgtcgtcgccgtcgccgtcgatcctcagtgtccaggttctgatgacgaaggcgcggctcgaacggtcgcaggtggtgtgcttgcccaggctgccgcagcagcagcgggaggagatgtcgacgaatttgagcgcggcgccgccgccgtcgatggcgcagatgacggttcgagtgttgagcagacaacgccgatagttgtcgccctggcggtcgaagtgctcctcgtcgaacgcgccggcgggggcctccacggggagcgacacgtactgcagccgcgggggaatttcgtcgaacaggtcgtcgccgcagaggatgacgccgcggtacaggtcgacgtagcacagcagccggtcgccgacggggacggccatgtcggtctcccagtaggagagctcctcgcccttgccgtcgtcgtggacgatcggcgcgatcggcgtggcgctccactcgccggagcggagcacgacgagctcggcgccctccagcgtgtcgcgcctgcggtactcctcggtgaggagcgccgccaccacgagctcgtcgtcgtcgtcgtcgccgcagcggcgcacgaggaggccggtgctacctccacgcagccggggcggcttggtattggtaccctgataagtcgggagagcgacaacgacggcggccgccgtggtgggtcctcgtcgccgtcgccggcattgtagaagaagtaatcgatcccgtattgttggtacccttccttctggtaatgcatctcgaggagcacggagtcgccgtgggcagcgacgacgtacatcgagggccggtaatgatgagctccgtatccggagccgccgcacggtgagcagtggaagcttagccccgacgccgccggtggcgactcgaggcggagggagacgcggacgagatggccggacgaggagcgggaggccgccccggtgatcttggctccaccggagttggaggtggagtactccgagtcgtcgacctcgcgttcggccgtggcgtagggcatgagcatcacccaccctgggtagcctctggccgccgccgccgccgccggcggcggaacgccggaaggcagcgtcgccgtcgccgtcgcaaccggccgtagggtttccatgagcggcgccgcgagccgatcgatcggagttttggagatcacgtgtttatttacgtatgggtacaaaaacctagatgagtttatttggaatacttaccgcctcaccggcaagccaccccccccccctccccgcggattatttggaactaaaattagttcggctaaaaattttggatttttttctttttttgaatttagcaaaattattcaaattgaaccatattttatttaaatttcaaattatttcggaccgaatttttccgtcgtatcggtgccctccgatagaaagtgccggtgcgatatatcgaaccctgctccccggcctgttcctctagtcctgtcctatcagaaatctgatatatatccttgattttaaatttcaagaagttttgaaaccttccgtttgtttagactataaaatattttggatttttttactgtttgccaccagtatattaccctatttccaaaccgacgatcttgtcgttgtttttttttctttttactgaattactgaatgccgtaatgccacttatttcttattgtatttctcaatctgcaactaaaagtgtaataatattgaaagtaaatgcacagatttttttttctaaaattttcaatggtatttgttaattggtgtgtgcacgaaagacttatgttcacaggatatcgtaaacgtcaatggcgccacaatcatacaaaagtccttggtgtttccttccacaatgaaaatatgtgaggagtatattaacagaaagtcctacaaagtattacaaagaattatccatcacagaaacatatgctagtatatatgtcaagacaaaactgtttaattattgcaaaaatgtttcaccaacaaaaacttcttctctgttggattgatgaagccagatacgaaaagttggacaaaattgctctgaaacgacttggatctatcgtatacacttctgtcctaactgacagtacagttacagtaaattttgaaccccattttcatgtttggacaaaactcctataagtttccacattgaacctctctttgggaaaaaaaaattctatcaaaacatttcaggcattccatgatgctgaccgtcgcatggtcggcttcaccggccggtcttcctccatggagatcatcatcagcgtcgacgggtcctccagcatcatacgggctacgaggtagccagcgatggaccatgtctggaacttcctggcctgcttgccgatgaaccgtcccagcttgccatcgtagtactctggccagccgtccttcagtagcctggactcggcgagctcaatggcgcgcttcgccatctgcggacgcccagtcttgatgcaggctgctgtcagcagccacaggagaactgcagatgggagaacacacacataaacgttaagatcttggaatgaggattcaggtgactttggttgtgaacatcagaatcacatttcgccaactatctagggaacacgaagatcggatcaactttaggaaaaaaaaaagtgccacactcaaccctcaaagggatctgtcggttctgttcaatttgatgaaaacagatgaagaagtcaaaatttcatagccataagcaccttagctacccccaaaaagttagtttttacagcttctgtatgacattaaggatcttacagtataagacttgattaataaaaattattagaacaaagtcattatcagaagaggtgaatgttgaatagtattatgtgatcgatttcagaataaactttagtttacctatttattattgtgtgtgatgaattgacatctaagctatcagccataatattggacatgactaatttttatgaagagtaatgcatagtaaggatcagcaacagaatcatctcaagttagcacagtgcaaaaggaaaactttaacctggccatgatcctccattgtgataactccaccgggtgttcttcgggtcgcagccagtgattattctccattcatggttctcaattgcagggtaacatatcttcagaggcatctcaccaactagctcttcccaccgctcctcaatcagatccattattgccactgattgctctggagtagccagagatgatataatggcaatgcaatttccaagggcaaaccaccgaaagtccatcatagctgggctcacgttgccaaggaagtagcctccccggcatggcatgaaatcaaacacccagtcagggattgaatccgggatgacattgaatttgttcacagcagtgtgtgaatactcctctgttttatatctgtatatgttattcaggtgtgggaaatctagccagaagtaattcctcatgtggtaggttagagcatgtagccgttgccctatcttttctatgaaatccttcccttcaccatctggcttaagcatctgcagagcacatctcaacgccatgtagaatagagcttggatctcaataggataaccatatataccctggaaataatagtagatttaacatttgagccaaacagtcatgtaatgataaggatctcaatcaccaattataaaattgtagttcaaaaagtagaacttctaggaatgagattatagtattatactactacaaatgcctgttagcactattatccatttttaagtaaattcaaactacgtagtatctctttcagagaaggttaagaagacaacgcttatacttgaaacttggaataacaatgcagtgctcccggacattgtgctttgaatatcagatttctgcccgttttattaaaaaaatgttttgaaaaaacagaacttgcttggttctaagaagaaaaagcagaaacattcagcttctttgttgccacatcaactgaactgtactgtttttaatgatacatgtcaagaaataaatcaaatcaaggtgaaagctcataccattcgacgatctatcattgagcagccatctgtgcagagcagagttgggaaggtatcaaatccctcagataagcataggttcagtatcagcctcatgcagttctgacactctggtgattctgccaaactagtatctgccgtatactttgtatatgcccggagtagaatatccaccaaaatccagagtccactggagccaccctcccaattgcactctcaccaaaatctgcaactaaagtttcagtgtttctgttccgattacgatccaccttgaaacttgcaggcatcgctcctgctccaagcttgaaacggtctaccattttctccgagctttgcaggtggagtgttttcaagaggaagtttttcactatatcagtctcattattcattagaaaagccaatgcacttggaaaaaaatctcgcacaaaaacctgccattgtaaggataacatcaggaaagaggtgaagcataactgaactattcatttgattcagggggaaaaaaacattgaaaaaacaagcatgcagaagaatcctagctagaaagcaagcaaagttttcaaagccatactgcttagataatcaaactgaacaggtcatcataagtgctagtaaaacaaacgaatttgctctgcaggactccatgccagtgatgatggatatagttaccatttaacagcctacataatatattcagtaaagctattatattgctcgataatcgacataatcatatatatcaacatcaaacaaaggctaagcatcaaacactacaaagatcctaaacacaccagattactcaggtactgatttcaacatgtataaaccaaacattcaatacatcatacaacaagaacataaaaacgagattcagttttcagaaaccatatgaacaagcagaggattccgatttcacctgatcataattgagcacctcctcggacgcatggtcgacggcggcaatcgtcccaaccggctgcccccggaagtacaccacggacttcctgagagcctcccacgcctcgttcacgagcgggtggggatcaccgagcgtccccagcgagaagggcgagtcgaagcccgaggggaacgccggggagtgcatgatgctgtcgaagccgtcgttctggcggtgggagagctcactccacgactgctcgtcgaaggacctcttcctctccagcgtcagcctcggcttgtcgatgaggagccgcgagagatcgaggttgatctccgcctccgaggcgatggagacgtgggacgacaccctcttcatcctgctgatgacctcctcttcttttcttggtcaaatttgtttcagcacgaatcagttcgagtaaatccaatgtgaaattggaaagacaggcaatgcaagatcctgagaagaaatcaagaaagaatatattcggatttgacaccggacagcaagcaatcaatcgaagaccgtagcaaaatcagcggcggcggccggcgaggagagaagaataccttgaatccgaagcggcggcggcggcgtgttcgccggagaagaatcgacgaggagagagaaaccagccaactaataaaccaaccaatgagagcgtcgccgttcaccgatcttgcggtctagatccaagcgcaagaacggcaagatctcctccggcggcggatgggatcaagagggggagggatcgtggaaggaggtggtggtggtggagggaggagactatccgcatttctggctccggtgagcttactatttatagacagcattaattctcccccatttcctggcgccttcggattttctttcttcttcccggcgaacttcggacgtgccacccacactgttcaaagctttgtcgtctccactttctatcttttcggatatttggcttatccaaaactaatacttctctagtctaacatgaagatttcctcaaatttttttttggaatcaaaagaaaggttaattttttgcaagtttatttctaagttttgtgatagtctcttcggtaggtactgacccacgttaaatgtttttcatggtggaggaagggagaagattgagaagatacgtgtaatgaagtgagtcattaacgtatagttaattcagttaattattttaaaatttaaaaatatattaatatgattttttaaaacattttttctataaaaattatttaagaaaaatatttaatagtttaaaaggcatgcgcatgaaaagcgagggaaatctcctctctttatctacagctcaaacatagcatgagagagtgcattgtagatgacatcatgacagccggcgtatgcaatacttgtttatcggtagtatctcgtgacatatttgaaagaataataacaataaaaaattttagcaccaaactcaatatagtgtaatcctatataaaagaatctaactacgagtaatcgaaaaaaaatgaaagtactaaaaaaactaagggctcttttcaaacgcaggattcttaaacacgcagcattagaatatcatcacgttttttatcttagggaatgaaaaaaaacaaaacagtttgaatggagtaaaggaaaaactgagaggagtatacacaaagaaaaaaatattaagaggttgcagctccaaaattcgcatgaaataggaaaagcatcagtggtgtggtgttggagtcgtgggtgcatgactccagtcaaatcctagcttccacaaatattacacgtatgtaaatgagctttcaacatggttttaatgaaatcttgagcgtgtttcataaaaaaaaatcccataaaacatgcccatagaaatttcaaaagaatcccggagatccaattctttgttttaaaggggctttctataggatcctaattcagaacatgatgataagcggaaaaaagtgggacgccaagacgccgatgaactcaagctgtgaaagtcttcttttagagagagaagaaagtcgtccgaatttcatttccagggtcccgaagaggttcgaaaaggtgtacatgagttcctcctataaggggctcattggttgtcaaccaagtgagagggatctaataaagatgagtacagataccttcaaccgatatcgcttgagaggcatagccgtctcttccaagagattctctcttatttcttaagcaagtatgaattgccatagtattcttcgaggcatgattcaagatccaatcgatttgaagtatgaattgaacattggtttttgcatgtcaataatacactggtagagaaaccatctttggtcggttgcccaaaatccataataatcccggtttgaataagaaccgggactaaaaatgatctttagtcccggttgaaaaggctaacgtcactttttgatctttagtcccggttggtagtcccggttcgaaagaaggcaagctgtgtcagaccccccctatgatctttagtctcggttagttaccaaccgggactaaagatctattttaatcccggttgcttataacaaccgagacaaaagaaaaacaaaaaaaaatcgcaccgcgcctcctcgagaggaccaacagccttatcctctcatccactcatctctcctcctctcccttatcttctccaatcttctcctcccttctcatcttttcatctccttcttctcttcttccccctttctccccttcccctctcctccccctcccctgcggccgcggcagatccctccccgacgcaggcgcggccgcgtgcggcgagcggcggatgcagctgcggcggcgcaggcggcggccgcgcgcggcgagcggcggcggctgggctgcggcccggcggagggcggtggcgggcggcggatacagcggcggcggcgcaggcggcggccgcgcgcggcgagcagcagatgcagctgcggcggcagctaggcggcgggccggcggagggtggaggcggcgcaggcggcgcgtgcggcagaagcggccggcgcggcgagcggcggatgcagcccgtggcgacgactgggcggcgggccggcggagggtggcggcggcgcaagcggcgcgtgcggtagaagcggccgcagcggcggtcgtgcggcctggcggagggcggcggccaggtgacagcggtgaagcgatgaatttgcttttgagaatttgtggtgtatttgatctgtgcgatgtaaatatgtgatgtatttgggatgtttctttttagaatttgtgatgtatttgttttgattatctgtgatgtatttggatatggtggatttgtagatgatcgatctgggatttggagatgatcttttgttatgtgattttggggatgatttggggattttggagatgatcttttgttctgtgattttggggatgatttggggatatggtgaaatcaatattcaaagtaaaaaacaataaaagaaaaaagaaaatactaaccggatgtggcttcatttttagtcccggttggtaacaccaacaccaacctgggttaaaaatggctccatcttaccaaccgggactaaagatcgatttttagtcccgggtatttgaaccgggactaaagatagcgatctttagtcccggattcgtagtcccggttgaaaaaccgggactacagggggttgcaaaccgggagtaaaaaacgtttctctaccagtgatatcatagttgacctagaaaagaagagatcgccatctctctctctcatgttcaatcgagattgtgtgggtgtttagtattgtattctagttctggctggttagagtagaggactcgaaatcctcttaaaatcccaaaaatcttctatttttttcctttaatttcaaacgagtcataactacgagaattggttcccaaggaagtcacggtgcaaaactcccccgtgaaacgtttggaaaattggaaaacgaggtgctaaattattattttagctgccaaaccgtcaaaccgacactaaactttagaagtcccgcctaaccgacactaagctttagatggcccgtatattattttcaacattgctcttaaatgacactaagcttagatgacagattgtttccacggatgataagatttttccatgtagcatatggatttgatttctgccttccctgcttaaatggatttactgatcctcattacctcattccataattgtttggataactcctaataataaagtacagtagtaggaaaactaacgagaaaaaatggcatgagataagggcattaacttttgcttagatattttaagctggaaattctttcgatgtcatcaaggttgaataatcgacaccagccgacgacgatcggtggctgctaaagaccaagaaaaagctactttgtccatttgtaccagctaaaaatattccaaaaaaaaaacgttatattgtccaataacgaaggacatcaagtccaacttttcttggatgtttttttcccgttaaacagtgagaaacgaccaatcatgtgacttgtgtaaaaaatattgtcaaaagttgctttcgcttgtggtgtgttgtgctcgatggttttatgcgtaattcaaaccgtgatatttgatttgtcttctatgtctattgaggatgtttggaacaattccatgattatatagctttatatatactcatataatttgataagataaccaatttcatagatggaagtggaagttgatttctataatttcattttgcgagtgtatgttataaaacctatcttttcctcctaataaacaaaccagtccctcactatccaagtaattttgcatcacacgaaaaacgaaatccataattcgtttttagggggtgcttattagacgcaactatgctgaggatgcagctagagaacacattttttacaataaaaaaccaaaaagaattgagttgatagttttaaatttgaagatgaaagtttaaataattcaaattatgggtagagtttttaaaaagttgagttgaaagtttcaaaatttatttgaaaagtttaaaatattaagttgtatgttttgaattttgatatgatatttttaatatttgagttaaaaattttaaagtttgagatgaaagttttaaaattgagtttcttcaaaattgatgtacagtatatgtgaaacatgcatataattttggggaaaaaaaaaggaaaacatacttatactagtgacgagtggaccttgtgggccagaccaggtggtagcggaggaaaagatccaatttcactccctagaaaccgggtatattgccccccccccccaaacgattaaagtagttcaaaacgactccctcgactgtattgcaggtaatttttgctgccgtggtgtccacatggtagctcagtcattaggaagatgaaaaatagacttgggactcacatataagtggcaaaaaaattgtgagttccacatgtcagcctcgactcttattttcccctctctcctcttttctttcatacaagagcacaacaccctaacagtgggcggtgcaaagcccgctcctcgtcctccccctaggaggtgagtggtggcgatggcggaagaagccgacgagacaaccgtcgccgcacgaggcatgcatgccaggagtcgtcgttgctccaaggacttgaccttggagaatggagacgcagagggcgcgcaggggtgtgatgatggtggcgtcaagtcatcggcgatggcgagcgaggagcgcgaggctgacaacattggtgaagggcgccaatgattggggtccgacattaggctccaccttagggttgtaggctcgttgcagcttcgattaagctatcgggcggtgaaggattggcggcgatgatggctccttcaaatccgcttcctcgtggttgatgaagtatggagctcatggccgatgcgcgtgggtcgaagaggagccggtcggacaggcaccttccctgtcaaagaggaggacagtgcttgctgccagccaccgccacttcccctcgttgtctcgccacctccgccgctatggagaggagggatgagactctctttcctccggggagggctgattggctagcggggagaagggggaggaggagagaggaaggatgaagaagatagggagagcaagggagaagaaagagaagggtcactaatacgtggaccctacatattgacgcaactagtttgattaggtcaacgtgccatatcaacgaaatcacttactatcaagagagtcaaattatattggttttaatagttaggcggtcaagatatccggcattgcagttcaggatatgaatcatattggagtggacctatattactgggagtcaaagtggacttactccaatagcattctgttcatttatcagcccaacaaactaacaaagaagggcttcctgaaatttgacacaaaactgaatttcaggcccatgaaagcccatgtagacctttcccgttaacttttgggccccacaaactgaaatgggcccacccacctctcgtctgctacgtggcccccactaattgcagtgaaaaaccccaaaaccgggtggatttcctccttcccttgcacgcctccacgcacccgtggccggagaagaagacgccgccatggacgccggcgagtgctccagctcccagccctgcgcgtcctcctcgccggacgccgccggtggcgtttgggccaagctaggtgcggccgccctcctcccccaccccacccttcctttttcttgggtttcttccgccgcacgggttcttgattcttgaccttttcgttggtcttgcccttggccattgcttgcactgcagtgccctccgattccgcgttcccggaggtggagctggccgaggacgacgccgtggtgtgctcccgggtcaccccggacggcggcggggaggtggccgcgtggtgcgagattaggcgcggcggcggcgatggcgacgcgtcgtcggcgacgattcggaatctgaggtatctccccttttctgctttgctcttctggactgtgcattgtaggcaagatacgctctttttctgcaatcttgttttatcggattgggggaacaaatgccattcattgatgatgcgtgtttggacgaaggttataaaatgcagaaaagttcgtactgattgcgattgaatgtgagttgttgtcgtttggattatgtgaatcgttgcggtgtggtagcatcgtgttcgtgttcttgatcacctcccaataccaaaattaaagaaaagtttcctgtggataaaaaagattcagatttgctaatgattctaaagcgccttgattttcttatccataactcactttccaaacttctgaacctgattgatcaaaccaaaaatgaacttttgaatcgtgctcatttgaaatcgatagaggcgagcccctggagacagggaagaggcagagtggtcatgggtgagttttttttttggggggtggagggtagaggagaagggaagttcacttctgtggccaaggtggcaggagggtcatgcaggttggaaatgaggaagtttttctatatttatataaatagtttctctatgtgcgtacatcatagccaacctgtgttgcaaccttctgttattccttttatcaaattctcgctgatgttagatgcctgtcttgtcatccttgtaatgtatgtttcattggacctctatcgtacgttaacattatccatgtgccattgagaaagctcggatgcaattattgtcgatggaagagtgatccagcaagaagcagttgacatcaaaccggggagtgaaattgtttcaggaccccagaaagatggtgagataactatgtattttgagtttggcatttcatgcatagattggtgattgtgtatatttaatggtcttctattttttttaagtggactattttatgcctttatgaagccaaatgagtgtttacacatgactctgaatatatgtactcattgagtcattttgaatgtttattgtttcctagacctttctgtttataaagtgaaaaatctatggttgcatgttcgtaattgtgcttccgaacaatttatcaaattacaaatgtttatccttttgtgattccgttatgttgaacaggtgaactgtaccactatgtaatgcatttatgctatccatcttcttgcagggcatctgttgtacacctttgatataacaggcctgaatgaccaggacaaaactaatatcaaggtattttgttgaaatgaatgttgatcaacaacaacctcggtgcataaacgtcactaacttttatttaaatgatgatgtcagattgtgctggatattgagaatgcaaagtgcagcatatgcttaaatttgtggcatgatgttgttactgttgctccatgcctccacaacttctggtacttttgccaattttcctagctatttttgatttatctcaaaattctgattggtgctcatttctgtattccttttaagcaacggttgcttctctgagtggttaagaaggtcttcagctaattcgcgtgataaaagtcagagtgctgcctgtccacaatgtaggacggcagtgcaatcagttggtaggaatcacttcctacataatattgaagaggtgtgatagttgtgtttagtgacttaactcctcaatactgtttaagtgctacctattgtacagctgagatgtttattatagttctgcttttgtaggctatactgcaagctttttcatcgctacagcggtctgatgaggagattgcattgttggagtcatatgcctcggtcaagacaaatattgtgagttaaaaatcttactaagaaattgttgatttccaccattttctcaatggattgtataaagtgttgcaccagtctcttatctgccagcactgatatttgtccctgttatctgccataaaatcgaatattgttttaaaatcatcacccttttttaacttgtttatatattgttgttcattttagagaagtgccttcctcagtcatttgttattagttgctgataaatatttagttttgctgttgatagcttttgaactttaaaaagcttgtagttagccttccctacaaataaaaaatggcagcttgtaattatggacaattcaaggcctttctcatgataatgtgatgttatatataaattgaaggttgcatgagttttgtcataaaatattgttggggctaattttaattactcaattcatatgaaatttaattgtgaaactttatctaagtaggcgcagcagttgtattttaacatttctgctattcagtctatgatgtattttaacctaaaattcacaggcatggcatgcattcatcccttttccatggtcttatgctggtgcgatgattcttagatccaccatggggataaacatctgtcagagggaggtcagatggcaacgactcaaagtagaacagagctaggtgaagtagggtacaattgagggagcaatagatctataatagcttgccatgagagagaccagagctgactagagacttgtttattcatcttagcttaacggaaatgtataatccccatccttgtgataatttgaccctgaagcttatctctaaaataaggaatagataccaacccaatctaatctgttaaatcaactggcatgaacagtacccctgaacatgacaatttgtctgtctgatggataaaatgccttattattagagccagttgagtcacaggacaattaatacccgactcaccaaggttataggtgttttctatgctataatatatatgttgcaagtatatttgttttggtatttaaatgatcagtcccatgattctgagttgctgtcaatgttcataccttaggttttggggaaacagaaaatccagtcaaggaagcgccgtttgccacgttcaaatgatgaagctaaccatactaaccatgctgattttctatgccctcaatgtggtaagtgttgaaatttcatttttaatatttttattcttctttttagacatgttactcaaatgagaaaaataaatgcaggtgctgaatttggtggatttaggtgcagtccaggtgctccacacttgccgtgtaatggatgtggaggaatgatgccagccagacctgacaccagtataccacaaaaatgtaaccgataattctgaccatattacaagattgtaattctataattcagttgttatttgattgattattcaacgtaaccatgtgtgctgccgttatgttaggaactggacatatctatgttcatatttttttcttgccatactaatatgcttggtatcaattagatgagctaaaattatttttattacataattgaggagtatgatagatatgcacgattgcctcaagatgtattttgaagtttgcaggcatcatgagtagcttgattgcaccttttccctactgaatgtttatgaaaattatatcctctgtattctttttaattttctggctctaatctatcaaccttatattgcaggtttgggatgtgatagggcattttgtggagcttattggtgttcccaaggagtgaattcaagtcagcataatccaatctgtgatcaggaaactttcaagatggtaagataatctattacttatatcttttagaccccactgtactccatcatcatacagtacatgttgtgtacttatattcactgtttgacatgttgtgtggataactgcataactttgcagatctctcagcgccatatctctagtgttcctgacacagtacatggaggcaatcaatacgagaaagatgtaggaagttttaacatgatcttatactatcatattgctccttttataccccagatagtagtttcacatgtgagtactgagtatagtattttctcctctctagattacagaaagatgtatacagcaatcaggcaaagcattgcaagctataatctcagagtggatagtgaagtttgacaataaggagcttggtaaccttctatctagttaagctaattttttcgttgatgcaaaatctgattatatttgttatttagttgtagtacatattcatgttgcagttttgcatttcttacatcgtgattacatcatgattgttctagcatacgaatgacctgttaatagcaacaatttacacagtgcctgagttgtgtttttgctttgaatggacaaaatttatgtatgacttgaatgttgagaaggaaaacctacttctggggacaattttctctttgtttagcggattactatcttgttgcacaatggacatgcccccatctgt

SEQ ID NO: 20487 - DNA, 2987 bp, Oryza sativa
gttcgatttcatcttgctcatttatctcattttggacttccaacaaatgcagccaatgctacagcaggttcatcgatttcctgctctactggttccgtgtatcaatgccaagaaatgtatgtatacttcacacagttactaataattactattatcaatccctcttcatgatgcgaatgctttatgataatattaatcaattcctcttctttaaatagtcatatgtgataggtcccctgtattctgaagccacaccatttctgaaacttaacatgtcttacagaaattgttctagaactttcctgtgttccaaaccaactttgttgaatggtgttctaattatttggatggtcaattttgcaacatatctctaaactatacatggaattaatacttggtttgttcgactgcttagttttgctgcacatatattctatagttgctttcatgatctaatcctggactcctattctaaccactggacccttgttgctttctaatatcctgagtagaacaacatataaatgtttcatttaacaatagtaagctcatgaacctgtaaaaatctttgatcgccgctacactgcttcatttattcatagatcataccagtcttctaatattgatggtgatgttctgttccagctccttccacctgatgctgctaacagggagagctgctggtatggtttcatgtgccgaacccagcaccaccggcctgaccatgctaagaagctcaaccatgtctgtcgtccaacaagaggcaacccctagcctgcctcgttctctgaaaaaaatcatctattttcagtgttcaacagcagcattgtacagcaaagagcaagtgccataggctctggtttctcagtgtttaacagctctgtttgattagtaggaatgattgtcaggtacatcaaccagtttcaaatgcctaaactgatacaacctgtttatcttaatctctcctattgcaaccttccatacttatgtttttgcaatgcaacctcacatgctttcaagttgctatttttcgcccatctgcgagtgtttgaacagagggagcagaagagttcttctgaaagagaaaaatgcaactaggcaaggcctggctggcttgaaagcttgatagatacaagaaccagcacatatatatatcctgttaattaattaatcttgaccagtgcctgaaaacgaaagcgcattgcacttgcactgcatggacacaagctgttgctgtgacggcagctctgtcggcaggtcaggggatatgcatataggagcattcatatctgcaaggcactccctccgtatcaaaatataaacactttaaattatttaacaaatactaaaattaagaaaaaaacaattccttccagtaacattagtggttaatttttttaaattttaattgcttagattcctctctcaaacatctgattggctggaaatatatggatttctgtgtattgttccgtgcctagaaatacttatattatggtacaaattctaaacaaatgcttatattcttgggacggagggtgtgtataattcagttctatatatgcctcgctttcacacgcatgagaccaatgttttctcattgccattgcaagattgataggaaaaggatggcgatggcgacgtgttcatgcaacttcaacccatctcgccgtccttgtcggcgatttccccagaatttgttatcacgtcgtcctcaggttactgcagagtttcaatcagtcagcatcatcgacacatgatcaccatctttgacactgcaaatcagccgcaattatatatccgttttgtgtgaggatgttttcatttggtccagtcatgttgagtatcttttgaggtagcatacggcttcttttggcttatggtacatatagatgtgacaattttttttgaggcaaaatgggaattttgttaagcaaaaatgagaaaaaaaaatctggcctctgcatctgccaggaatgtgctaacatgcttagtgcagatttagggtctgtgtccatcaagctttggctaatcttatcctggtgtttgcttgccttttgcaaaaattgatctaccttttaaacttattaaaaactgctgtttatatatgttagtactacatgtaaagctagctagctagctagctgatgctgcatatatattgatacagtaatatacagtaactctattagttttagcagcagcagcacagaaagcaagggaaaagggaaagggcaaacagttgggaatcatggacagggccagctctccatgccacagtgccgaaaaaaaaagtccccaaaaaaatgtatatgcacagttgttctggaatgaaatggagattaatttcattattttgtctgaaggaattgggcgttgtattttttggaattttgttggagcactattggaaggcatggaagaattaattgtgactgtggctttatcagcatcaccgtggcgattggttaaaattgcagaccggatacttaacgcgttagcaacaacactgtacacacaagttgagtggcagtatccctcacctacgctaggtcgctatcaccacttagatatctctaatcccacttgttctcctagctttcgtctctcagtatcagtgcgtcgtcttagcaaagagttatggatataaatatctagcttaacgcagcaaatgaaccgttagatttgtctcaagattctcacgtgactatgatgtatgtgctaacatgacggacaacgattgatatagaaatgccccatatctgttaactttgtattagctcgaccatggcgcccctcttcttgttttttttttaaaaaaaatattattaccatatcattttttcctcctgtgttactctcttcttaattaattagtcttgacaatatgataggaacatgtattttttttaagataatgagaaaaagattctagcttttgcttcatcaaaaggtagagccaaattattacagactttgcagcgcat

SEQ ID NO: 20488 - DNA, 2793 bp, Oryza sativa
ccagtctagagtcttaccgccagagaatgattttagtttagtttaatttaacacaacagacattcttagcatgcaaattgccaaaactgtatcacctcacaaatgcaatatctggagttctgaataacatgtcaaaaatatctgcaagtgtgtgtgatccatttggatgcagaaagtcagagagagcatcacgagcttggagcaatcacactgcaaacagattcggagcgacattagctagcttgcaactgttcaaaaggcaggcaggcaacactgccatatgcatatatgccactactgaattaaagtggcagagagttgcattatctgtaaacacacacatgatagatatagacatagatagatataccagcatatatatgtgtaaagcaacaagcaccgatcgatcacaatcccaagaatatattgtacaccttggaaaagaattagtcaatgatgcggttctagtcatgtttttggaatacacatgatgtattagagaatcttgtagcgtctttttatttataagaaaggaaaattttcaaggaaatatatatgaaaatcctataaaacttctgcgttccaaaggaacaatattgaaggtttactactataagattcccgcgctacgaatggatgctcacgtgaaaccacctaggaattaggatggtggaacaatcccaccgagcattgatatataaacgcatattactttttttaagaacatatgcacctattgcaacaacttaattagaaattatatggagcgcatggttggaggattttatgggttataagtcataacacttagaggttatttttctaaaaaatatttatagaattcccatgtttcaaatgggtgctcatataaaaccattatatatataatgacgtgaaacaacattatatagcattgacgcataagaggcatatatatgcaaaaacaacaattattatatcaaccacaattaattagtaacggcttatagaactcattttgagtactggtagttaggctcacatagatttcataaaaaaactaacggtttattccataatagtcctgttagtgcgtgactcccgtgatttgaacatgtgctcatgtcactaccagtctcacgtatagcattgttagtgcataagaagttaactagctatcatgctcaaccaagaagcacatattgcaagaaatccgagaaatgattgttagcaacaatctaggacatatttggagtcatggattgtatagtataggagttggattttaattttccgcgacttttatgggattctcatggttcagatagattacaggggatgtaaaaccacggacaatagcaaactgattaatgatcatacggaacctagacataaacatatgcaaatcatagcaagaatcaactattacaacaaactacgccaaggattatattagcatcggtttaggtcattaaatatcaaagaaaagcaaccgtttaggttcagctaggagcgtagggttgcatcccaaacaaccgggtgtttgtcattgttaatttcataagctttgtacatgtcgagcacagactgacaacaagaaacatattaaattaatcactcagctaggcttctcaagatcgatccaattggacccactactaatcatcatcatcatcacaaacaccttacattgattaattaattaatccaaaagagcaaactaaaataatcccaggtaaaaaataaggggggtaaactaaagaagcaaacaatccattgattgatgaattgagatgattaattaacgagagcagcagcaagcagttccaaacaccctaatctgtactctctctaatcaaatcatcatatgccatttgcatttgcatttgcacagctacctcccattaacccatcatcacagcttagctagcttagcttagcttagctcagctcactgcgagctcgccgcgccgccagcctcgccgccgccgccgttggcgcggcgctgatgatccatctccgccggcgactgcccctcatgctggtgctggtgctcgccggagcggccgccgccgccggcgttgagcgcggcgagcatgccgaggttgttgttgctgctgttgttgttgtccgccatggtgacgttcatcgccgtgggaaagctgctgcgcgacatgaactggagtggcgcctgcaccgtgttaccggcggcgccggcgccggcgccgtgggggaatgcccatgccggctgcatccagaaggcggcggtggctccggtggtgttcggccccacggcccacattgctgacggggcggttggcggcggcgccgccgctgctgcggccgcacgggccttctgctcggcctcgccggtggcgccatcgacggggtcttggcgtgaggtgtccttgaacaggtcgtcggcttccctgtagcgcttacgcatgaactcgccggcgccgggatcttggggcgtcggctccgggtgctggtgcggtggcggaggagggagcagctggtggtggtggtggtggaagccgagcatggcggcgacgtcgtgctgctgctgctgctggaggtggtggaacggcgcggcgcgcggggaggaggagtgggaggcggcggagcggagggagacggcgagggaggagaagttggccgggatggtgcccgtgccggtggcggcgacgatggccggctccgcctgctgcagcagccactcgatggtctcgccgtccgtcttgtggccgagctcccgcgtgagctggaacacccgcgccgcgcacagcgccgacatccgtatcggggtgcagg

SEQ ID NO: 20489 - DNA, 646 bp, Oryza sativa
ttttaccctagaaaaaaaaagaaaaacctaaccctttgaatcttaggtatccttcaaatcttcggtattcttcgagtcttcggtacgcttcgaatccttatggggaagtctataaattatacgccccttgcttgaatcataatgacttacttcaattttgaccctatcccccatcagtattcgtatagaactagaccggatctttcctgaaatatagcccaggatgatggtgtcattctctaggcgaacgcgaaacattccgttgggtagggcttccataactaaaccctcgaaagtaatttttgcttctctcgggttttttttttctctcctatttttcttttctgccatatttttttctcctatttttctttttttattttcaaataaaaaaacgttgtatttttgtttgaaaaataggaagttcaagatagaattggggtactataactataggtggggcgattaccgctataggcggggcgattaccatatataacataagacttctcccccaattctgtttagtcgagcttctcgatctgtcattatacctcgagaagtagaaagaatagcaattcccattccgcccaaaaccttaagaattccttgatagttggtataaattcgtaagccaggtcggctg

SEQ ID NO: 20490 - DNA, 15955 bp, Oryza sativa
tatatccatgcatcaggatttgtgattctgatagcagaatcacaagtgaagtagcatacaacatgaagaatatcatcgagtaaataactcttaaaataggctataacctataagagctcatttaacactactatagtcaaagttctactagcaggaatttcaagcaatcctgtcctttggaaataaacatttgaggcagtccttcactaaagaaggaaagatcgggaacaacagaaaagatgggccagtgttcaaggtgttacctctaacgttttggaatcacactcattaggcttatattgcttctcgtcatgctctacaggtaagagagaatgctgaattggctgtattggatcattatatgtaactcgattctctaataagttcaccacgctcttgagctcagtcactagcatctcaagtttgtcgtttgtcatcttcattagatctttcaattctggatccgttgttccttcagtctgatagtgaccatgtataattgatagtattagaaagaggatgattgctacagaaatagcggggaggggtaaagcttgttttgtagagtacatattttttttaaaaggaacatatagctctagtttgttgaatttctagtattgacttgaacactagataaatgaaatgtagctagagatcttcatatgcatccagctcaatattaatctgacgattttctaaaggcacacttttgcaccatgaggtgaatcttttgtctgctcatatactatcatactctaatgggatactatccaagccctggcttagtttatctataaaaaaaaaatgtgattcgatagctagcatagttcagataataataaatgagaagttgagaacaaaggaaatatgtttgaagctagctcctcatgtcttaattctatgagttatctataatgcagggatttcagtaccagaaatgtactccctacatttcaaaatatagggtgtattttattttgttatattataatagagtatgttagtcaaagccttgtcctaacgaaaacaaaatacaccctatattttgaaattgagggagcccaagcattcctatatctccagttcccatcatttctatgtcagaattttggtggttctgtattcgtttgagcagttgcaattgataaaataattcagatgaaagatcaccttgtaatccaatacattatatggaggaagaaagctcatctgtggtgctccagatattgatagcagctgggggaagagataaaatcttaagggcttagaaggttgagcctgagctttctgtgcctttctagcttgcttttccctttcagtgtcagccaacttaacaaccaaagtcgcacttgaaccctaagtggatgtcgtgaagttgttagaaaattcagtaaagttgcattccttgtttcttcagtaaagatcaatttgctatgttgtttgcaggaacaaaaccaatgttgcaggctggagagctctacacagaagattcagataggagaaggcttacattgaacacaacacgtgtgccattcaaagcttcaatggccgctctagcatgttctttgcttccaaattccaggatagcacaggctgcagcttttttgtttataacaaatcaaggatgtgagcactaaaaccattcatagtatttcagataacaaaaacgagacgatctgtaagttctactaccttttcttgttttctgtggacttctcagtaccttcagttgtctaatatttccgtactgcgaaaacaatgcagaaacttcattctccttcacatcccttggaagcatgccaatgaaaagcttctgctctgcggctgcgagtcaggcagcaaccgtttcagagtacaacatcagcagggttgcaagagtgtcacaagaagaacaatgtcccaagttatttaggaattaggaccaattcttctttgattaggaatcatcagtaccaaatacattgtattgggaaattatacctaatcgttccagctcgccgtccgcgtattttacctgcattgccctggacgcctgattgaggcgacaggaacagaatttgtgttatcagaactacagaattgacaatcatagagcacatatcatctcatcgaatgtagaaaagtgttagtatatttaatccagtcctactttgcatcgccatgatatagagaccgaggtatttattccattatctaaaagaatcataattttggtatctattgcatatatgaaactaggatctagaagttatactacatcaaatccaattcaattagcctgcgtaaaattgcgtaggggaggttgtcttatcagaactacagaattgacaatcatagagcccatatcttgtcattggatttcctttttgataaataatctcagtgaaaacgagctttttcctgtctgattctacacaaatcactaggaaccaaaaagaacatccttttccaatctccatgaactgttcctgtctccatccccatcttcagaaaaaaaaatcaccaaatcaatcatggatagaaagatacttgcattgccctggatgcctgattaaggagacaggaacaacatttctcttatgagaacaatctcattgaaatttgacacatattatctcattgaaatttctttttgataaatatagtctcaatgaaaatgaacaatccctatatctgattccacaccaatcatgcacgaggcacatctttagtcacaaaaagggaaaataaaaatcctttacaatctccttttccatccccgattccagacaagaattcaccaaatcaatcaatcaatcatgaacagaaatcatgatttttgttgcccccaccccaaattgtatccaatcttgcaggtgaatgcaagtgaagaacttactcctgggagggtgcacttgttgtggtacgcggcgatggccttgtctgcctcctccctcgacgagcacaccacgaagcagcaacctgcaagaacccaaataaattccaaattttcatcatcttcttcttctgcttctcacacacgggcaagagcaaatcaatggctcaccgcgggaggcgccggtggcgcggtcgcggatgacggtggcgtcgtcggcgcgtgcggcggcgcggaccacggcgaggatgtcctcctccgccatgctgcgtggcacctggccgacgaacagccgcaccctctcgccgccatcctccccatctccggccatcgccgccgcgatctgtgtctctctctctcacgtttctttccttttctgatggcgcctgtccgtcctctcctcgttcttgcctgcgcctttttgctatctctgacgacgagcactaaccactgactgattgtttgattgattgatcagtatcagggtctcgatgagtacaagttaattaatcgatgagtagtaccaccaagatcttgatctcgagtaggagtaaatgtgatcgaatcatcatctgattgagcgaaaagcagcagcattgaatgagcagtttggtcgagatggagtgacgtcgcgagcgatggtttgctttgatctttctttctggtcttgctcgcctttttttctttctttttctgctgcagccttttgcattggcagtttctctcctttcatttgcttgaggagaagcacagagaaggaaagagtgaggcgaggaggaggaggagatggttttggacggaagctgcagttcgtgcaagtttggcattagagctcagagactctcacatggcgggaccaaggctcgttttttttttcttcacgacaaattgagataataatggttattagaattaaaagggattttaatttcgtcgaagggcatttggtctagtggtatgattctcgctttgggtgcgagaggtcccgagttcgattctcggaatgccccttaatttactttttttttttttgtttttctgagcatgcatttcctgaagttttttttattccttttcttccatgcattcattccttttcttttttcctttgttctttttgcatgcatttgttgaacactaatcatcatcttccttcttccttttttctgagcatgcatttcctgaagtttcttttccttcttccatgcattccttttcttttttttccctttttttctttatgcatatgcatttgttgaacattaatcatcaactttccttctgctggttcatccttcgggcaaattagcatttcctttctttcttgacactgtataattgatggctagttctctcccaccatatccatatgatttaatatcctactttaattatacaataatggcacccacaatggttatccataggctctctaccagagatacatgtcagcatattttcctacttgaaagagattaaatgaagagagagagcaaagctatctattaacctggagataatctatagagaaaaacgaggcaatggattagagagctatagatacccatgtagacataccattgaagtggtttactattaatctagtctattgctgagatgtacatgttttatagatagcaccttactttaccattgcgggtgctctagtagctccgcaaatcccactttaatatccttcaatgatttcacctttcctcctcttcccctattacatctttcaccagcaccaaaccctagcagacgttctctagtacttcctccgtttcacaatgtaagtcattctagcatttcccacgttcatattcattaatatcaatatgaacgtgggaaatgctagaatgatttatattgtgaaacggaggggtactatttcctcaaatcttgttccacagccctaccgagctaggtcacatgcaaacatcgtcatgtgcataatgtcttcagtcttcacatcatcatggcctcatggggcattaggacagccttattgccaacatgtctattggcaagaatgccactgaaaatatcagattaagcttccatagtttgtcccaaaaatgcttgtgtcttttgcattttttcaaaagccgggtaatataatgaaaattggcaaatattgctactgtggacgaagcagacagtctgacccctccccttcacgtcgcaccactcaaatatgaatatcatgctgcagtgagctgaagatcactctggattattctcacatgtggatgcatgtaaagcatgcaaaaccttcagatttcagactagacagcgcatcagatttcaatcagagcatgtgtttcgctatgcaacctgtacgttcagaacttcagactcttgagtgacagcattcagatttcattagaggcagcaagcgtttcactaatcactatccgagttttgcgttccgtgatgaagttaggcgtaggtctcatcagattatttactactgagtttttttttatttttgaaactttttaatttttaaatttaaaaataaatcttttcaaaatttatttataagatctaaactttttgtcactctaattgaattggcatagcaaaacaacactatcacgagtgttattttaccatgccggtatgactggcgtgacaccgttatctcgctttgtttggtgtgttagtattgttttaccatgtcaaatgggctggcgtgatttaaatgttcagattctgaaaataagttttagaacggtatattttttaattaaaaatttcaaaaagaaaagatctactactgaattgttgaaacgtattatacgctccatacttcaggaagtatataaacttttttaaaattcagtagtatacttgtatttatggccatacgtatgtgtttttcatgtcacaactttaataacttctatttaataaatttatatgtttacgaagtgacatatcacatatttatccatttaattaattaatttttaaaaaagaattaacagctatttagatgaacgagggtttagaatacttttccacgcagatggtgatactatatatattgagttgactgttcaatttaactcaaaagctaacatgatgagtgaagaggagcagttcaatttatattcctagcactactaatgcacacggccgcacgtcggcgccggcgacagataccatcaaaccacaccgcgttccaacgaggagagatcagaccagatatatatctgatatttatctgcatgactagtattctctcccttttatattataaatcatttgattttttttaagtaaaattttgttaagctcaattaagtttatattaaaatttagcaacatcaaaaatattaaattagttttatcaaacgtaagattgaatttattttgataatatgtttatttttttacttaggaaaaaaaaccaaacaacttataatataaaatggagaaggtagtatttaaatactcctccatgatatcacccctggctactcatgggctattatactatttgccatgagaaacgcttccaagaaattatattcgagtgaactaaccaatcatgttaacctgtcattattatactgataatttattctcaaatcatagctgcaagaactacgatctcgctggtcgctgctattatctttggattcgtcgtttctggcatctgttactacgagtggaataaaataaatactagtttttgccaagataatccaacgtcaacgtaactactgagccactagtgttataaataatcagcttcgagaatggagatgtagttttttttttacgagggagaatcgagatacagttcatagcgcagtgataaatggtgtgtgattttaacctcgagatcccgtatttaattcctaacatgctcacaatttttcaaaaaaatgtttggagggatgtctctcatttcaaatctttctttttattataaataatcagcttctctccttgagctactcgccgaggcacactttgactgacacttccattgcagaagaagcagaagagacagatcaaagatcaagatgttcagagcattgcagatcgtcctcaggtatagttttacatgatcctagctgcaaattaaagcttcatcgctgtcaagatcgccttggattaagaacaagaacagcttaattacttatatgtgtttttgtgcaattttatatatttgtgtgttgggtgcaggggtaagagccgaggatttgtcagtcacttctcctccacggcttcaaattctgaaaggttgcaaacttaatttcagcatctatttatgtttgattttttttttgttcactttgtgtttggttgcttgcgggttgtgaatcatggagaagcattgcgccgtgacgtttgatttttattttttttttggtttttgatttgcaggttggctgggaaggtggcggtgatcaccggcgcggcgagcggcatcggcaaggcgaccgcggcggagttcgtcaggaatggcgccaaggtcatcctcgccgacgtccaggacgacgtcggccgcgccgtcgcctcggagctcggcgcggacgcggcgtcgtacacccgctgcgacgtcaccgacgaggcgcaggtcgcggcggccgtggacctcgccgtggcgcggcacgggcagctcgacgtcatggtcaacaacgccggcatcgtgggctccctgtcgcgccccccgctcggcgccctcgacctcgccgacttcgacgccgtcatggcggtgaacacgcgcggcgtcctcgcgggcgtcaagcacgccgcgcgcgtcatggcgccgcgccgccgcggcagcatcatctgcgtggcgagcgtcgccggggtgctcggcagcgtgacgccgcacccgtacagcgtgtccaaggccgccgtgctcggcgcggtccgcgccgccgccggcgagatggcgcgctccggcgtgcgcgtgaacgccatctcccccaactacatccccacgccgctggtgatgcgcatcatggcggagtggtaccccggggcgagcgccgacgagcaccgccgcgtcgtggagcgggagatcaacgagatggagggcgcgacgctggagcccgaggacatcgcgagggcggcggtgtacctggcctccgacgaggccaagtacgtgaacggccacaacctcgtcgtcgacggcgggtacaccgtcggcaaggcgcccaacctgccggcgccgccgcaataatcaacacgagaatcggcgaacgaataatggcaacaattatgcattattactccgctaatgaacaaatcatatgcttctcgttgtttttgcatcgatcaaatgcattgttgtgttgggatcaaatgcctttgtttggagtggatgaggttttgggctttttgcccacgacaaacaatgtcaagagatgctgctccaagtcttcttctttctttgtttaattaaatttcacaaaacgaaagatatatcaatcaagttatcacaaaactatatatttaaaatggtgtatcaaaaaactacagagttagcactaaatttaccataaaattacaaatttaaggtgaaatatcataaaaatatagatttattaataaagttatcacaaaacagcacatttagctttgtaatacttttattattaaatttatagttttgtgatacttagtcttaaacttatagttttgtgataattttatttttaaatatgtagttttgtgatacatcaccttaaatacgaagttttgtgataatttgatcaaaatacctgtattttgtgattttttttcttgaaatgattaaagaaagaaatgctattccaagtttgcgacccgtcggtcacaatatccaaagctcgcatgcaaatgcagtccaacaaggtaagctaagctagctagcgggaaactattttaaccgctcgagtagatgtccaaccgtttattgtatgtcatctaaatgattataaaaaaattaaaaaaaatatgaataagatagatcaatatgtaatgtatcaatccacaaacatgcatgttaaaattcaacttctacatactataacaaaaataacaaacaaaactcaaattactatatgtatatttatagttaaattttttatttttgttacaacttgtagaagttgaattttaacttgcatatttgtggagtgatatattacatattgatctatcttgttaatttttttgaaaattttttgtaaccatctagttgacatgcaataaacgggtggacatcttttcgagctattagaatccatctccatagctagctccaaaatccgtacagtgacgcgcaaagtgagaataattcaacttgttaggatttaggaatcagtctacccaaatttaaattctaaattttacatgggtgctcgtatttaagagtaattatcacaaggatttaaatcctaaatttgacatagatgctcgcatttgtgacttattataaaaaaatccgtatattctattacacaacaattattttattaaaatagatgggtaccccacgcattgctatcgaagaattatatggtaaaatagtagatatgagttatgaaattttatttcttacttactatatcattttctttaatgtgcttatatatttagcacttatctaaagattataaatgactgtgttgttactatcttttggggagaagagatgcaattgccccgttgataaaactattcaaagacgaaaaacaattaagatgatgtggcttcattagagaggagagaattagcattatctatacttggtgcagataaactttatagatatataggattcacgcacgtgacagtacactaaggttgtgttccgtttcaggggatgagagctaatccctcccgcacgaaaaaaggagcgatccattagcgcgtgattaattaagtacaaaaaaaaactaggaaacgggattccgttcaacgggataacctacatacatgcagtggcttacatggagagatcaacccagctctatacaaaaggcaagggcccacatgcatgtcctatccttttttctcatccatccatgcagcttatgggtccacgtgcatgtgcgtacatgcttgacgttttgctcctgcatgtacggtgcccacatgactttggcaaagaggtcgatcaattccatgcagtaattaatcatcaatagtgaatacacttattagatcattagtacagaaatataatccctcatacctaatatgtattataacttaaaaaaatatagtgcaaaaaatggttccttggatccgatacctacatatatcgtaactgatatctcataagtatcatcactagtacccatgtatcatcaccaatacctgataggtatcatcactagtaccagataggtatcgtcaatggtacccatgtatcattaccggtacctacatgtatcatcatcggtacctcacaggtatcatcactaataccagacaagtatcgttattggtacccatgtatcatcaccgatacatgacatgtatcatcaattggtacctatatgtatcttcaccgataccttacaagtatcatcaccggtacctacatgtattatcatcgatactgggtatcgaccaaccgatattgttacaactgatattataggtaccatcgagatacttggtacctatatcagcatgattcccatatgtaccagatttgggactggatatcgggtatttggctatcaagtaccttgtacctagattggtctgatacctataggtaccatacctagtactaggtatcagggtacataaggtatcatatacctaataccagctgagtatcgggtactaggtacctggtacctgaattgatgttgaacgatacctgttggtattgggcctggtatcagatattagctttagtatcagattccaactcacatgccacgtcacatgcatgcaactagtaacacagccacgtcacatgcatgcatgtagctagcaacacagccacgagtaatcaatagaacgctcctgagaggaagcaggtggcagggccccctagcgacgcggaagggtatctcgttcccacgggatcccgtggtctagctatcctcattaagtattagctattttttttaatttgatttgattaagcaattttcgtatagaaactttttgcaaaaaacataccgttgggaaaaggggtgcctcaagagtccgggttggtaactcttgcctccagcatagaaaacggagcgatccattagcgcgtgattaattaagtattagctatttttttaaaaaatgaataatatgattttttaaacaactttcgtatataaacttttttttttaaagaaacacaccgaaatagcagcttaaaatgtgtgcgcgcggaaatcgagacggggagttccgaacctgcactctcgaacgcagccaagtatgcatatttttggcccgccaggccacgtgctgtgttttctttctttttcccccaaaatttattcctttttaattacacaggccagtcgtcttcttcgtcatcctcgatcagcgagagaatataatttgcttctctctctctatcgctcgcggttgctcaggcaagctgagagcttaattcagaggcatcatgttcacagcgatgcatcgcatcctcagcaggtatggcggattcttgtagctgttctccgattcggatttcagaggagcagccagctcagtgtgacagtgtgaagcttactgtggaaacaaatggccaaataattggggttggttgttgtaatgcagggggaggaggacacctgcagcttcgtcttcctccgtcactgccttcgccaccgcctccgattcacagaggtgatttgatcgattcatcttggagttgcattgagccattggttggggacgctgatttcatcttcttgattgcgaatcggggatggatgtgaatgtgatttgcgggtctgtaggttggccgggaaggtcgccgtcatcaccggcggcgccagcggcatcggcagggcgacggcggaggagttcgtcaggaatggcgccaaggtcatcctcgccgatgtgcaggacgacctgggacacgccgtcgccgcggagctcggcgcggacgcggcgtcgtacgcgcgctgcgacgtcaccgacgaggcgcaggtcgcggccgccgtggacctcgccgtggcacggcacgggcgtctcgacgtcgtcttcaacaacgccggcatccccggtgacctcacgccgacccccgtgggcgcgctggacctcgctgacttcgaccgcgtgatggcggtgaacaccagggcggtggtggcgggcgtcaagcacgccgcgcgcgtcatggtgccgcgccgccgcggcagcatcatctgcacggcgagcacggcgggggtgatcggtggcgtggcggtcccgcactacagcgtgtccaaggccgcggtgctcgggctggtgcgcgccgtggcgggcgagatggcgcgctccggcgtgcgcgtgaacgccatctcccccaactacatctggacgcccatggcggcggtcgccttcgcaaggtggtaccccagccggagcgccgacgaccaccgccggatcgtggagaatgacataaacgagatggatggcgtgacactggaggccgaggacgtggcaagggcggcggtgttcctcgcctccgacgaggctaagtacgtgaacgggcacaacctcgttgtcgacggcgggtacaccgtcggcaaggtgcccaacatgccggtcccagatggccattgataatgtaccacggttgatgaataataatgttggtgatgtgtacacaattcgtagtattaactctgtttcatactgtaagttcgtttggactctttttaatcaaacttctttatgtttaattaaatttataaaagaaaattagcaacatttacaccattaaattagtttcattaaataaaaacattaaatatattttgataatatatatattttgtattaaaaatcttgctacatttttctataaattttgtcaaatttaaaaattttgaatagaaaaaaatcaaagcgacttatataatactccatatgaagcagagggagtatattgtgccaatcagattcgtgttatgattacaatgacatttatgtttagaagaaaaaaaaaggggctgtttatatatcatgtgacagaaaattccacctcctatcattcgaattttggaccattggatgtgcttcaagattcgtgcagaccttttaacttaactcgtctcctcctcccccggttccagatcgcgccgccaccctcttcctcccatcccacgcgcgatccaccaccgccaccaccgccaccgccccaccgcgccgccgccagcctcgccagctggccggaaaaggtcaacggcaccggcgagccccctccccctcccccttccccttcccccctcactttcttctcatggcggcgacgacgaggtgcccccgccccgccgtcttccccgtctccggcggctccccaccgccggatccaccaccaccggccgccgcctcctaatcccacgcttgctttgcccctgccgccaacgctggcccaccaccctcctccatccccgcggctttggcggcgtcaccgccgcttcgccgcccaccggagtccaccgcccactgccggtcctccgccgcccacggccatccctataagccccgaggaaacccctctcttccccctccctcaacccccctcctatcctcacccaaaccccaaaccctaatccgccggagttggggtgtcgtcggcgccggagaagaaggggagcccgccggagttggaggagagaagccaatgcacaaatcttggtatggatccaatgatcaaaaaactgtaagatttcatccccaaatttcattcgaatgccatatagcaatctcaaaaaaaaaaaaaaagaggtaagatcactatcactccacggaaaaacagggcgacgcccgcatgaatgatgtgctgaattaacgaatgaatgggccgggcatgcacggagtggaccaactcattcttttttctcaagttaaggaagatgattaattgattatatctccggcctatgtatctatgctgtgttcttttgctggctttcccaacttacccttttttttcgtatgtatgttttttaattgttaaacggtggtgtgtgttttgtaaagaataatggagaagtagaaggagaagattattcaaccatattaatgtttaattaacctcaagcttgttgacacgatagggaaatataaatcttatgagtatatgagtttataaaaaatgatgatcaaatattataatgcttgatttaagacaaaacaagtaatttgaaatagaggattaaattctagcccgattatctcacatgacatccttgctcattctaaagtctaaacccactggttgtctagttttgacttcaccgttgaccacgcttgtcctcaagtaaacacgcatactatagataaaccaagagaacttcaatatatttggtctcttttgaaacacgggattaacaaaacataggaatatgaaaagtatatgatttttacaggaatgcaaatgtaaaacacaaaaaaaaagaatgatttgtttgaatagatatagaccgtaggaatcaaatgcgagagataaactcaaagaaaactttctgagaggttggaactcttgctaattttttcttcaaaatctatatacattgagccattcctttggaatttcatagaatttaaaaagctcaaatcctttatttcaaagagctaaataggaacatcttctatgggatttgaatctacaaaattcattcacaaatccttcgtctctcaaaagggccttaacgtaataaatatcaaacatactccaacaataattgaaaagaaaaagaaaggatattcaaccacattaatgtccagttaagtttgagcgcggccaaccaccttgaagaaaaatccaaccacgtgatttgaaaaattgctacgcgtacgatgaaattcgtactacgttaggtcccatatttatcgcatacaccagagactctgtgttcgggaggagggttcccaacccctcctccctggcacacaaaataaaacatctattattgtataattaattaagtatttactaattttttttaaaaaatagattaatatgttttgtaagcaaatttcgtatataaatttttttaataaaaacacaccgtttagcagtttttaaaaagcgtgagcgcgaaaaacaagtgagggaggttggaaaagggaggtaacgaacggagctacatgtatcgtactatcatcgtatcaagtttagtatcgtactatcatcgtatgaagttatatcgtacgtattagactgctgcgtggtctgtgtatcaatatatacatttctcgtacgatctatatgacgactcctgtggtatatgatgcgtgcaatgcctccttttctttttctctagaagttttcatgttccccaagtcaaaccatacggtggaatagatgaaagaatgcacggtttgcaatgacggtgaggtttgtgagttactattctctttcatgagggcgcctagctcttctgtgttttttcttctagcaattttaccattcaacatatttagtatctcgatgtaccatattttatacataaaaatttaatacctcgaggtactaaattttacactagaaagtatcttgagggtattaaattttatactagaaagtatcttaaggtactaaaagtttatgatattttaaggtgctaaattttatactagaaagtaagtatcttgaggtactaaaagttcatggtacttaaattttacactaaaaagtatcttgagatattaaagtttatggtacctacagatgccaaatatatttggatagtaaaattgctcgttcatactggtttaatggcccatcaactttgatatttgcacatggcctattcacatcatctcggacaatatcgttaccaaatgatgggtgtggttatatttacaacgccgcattttctatactccctccgtttcgaaatgtttgacaccgttgactttttagcgcatggggctgcaggaatt

SEQ ID NO: 20491 - DNA, 6139 bp, Oryza sativa
tatgcctacataaaaatatatttaacaatgaatcaaatgataggaaaaaaattaataattacttaaattttttgaataagacgaacggtcaaacatgtgataaaaagtcaacggcgtcaaacatttcgaaatggagggagtataagaaatcatcctttgacagtacaaatcaacattgtaaccacgttataaatttaaaaaattaaaactgtaaatttcaattctaatattaaattttttctagtacactatataagagaattacgataaaaacaatcgattatttacttgagaaagtagatagaagagatagaaacatatatatactttacataaaaatgtaaaagagatgacaatcacataggctaaaaacgactgcagacatcaagcttaaaaatgtaacaccatgttttctattagcaaaaccacaaaatcatctccgacaacgttggcatcgcggcgcaaccggtggtcaaattaattgactgaattaattactgcttcgtaaatcctccatttcgtgtgttcgattgacactagcactgatcaggacaagagaaaaagggaagaagaagccaaagccattgtgctatctctcgcagaaagataggagagcctgatagggagatgaccatatgcggctgatctaccatctacttcacagtagtagaatttctcagcatgctaggtaaaaaacggaactctttcggatcataaatattaatttcatgtctaggacacgattcgtttaagctgtttaaaattcaagttccgctagaagcacgggctgagttgccaaacatctgcttcctccgttttttaatatatatacaacaccgtttgatttttaagatacgtttgatcatccgttttaaataaaaagttgtgtaattattatttatttttattgtaacttaatttatcgttaaatgttatttcagcttgacttaaaaatattttatatgtgcaaaataattgaataagataaataattaaatatttggactaaatcgtggaaatcaagaacgaaaaagagaggcacgtgctgacggtggccgaccggccttcctgaagggggctcgcagtgcatcaagccaaccaaccggctgttggctgatggcaaaatgcgggaaattcagaattcacttacttcctccatttttaaatatagcacatttagtacgagtgagttagtttagaaaatgaactaactatcctgattagatatttaaaatataaaaatggagataatacaatttaacattaagttattattcacgtgtcacgggtatgtcgacatgaacaatacggagatcggcagtggcataaccccatttaaatcctataaaaatactacacaatttctgaaaattgttaagttgggtatttttcatctttgtccctcatggcgatctcgcgcattgctgtaggaatttatagatctatatatgaagaaaaaacttagtacttaaaatatgatagggatcatggtgtacaacttttgaatcactatgttaaattttaagttgcaattctctgtcttctagttagctttatttcagctagatcacgaagaggaacgatgctaagaaggaacttagcatcaattatcaattattaagagagaagaaatggtgagaaaacccagcgttgaggggccaacgagagcacctggtagctccctaccaccgggctacaacgccgttctcagcagggggccaccaccatccttccatattcggccaaaacactaccttataagtgtgtttagttcacgtcaaaattgaaagtttggttgaaattgaaacgatgtgatggaaaagttggaagtttatgtgtgtaggaaagttttaatgtgatggaaaagttggaagtttgaagaaaaagtttgtaactaaagtctaggtcacggacaaacaggagaagaagaagaacatgctgcttgttgtgactgcaccgacgtctttcgtggaaggacgtgatcctgcggtccggcacgccgtggaataacgcatggcgatcaaagaccaaggacgattggaaggtaagctggctcggcccttcttaagaggctcaaggtgagccagaggccatgatcacatcataccttcttcctaaccttgcaaaattagggaacaattaattcagctactagtagctgaatttggagctagctaattaacaggatgttcagagctgcgcagctcctcctaggtacatatcaggcttaattgtactgtgttagtgagagtgagactccaaattactagttgattaggatgacttgataagtgcatgtccatttgtgtggctggcagggagacaacagagctcttggggcagcaacttcgcctgcaggcttcgtcagtggcttctccacggcttccaactctgcgcagaggttcgctctttggtcaagttcgttgtactaaaacgtatcacatcataaacttttaaacttttaaagaattatatgtaaggatagtgattgagacaattagactatgtttatttataaaatatgtatatattgatgttgcaggttggctggcaaggtggctgtcataaccggtggagctagcggcatcggcaaagcgacagccaaggagttcatcgagaatggcgccaaggtcatcatggccgatgtccaggatgacctcggccactccaccgcagcggagctcggcccggacgcctcgtacacgcgctgcgacgtcaccgacgaggcacaggtcgcggcggccgtcgacctcgccgtgaagcggcacggccacctcgacatcctctacaacaacgccggtgtcatgggcgccatgccgcaggacgacatggcgtccgtcgacctcgccaacttcgaccgcatgatggcgatcaacgcccgggcggcgcttgtcggcatcaagcacgccgcgcgcgtcatgtcgccccgccgcagcggcgtcatcctctgcacggccagcgacacgggcgtcatgcccatgcccaacatcgccttgtacgccgtctccaaggcaaccaccatcgccatcgtgcgcgccgcggcggagccgctgtcgcgccacggcctgcgggtgaacgccatctcgccgcacggcaccaggacgccgatggcgatgcacgtgttatctcagatgtacccggcgtaagcaaagatgatttggagaagatggcggacgccgccatggacgccggagaggtgatggaacctaagtacgtcgctagggcggcgctgtatttggcttcggacgaggctaagtatgtcaacgggcacaacctcgtcgttgacggcggcttcacgtcgcacaaaggatccgacacacgtttgaattagcgatgtgtccaactatagatggacaaatggaccgctcggcccgggcacgaccagacacggaccaatatgaattagtcacatgtgctcctcattggaataagtctgttgtacctccctcatctgtttgggttgtcttatatggctggattaagtcaattttgcatccctcgtctccttgggccatgccttatgtgactagaagaagtctatattgcatcccaaatcgttggatcgggtcgtgccaggccggcatgtcgtgccaaggaaaaggtccaagcacggcccaacaatcgggctgtgctggcacgggcctaacaacaatcgggttgtgccgtgtctaggccgggccaaaaccccgtgctgtgggttgagccgtcgggccctaagccttttggccatctatacgtccaactaacatatattgaacagacaccactacttgtcttggtagtctcgttagaataagataaggttgtcacatatgtgttgtcggaattagaaaaatatcattgatatgatggtagagttattgctgcatgactctagtcatataatttaaattctggttttctaaaagaaatgttaaattttggtgttcataagtatgattgtgtgcatcagtggattacagtagacgactaggcaattttcataatttactatctatatatgtacaatacaataaaacaaaacttgcatgggcaactctaaggaggtatgattgtgtcatcgtagtaaatttatgttttaaattaaggacacatatataaatatttatttataaattatttttttaagttgctaataaatcatccggataagcataaggataaatgaaacgatagaaccctcaatctatcgcaatcgttgagtcactggtagccgcgccacagccattgcagctgcttcctttcattgacagcttggaggataagacacgtgcaaattgccatggaaaattggcaatgccacaagagaagagaaggtccaccttatcaacaacaattaagagaaaccatgtggaagaagctgacactgtactgattccggcacgcaataatagaagacaagagacaaggggtaggtaagatggctggccttcttaaggagaggccatctgttaattagtactacctgatttcaagcaaaggcttgatcagaattaatccatttaattctgctctgccttgcaaggaactttgcctgcaggcttctccatggattccaactccatccagcggtttgctgctctttatttcagctcctttgctgcgaataattataatttagacatattcttttcttagagtatagtagtaatgtacattagtccatataattaattttctgatacaataggaataatttttatcttcggcttctgtcataagacggtgtatttatggatgtcgcttgcagtttggctggcaaggtggctatcattaccggtggagccagtggcatcggaaaggttacagcaaaggagttcatcaagaatggtgccaaggtcatcatcgccgatgtccaggacgagctcggccactctgcggcggccaagctcggcccggacgcctcgtacacgcactgcgatgtcaccgacgaggcgcaggtcgaggcggccgtggacctcgctgtgaggctccacggccacctcgacatcctctacaacaacgctggcatcatcggcgccatgccgcaggacgacatggcgtccgtcgacctcgccaacttcgaccgcatgatggcgatcaacgcccgggcggcgctcgtcggcatcaagcacgccgcgcgcgtcatggcgccgcgccgcagcggcgtcatcctctgcacggcgagcgacgcgggcgtcatgcccatcccgaacatcgccatgtactccgtctccaaggcgaccaccatcgccatcgtgcgcgccgcggcggagccgctgtcgcgccacggcctgcgggtgaacgccatctcgccgacgggcaccaggacgccgatgatgatgcatatcatctcccagatgacccccggcgtgggcgaggacgacctggagcggatggcggacgccgccatcagcgccggcgtggccatcgagccggagtacgtcgcgagggcggcggtgtacctcgcctccgacgaggccaagtacgtcaacgggcataacctcgtcgtcgacggcggcttcacaacgcataaaggagacgacaatcgcatgaattaatgacacacccaactaattaatcgatcgaacacccttgttcgtcgactcgtcagaataataaggttgtggtgcatatgtacgtgcattgcacttgatagtgcagcggcaaggagtgtgtccctccaattctcgtttttttattcccgaattttggctaatatatatgttctcagagttataaaaacaccgttacttttttttataatagaatagaatatttcggcatttgctaagaagagctacagctaattattgcaatctagcactctaaaaagaccattactgtggtgtaggaatcatgggcagggtttaatatatcagaaaggagaaatttttcggaaattcccaacgaaattttcaaacaaaatttgaagttaaacaacaaaattacagaaaatttacctagatcagaatataggtaagtgatcaagtccagctaatccaaagcagagtgacaggagaagatgaaatgcactttatgcaacgatgctaggccagctttgtggcttgtgtcttcgtcctcgtcgtgccgaagagccaaggagctgccgccggcgactccagaacagtgttttgccgaagttcttgaccggagcata

SEQ ID NO: 20492 - DNA, 622 bp, Oryza sativa
cgcgcggattggggtagtggtggtggtactctccgcgattggtacacgtcgtccaatccaaccgacctgcaacctaatcttgctgcaagtttccggcacctttgacgaactttttgcatttaaaaaaaaaagaaatttgttagtcataagtcaagtaatgcaaagtgctaaatcaattttacctctaagacattgcggagtgtgttctccgtgtcctcaccacccctcgaagattggagggcatgccccatttcattcacactcctgaggagctctctcgactgaaagtgtgagaagatgtttgttagggtgtaaggtgcaaatggaaatcactttgacaaatgcaagaaaacttacgactctgtttctaagtggggcgtgctccatttgatatccaaccctagtccggacgtcatagggattccgcccctcatcggagtcgcggtcttcctctatatcgccttccgtccaagtagggcgtaggaacagtctatatgtcctatgcaaccaacgaaggtactctaagaaaagatgattttggtgtattgtctcgatgtacctgtcgttccttcccgctgtcctccattcatcaatgtatctgttatgctctagcccccagtcc

SEQ ID NO: 20493 - DNA, 2261 bp, Oryza sativa
taaaataagttttcaaaaaggaccaaaatgtaaaaatttcagaaattaaagagtaatttaattttaaaaaggtttttaaataaaaataaatttaaaattaaagggataaagtaaatcaaataaatttcaaataattttaaaggttaattaaaataatttaaaattagaaagtaaacaaataaataaggaaaaagtttttaaataaaattttaaaaatagaaaatttggtatcaaaataaagggtttgaaattagatgaatttagatcaaaaggttcactggaattggatttgtggtttgagagatgtggattgctaaagattgaaatggaaataaaaggaaaaaggtttactttatagaagtagggcccactgtcagttccttcttctctttcttttttcttcttccttcttcctgcttccttctccttttctgtttcttcttcccgaataacaacagagagagagagagggagacagggcgtcggtgctccggtggttgaacggcctcgatggcggcgtctaagcgtgttcccgagcatcgcgcacccggggagggtggaggaaggcagaggtagagagtaggatggccggaacggcggcgacaagagcttagctccggccggctatggtggtggcttgtggcagtggctaaaggagaggggaaataggaaaaaaatggaatcaccggagtgaggcaaagcctatggtgaaagggaattggaagaggagctacggaggaggagatcggccggtggcaggcgacggccggtcatggcaggagagagagagaggaagagctcaaggctctgatgtgggggaaaaagaggggacctcgtcgtccttttataggctggggaggtcggtggatggagagaagtcgacgacggcacagctcggcgtcggctcggaatgatgaggggcggcgacgtgtgtcctcgccggattgggcgtcgtcagtggtttggtggtcggtggcggctcatggcaacgcgtggcgcggcgtcgtgcggcggtggcgaaaatggtgggcggcggcggcaaaagcggcgggcgacagcggctgagcagtggcggccgcagcggtggctgtcggggtgccacgagggcccctggtttgctgcggcggtggcgggatggctacggcagtggcgtggcggcagcgggcggcgcgatatggcggtggcatcggaacttggcgaggcggcggcgctcccacggaaggggagaggaggcggcctggcttgggccggctcggctgggcttcggctcagttgggctggcagctcaagaaggagggagtagaaggaaggaaggaatgggccaaatgaatgggagttcggcccaaattgaataggaagctttgataatggaataagttcatctaaggtcccttaacttgtcaacgaatcctattttcgtcattcgaccgcaaaaccagatacaacgggtccctcaactatccaaaccggtgcagattaggtccctcggcggttttgaaggcagttttggctgacgtggcacctacgtggctagtttgacttggtcttgatctgacgtggcattgacgtggcgcttacgtggcaattcgatccggaaaaataataaagctcgtgggacccacatgtcagtttcacatagaaattaataaaaaaaatggtggggcccacgtgggccccacatgtcatcctcaccccttttcttcctcctctctcccaatctcccctctctttcctcactgaccggtggagcggggcgatggacggggcggagcggggcggccggcgggagcgggccggcggagcggagcaggttcgcgggcagagcggcggcggccgcatgtcaccctcactcccctcttcttccacctctcaacctttttgtcggtggggagccggcgcggtgactgggcatcggcggcgcgcgggaacacaaggcaacagcggcgtggaggagggtggtgccattggcgcggcaagggaggtgctggctacgatgggggcggtgggagaggaggagagcgtcggcagcgcgggaaagggcgacgggcggcgcggcaagggaggagttgagcggcggcgggcggcgggagagcgagagagggcgacgggcggcaagggaggagctgagcggcggcgcgcggcggaagagaagctgcgcggcggtggtgaccgccgccgaggagggcgtcgcgacgggcagcagagagatgggcggctgccagttgccgttagggagaaggtgcagctccacgcttctcgct

SEQ ID NO: 20494 - DNA, 3987 bp, Oryza sativa
tccacgcttctcgctccgaccgccgccgctccgcctgccccgctccgctccgcccgcggcccgccgccgccctactttgctccggccgccccgctccgccggcccgctccggccgctgccgctccgcctgccccgtccgctccgcccgcggcccgccgccgccctgctctactccggccgccccactccgccggcccgctccggccaccccgtccttcgcccgctctagtcgccgccgccctgctctaccggtcagtgaggaaagagaggggagattgggagagaggaggaagaaaaggggtgaggatgacatgtggggcccacgtgggacccaccatttttattaatttctatgtgaaactgacatgtgggtcccatgagctttattatttttccggatcgaattgccacgtaagcaccacgtcaatgccacgtcagattaagaccaaatcaaactagccacgtagatgccacgtcagccaaaaccgccttcaaaaccaccgagggacctaatctgcaccggttttgatagttgagggacccgttgtatctggttttgtggttgaaggacgaaaatcggattcgttgacgagttaagggaccttagatgagcttattcctttgataatttgtgtggagggttttgaatggaattcaaaggagatgaaaatctaagggacgaatatttgtggaatttttgaatttgactagaattcaaaggggaaaagttctaaaggaagatatttgtgaaccttttgaactttgcacaaggaatataaatataatttaaggaattgaaaactaagggaattttgaatggagggttttaaatagattcaaaggagatggaaactaaagggaataaaaatatttgtggacttttgaattttgaaaaataatagaatttttaaagtaataaagaggtttgaaatatttttaaaacaaaactaaagatatttattttttaaatataaatttgagaaggataaaaataaagatgctccaattttatagaattcaataataattaaatgtaaaatttgtcacgaaagattttcaattttaaaaactaaaatagtcaaataggaagggaaagaaatacaaatgatttaatgtctaactttggataaatttttgggatggtggcaaaatagatagaagggaagcaaataggactttagccccaatatatgtggtatagatttttggtgaaatatttgtgggctaaaggaaattggattttgtaagaagggggattaaatataagtttcttagcacaagagcaatcactcaaaaatttgtgataatattattcttgtgctacatatgtgattaagccataggaatcaaattggcggctcgatccaactaggaacttaaccaatgaatattttggatcgattaagaggaggtaagggttttcggggataggtttagataggggttgatccaaaataaatttcagcagaaagggagttatactggtttagctctaaagataaaagtggttaatgggatataacagagagtcgggtcaatcggggaaatattggcccaagctaaatagtagactttggaatcttgaattgataatttagatgaacaagatttcaaaggggaaatatttgtgggagtatagaactggattcggaagtatatgtggatgggaatttttataggaacggaattggtggtagattgataaactctaaaggatgggtatgttgactcaaagggggattgaaaaggatattttatggactctggggatatttaggtggagatccaaaggaaaggtatagtatcaacatttcatgtactctagagatattcgggtagagttcaaagggagagtattaactctgagaaaattggaaattatcattttatgtactctagggaggttagagaatgacatttcatgtattctggagatggttgagtggagatcaaaaggaaagtattggttctggggaaaataagaattggtatttcatgtgtttgggtagagatcaaagggggagtatttggtggaagataaaactggatttggtggtagtgtggtaagctctaaatgaaaaggtattaaccctagagagattgatatttcatgtgctctagagatggttgagtggaaattgaaagggtatttgttggagatgttcgggaatggattcaaaggaattataatttagagccaaagttagagattaaagaaaataaatggaaaggtttttaaaaatttgaaataaataaaatagagaataaaataaggattttataaaatttaaaagagagcttttaacttcgcaaataaaatttagatctaaagtaaaagagattaagagaaagcaagattattccaatggaagaatcaagaagagtgcaactaaaatatttcgcaaaaaaatttcccgaaattttgagtccgttacactcccgctctgcaccaccgtgctggcgctgtcagtcggctgcccgactccctaatcatgtttccgacgccggcgaccatcatctgcaaccatcgacagcccaggctcggcgccttggccagcggccaccattctgcccccgctgctcggcgcggcggcggcgacgcgccggcgttgtctcccctcgacagctttgccccttgctatcccttcgtgacgttcgagacgatgagactgacgaggctagacggctttggctggccaagtttggacagcgagggaggcaggttagctagccggatggcttggccattcaaatagcaagtctattggagaacatttttttttccaaaattaccaaattttggcttggagagagtgggatagctaggctcttggagatactcttatatatcattctaactctcttctagcaaaagggcgccctagatgcaaaggaggaggtgcctacccactcactcaccttctaggccccccgatgtcatacattattccacgctaggttttgctatttgacccgcgacgatagatttttaggcttctgtttttttaaattttcgtccatagaatattgcatcaagatttgcgtttgtataaatccaacttacagttacactcgattatagtgcacttacactcaattacaattacatagcactacttgtattcagttacattgcatcgaaattagttttttcagcagttaatttctctattcaagttttacgatttttgacatgtttattttttttttgttatttcgtctaaatcggactatatccattgattgaaaattctacgagacttaaaagattataaatacatcgaaagatgaatagctagttccgtcccttccacgttctcatcaaaatccgtatcccgacttgcaaggcgccttctccctcagccgcttttctttcatgcatggagcaagagagacagcgccgccacctccccgcgccgcgcgcctcccttccgccgtcgcgtcgcgcgcctccctccgccgccgaccgccgtcgtgaaaccctagcctcatcccctcacgccctcaccccctacatggtggagggggataataagactgcaggttcagttctactacagtattttcttggattatggattctcagttttttttttcttttaattcctagccgcgtatcgcgttcgtaatgttgcggttatatatatatatatatatatatatatatatatatatatatatatatatatatatatatatatatatatatatatatatattagggcattaggcgcgcggcggaggagcaagtcttcggcgaagggcgatcgaagcaggcggcggaacaaggtacgcctccacttcaaaccctagaaaattctcccactaccccttgctcgatcgacatcgctcgcccgatatcgatctctgtgtgtgtgtgtgtgtgttcctgcccttttctgcatgcgtcaatcgcatccaatccaaggcgatgtttataaatcacaaacacataaattaacctgtgtactgtatacagagaccggg

SEQ ID NO: 20495 - DNA, 7663 bp, Oryza sativa
gtcctcgttgtcacacgccttcatcagctgctcgtgccgaactgttcgattcaacataactgccagctggcgaacctaggttttgcactattcgtttatgatctggtctcagttataagttcttagattgaggttgcaattcttcttctggcgtgctaatatatcggttgattattgctcccgtgcttttgatctctttgtgggtaacttcatctatacttattcggtgccctggattgtcttcttcaaagaaaaaaatgcaactggggatgaaaagcacaaatttgatgacttacaggaatgccatatccagggatggtctacttaattgatataaagcaaggcaaagtaaacgaatgaacaaatgtatttgttttatcttttgtctttgtgttagaacttaactaggttccttggaattgtacctctgttgactattgattggcgtagtgacttccatatctctcagacagtgtcttgttatgacggcaatcgaagtttttttttttttctgtttcgtcaccttgcaccttcaatttcatcaatgttttgacgtttttggatatttgttgtagcttcagtgttagtcaagttcataggttctttttgtttaaggttaagtggttacctgtacttcacttttgtagcctagttacctttggacttctccataatgatgttctgcttttcatatatacacatgcagtcgtgtgtagtcagttttatctgtaactatctccaaaagagtccttctaaacatatcaaggaataagtttcaccaatttgccgagttgcttttgcgaccataatgcctactaatggtgactcactattacaattttattctctgtggtccagggttggaaagatgacagataatctaacaggtgattgctcaacaagctcaaagaaaaggaagaaagcttgcaaaagttgaggagagacaggtgagtaataggtttgattttcttaacatacttacacatcttcgtcataacaatcacaataatattgtgcaatgcttcctcatctaggaaagttgcatgtggataacatttttgaagaggagtttggcagcttaaagaattctggtgaaggagcatggagtgaactgagtaaagtggctgtgtcaaacttatcgaaagtgttgtctcgctggtttcattcaatggtgattatgcacgttggcttttaaagtttgtatcgagtcatcactcttaatgatggaaatcatgattttgtgcagggggtatgatgtattctgcatgcacaggcatagttatcaaaagtgatttacatggcataagttacctgacttcagctagcctgattagatctttggatgatgaaagcaaaatcatgccatatgtttgtatagctcctattgtacatttttgtttgcatagctctttcacattcatgcataaggtctctcaccctggatggctagctagtccccgggggtgttctggtcgcgtgccacctttatagggggagtgttctgggagggtccttcggatccctccgttgtatatatttctttcttaatgacatgaagcacagacctgttttttcgagaaaataagcattcaatgcatatatcttggaaagacattttggtccaatttgaccgatctgctggtcactggttattgtttgtggtgcctggtaaaagatattgaggccaaaagataaaatgtatgattgtatgcctaatttgaatagtggattcagagggaagtgaaacataggcacatagtgctcaactgctatgacagaggctatatatccatggctgcgtgcttgcgggggtgttagggatcctcaccactttatttttttcttgaagtgttactccaatatgcagttttccaaaaagtaaatctcaggttgcataagtggggagactaacccacaacctacactgctaactgtatctgtgttatgaaactttgaatgacatcactgaccatatcagctacaaaaagaatataaaatgctaattgtccttatcaattccaccttttctttggtaactactcttgatgaatttactatgtactgcaggggtgagattataccacttgatagcacaattggaaggagcacaaatgagatacaagaatctcctgcaactcccaatgagcagaagatgaagtcagaagatgaagtcatcttcttctagtaattcagaaggtaaatcgggctaggtcacttctaatgttaattatcatgcaaaagttgtcatcatgttttaatgttaattattgatcattactaacacatggtcattaatcgctttaccttgtttctctagattacgatcctgagaatgatccattttttctggaggagacccctttcttcccggttgctgatggtgatggtgagtcattgcttttaattttgctgtcattgttaacacatgatgattaatcgcttcagttttttcaccaggatttgggaaatttttaattaaggaactaacgtctcaaggttatcctttgccagctatcattgatggtgagtttgttgctgactactctcttccattgcacattttgacagttgtatttcagcactctcatatgtggtactacttttctttaaacaggaggcatgcatttggttaatacttttgaaaatgaatttgttgatgatatctggagtaaactcaccaaaaaagttgcttcaaacgtgtctcgtgttgttgtctctcttgcttcattcaaaggtaatcgcattgttataatctcattgcattttcatttcttttttatagatcatcactattcactaactatgattcattatgatcttgtaggagaagaacggatttttgcttgcacaggaatatttataggctgcagtgaatccaacacaaggatcctgacttcagcaagtttggttaggatttctgatgatgaaaacaggattaatgataacttgaaggttggtattgtattgtcctccttgagcttattcatttgagataccggtaaatcctcatattacttctgcagattgttgtacaccttccaaacaaacaacaaactgtagggacattgcaacattatcatctgcattacaatgttgctattgtcagcatcaaaggtttccgttgtcttcgtacggaagaatttcatgatccagggcaaattaagtgtaagaaggtattatctgtgggacgtgtcttcaagtcaggcaaattaatggccacaggtgggatattgacggacaaaccaagcaaacttgactgcaaagaacttatggtctccacttgtagaatcactaaggtacagtgaatctccaaattgaagtcttgcttttcctcgcaaaagaaaggctttaattttcttatattggaaataatttgttgccttacaatatgaacaagagcaatttaatataacactaccaaacattgccatgtctgcttaccaaacctagccaaagggcccgtctaataaattgatggccataccttaggcaagatttgggaaataaatgagtgcatgacatatgtttcctaggattaaaagaacggaaatgaaacaactgttttacgaagtgtggaaagattggcaaagtgtgaaacgctcctgcttctgcggaactacgtgtgtaatcctttgtttttgtgctaggctgggattggagggcccctgattgattttgatgggaatttcgttggtatggtaggaaggagactccgtatttaccaagggatacaattctgaaattattgagctattttgatggagaagggtatgtcttctatgtttatatgtatacctgtgttttcaacttttctatgtcttgttatttagtttccttcaaattttcaacttttctgtgtcttgttgtagggatgtctctgctgagatcatggacagaaacaacagatgccctgtgcccaagatacgttggcattatcctcacttctgcaagccacgcaagtcagagaagtgtggttaatatgaaaagtactagacgagacccctgcgtgttgcagcgggaaatcttgtgtataatattaaaatttgtaaattgattatggtaaacatattagtaaaatattgaaactgattaacaaaggaacttgattgctatcatacaaaagactgaccaatcgaacgaaagagtcatgctccctaagacattttgaatgggcctagccatcagattttgatctaacagacagggagtcttatcggagagggagtaggtaaccgagatatcttctgatgagaataagcaaatccctattttttttgttgaagaaaagaaaagcgtgtccacgtggactggactctgaaattttcctcctcccttctggagtcttcctcatcagaaatcagaagaggagagggtgggcaactcgcagatcgccttctcgtcgcgctcgcgccgcaggggtcgcctgaggtatgcagcttcacctcccccaactttctagggttctaatcgcctctgctcgctcggattatgcgtggtgggtatggctccgattccgccggagtagctggatctgtgtgccccgtgctaatttaggtttggctttcgattcggccgcgcttcggtttgttctcgcgcgtgattgcttcgttcggccatagggctcatctcaggctcgacatgtggacggccacaaacataaaaaatccttgttaaatttacggttcatgtggtaggggggcttttcaggatcggaggtttaggtgatttggagtagcaaaacgattttgctgtgttagagaattcgagaatctgtgccgtcagatgctaattagctggttttgaacaaatgttaagacatcctgatattatttgctgcgtttaatgttcaaactttttgcacgggtgttgctgagctataaaggatatgaggatatagtaccaagttctatcgttttgttctgatacatacaatttgctgtagtttatggcaccatcatactgagatatatatacctgtgcacctttcggcttctgtgcagaacacatagacaatggtgaaggctgttgctgtgcttgctagcagtgagggtgtcaagggcaccatctttttctcccaagagggagatggtaattcacctaaacacgcagcgacaacttgtattctgtccttcccgtgttctttgggcgtaatttgttgccttccgtatttaggtccgacctctgtgacgggaagtgtctctgggctcaagccagggctccatggattccatgtgcacgcgctcggtgacaccactaatggctgcatgtcaactggtacatatgcacttcattccccttttgtttatcaggagaaatggatggattgtggtgtgcttactggggagtttgttctatgctgtaggaccacacttcaatcctactgggaaggaacatggggcaccacaagatgagaaccgccatgccggtgatcttggaaatataacagctggagcagatggtacttttgtttgttctccttctgtgttgcttacattctgttattttggggattacatagttttgcattgatgggaattttgatagctgttctcgaattgtttaatgcactgcagcaatcatgcataaccccactgatagtttttacttattgcctctccaggtgttgctaatgtcaatgtctctgacagccaggtaggaaataatcttgctctctcaatgaacatatgtgctgacctttttcttatcatttcctcttaagacagttaatttgacatcggtaacattctttgaacggcagatcccccttactggagcacactccatcattggccgagctgttgttgtccatgctgatcctgatgatcttggcaagggtaatgctttataaacactcagatctgtattatttatgtaggaatgattatttgtcagatgtcttcttttatcattgttttggatagagacatgaagccgatgtttgtgtaatgatgcctttctgttttatatcaggtggacatgagcttagcaagaccactggaaatgctgggggccgagttgcttgcggtgagtgacttggttttactcatgtccttttggcaaatctgtttaattcgttttcgtccgcggattgtttgtttcttctcttagaactcccatcaaatccgtctgttcttatgatgcttgctcttctctggttcaggaatcatcggactccagggttagacgtctcaactttccaacatacagaagctgttcatgttcgctcgtatggatgttgaaataaaaataagcacctgatgtatgaccagtgtgcagtttgccccagtttatatatatgtgctatactcctgtccgaacattacagtcatttgacttgagtgcatgcgttttaagtatcattggtggacttgagtacatgtccataacccatcatctgggatgctgcgtttgagaccgttcatttttcagcaaggggattgctctgtcaggtaacctaaattgacaaattcaacctaggcctggacttatttggcgctgcacaggtgcattctatctatatgaaccaaactctgatcgatgagtcagcaacttaggattttctgcttgaagagccaacaatgaatttggaacaaatccgatttcaaccaacaacgaatttcagaaagataaacacaatcaacaacaatgcctggccaaacgaaagggaaatgcggatagcaacagcgatctcatcgttttcagggaacgacacattttgaatgttcttgcagcaacattcgacaccacggggaaataggagtggtggaaacgtgaaaactaccattgaattgaaaaataaacattgaagatttgtccacgtcattacgggtaaaaattttacttacaaatttactaatgaataaaaattttatttgagagaaattcagtaaaaaattttactcgtgttagcgtggacgaatatcagatatttatttttcgatccaacaatagtttctaagtttctattacatacatggtttgcgtatattttacccacaacacgcaacaccatgacatacttgtcgatgcacggataagactgagataagcacatgacgggctatgctttgcctgataaattcaagcacctcaagtagagctcggtggatttcggaggaggtctttgcccaccgtgaagccgccgtcgacgacgaggttgtggccggtgacgaacttggcctcgtcggacgccaagaacacggccgccctcgccacgtcttccacctccagcgatgtcccttccagctcctgcatctccctcgtcaccatcctcctcacctcctccgcggtggccgccgggaacgtctcggcgatgatgcctagcgccatcggcgtcgggatggcgtgcggcgagatggcgttcacccgcacgccgtcgcgcgccagctgcctcgccaccgcgcgcaccatgccgacgatggccgccttcgacatggagtacaccggcgacgccacgccgccgagcaccgccgccgagctggccgtgcagaggatgcagccggcgcggcgcggcgccatgacgcgcgccgcgtgcttgacgcacgccaacatcgaccgggcgttgacggccatgacgcggtcgtactcgtcgaggtcgagcgccgcgagcgaggccggagccggtgctcctatgacgccggcgttgctgtagacgacgtcgagg

SEQ ID NO: 20496 - DNA, 3213 bp, Oryza sativa
agcttgacgacgaggagaagaggcgatcggccaagccgttggagaacacctgagcagctatgctcttccccctgcaacttgtttacgtgaaaaatgattgaaatcatcaaaatttcacggtttgcacgaacgttttttactggagaagatgcgaacctgagaagtttgttggctgctgcgttgagcatcatgaacggactcctgattaccgatgcttcacttccaggagttgagagatctcagcagacagtagtctgtactatagatggccatatggcccgcgggccgacggcctggcccaagcatggcacggtctgacaggtgtcaggcccgtgctggcccggcccgatagttgggtcgtgcgcatgaacttcagggaggctaaagtagacttatttcaaccatatgtatggcacggtcccaatacgaatgaggaaaaatatacttatttcagttatatataagacacggcccaaagaggagggacatatacatgtcacagcccaaagaggacggagacgaaatagacttgtatcaaagaaagcacgatgggctgtcgtgcttttgggtcagcacaacccgactcttattgggccatgcctaggccgtaggtggagcacgtgggctggcgttgctcgacccggccgttgagcaggccgtgccaggctgcgcggcccatttggccatctctagtctgtacaatgggtgcggctaaatagttaaaagataaaaaaagtaatactattagtatgctaaaggacaataattagtgagtttaatgtctggaagaattttccaatgtgttagagaatttggattataataatagcactccactattatagtgaggtgaaggtgcatatccaaggcctatatcgatatacagtgtgtgactagaggtgttttgtggtgtcaaggacaggtgatacctctaaggtatcatcccatctgaacgagataccgtcatgtagcattcccctaaacatttgtaaattccacatcgtattccattgaagttattatggtggcaccaatgatttgttatcttggctacgcacgttgtctaacattatgtgattttgtcaaacttccgtgtgtttttaaatcgccatttccattgataccaaattatcaatgttttaggctctatgtgcctatgaggaaaagagaagcacccatccaaatgatttgcgttggcacaaattttaatctatctattgataaaaataaagtaactgggtgtacgaggatgtccatatccaactactatgtctagccaagtgtggtgagtctaacatgcatgtccactccaggaatccccaacggctagtttttttttctgttggatagaagtccaatacaattgggcttagttggatgatttgactaagataagggtctatctgaccaacgtttaaaggccggtcgaactaccagatgaccccaagagtccccaatgaccttttgtaccgccggactaaagtacggtgtgcttagttgggcggtttgactgacaaacatgtcatgaaaagtgtaatagcctcaaataattagttatttgatgtaggctatataagaccatgaattcaagcggtttggctattgctccttatcctagtgccctagtggaggcattacttaagaggcaacctttatgagtctattgtgcatccttgaaattgagcgagccatctgccccttctcatctcctccagtgcataagtacccttagacgtgtgaaccatattgatgatatggaaagtggttattcccttattgatgtacacatcattgtaatatgatacacaatattatattgttgtactttgtgtgaactatatctgatgtacgacatgaattgagttagagctcaattgcacagatcatagaagacactatttttttctaacatggaaatttaaaagttattaaagataatacaatcaaaccgtagcgtttagcacgggcatattactagtctcctccagtgcataagttgcaaccaatgtgcttagtagaaaatagagagattgtttagtcattgtgcatgagattgagccatggtactttgtgagagagtcttggtttactactcttggttgccgacacctagacggtttggtaccagttgtgacctggtgatctctgcaagggagtaatggagaaggtccggtggtttaatgttcaccatcttgagaatggaggaagaacggccactaatgattaaggcttgggtagattacctcggtattggcctcacttgcccatctcttgagtctcgacgagagatttggagtcttgacggttcgagtggtgaagcatcatttgttgatttgatgtactcgacgtatccattttatccatcctttggatgctgaatactactctgtccaaaaaaaaaggcaaactctaactacatatctggacataggattgaactttttttttagacggaggggatatgcatgtaagtcatcaaccagacctccattcaattccaaggcaggtcggcaactcaagatatatgcatgcttactttgaatttgctgttcaactagccaccagaaaccacgggcgaatttcggagagataaacacaatcacaataatacagtgattcgatatttgaaatacttatgcaaacggaatagtccattgagtttactgagaaagaacgacagatttgaaatgacgagacaacaacctccaaatttggccagacttgacaccaactcaagcagagcccggaggatcccggacgagcaccttgcctgccgtgaacccgccgtcgacgacgaggttgtggccggtgatgaacttggcctcgtcggacgccaagaagacggccgccctcgccacgtcttccacctccagcgacgccccttccagctcctgcatctccctcgtcaccatcctcctcacctcctccgcggtcgccgccgggaacgtctcggagaagagacctatcgccatcggcgtcgggactgcgtgcggcgagatggcgttcacccgcacgccgtcgcgcgccagctgcctcgccaccgtccgcaccatgccgacgacggccgccttcgacatggagtacgccggcgccgccatgccgccgagcaccgccgccgtgctggccgtgcagaggatgcaaccggcgcggcggggcgccatgacgcgcgccgcgtgcttgacgcacgccaacatggacctggcgttgacggcc

SEQ ID NO: 20497 - DNA, 18195 bp, Oryza sativa
  unsure (1)..(18195): unsure at all n locations
ctgtacacgaggtcgaggcggccgtgtcgcgccacggcgaggtcgacggccgaggcgacatccttctcgacggtgacgtcgcagtgcgtgtacgacgcggcgtcggcgccgagctcgccggccacggcgcggccgagatcatccttgatatcggcaatgataaccttggcgccattcctgacgaactccttcgccgtggcctcgccgatgccgctcgctgcgccggttatcacggccactttgccatccaactttctggatcttgacgacgaggagaagaatacgtgagcagctatgctcttccccctgcaaaaagtgtacgtgaaacatgcttaaaatcatcaaaatttcacggtttccacgaacgtttcttactggagaagatgctgcgatttttactggagaagatgcgaacctgacaagttttttggctgctgcgttaagcatcatgataatttctgcttcgcttccaggagtcgagagatctcagcagacagcagtctgtagatagggtgtggttaaatagtaagaagattagaaaaaaaagcataaaaacaaatagagtactattagtgtgctaaaggtcaataattagtgggtttaatgtctggaagaaatttccaatttataatagggtttgaattataatacgactccactattatagtgagaggggagagccaaggtccatgtcgatgtacagtgtgttatttaggtgaagttagatggtgttgttttctaatgaagatgaagataaagttacgacacataaaataagaaagccattaacgtttgattaatactcccttcatctacttttgatagttatattttcaaatctgaaaaatttatttttgataggcatatttcaatccaacaacctatcatcttaatgactttctcggatttaatgcatgactcttcattcttccacacaagattggttgcatgggcatcgagaaatgtaaatattaatgaatcgcttgtttacgaggaatgaccagtagcatgtttaaatggatgataagtagaattacttatccttggtctgtgtgtcaagatgaaatatgactatcaaaagttgatggagggagtatcccttaagttttaattattataaaagtaaaaagctaaacttatttgatattttatgtaaattctagatagaaagcttttatatgaaacacaccgtttagcagtgttaatgaaacagaggtcaaatctgtatctaaattagaaacgaataccatgtgttttgtggtgtcaagaacagcagtaaacatttgtaaattccattatggattgatgcttgtacggcatatttgtgaagtgaccccatattcccatggagtaattatggtgacaccaatggtttgtcctcctggctacgcacgactttgacacttttgtccaacttctctgtgttattaaatcaccatttccattggtaccagattatcagtgttttaggctctacatgccaatgatgaaaagtgaagcacccgttcaagcgatttgcattggcgtcaaattttaatctatctattgaaaaaacaaaccagctgaatgtacgaggatcttgtggttagttttctcgagtcctaagaaaaagagaagtgcatatatcctcgcacattcaactggagtgttctttagagtttgggccctatatcctcgagaaaatttgtagattattggacggattgttcatgggttcgatagcccttttaataagctttgcatataatccaaaaacatccaaatccaacactcaagtcattttaagtagttgtttcatagattgtcagtcatgctgaaataagggtttagacttaaaagaggtcgatgtgaccaccaaaagacttcctcagcggctagtttttttttattattattgtaggacataaatgcggtgtgcttagttggatggtttgactggtaaacacgtcgtgaaaagtgctttagactcaaatagttactcccttcgtacaacgaatctagacggagtgttatccagatttgttgtactagaaggggtcacatcccctcttagatcctgtttgattcagcttaggtttattataatctggattactaggagtaagctaaaataaacaagtagattattatgctagattattatactctataaaccagattagtataatccaataatgtaacgccccgacattcattagccattaacacagctaaatcacaccggggtgttatgcattacctgtgatatagtaccagtcccaggatacactagctggtacacacagaataaatgtggaatcaaagtaaactattttattacatcactgggtagtagtccttatataagttgctatcatggacaggcccatagatgagcaacacaacagcacataaaaacataaaaacgacggcgcagaagcgaacagcacggagaactaagcgactacgcactaggcaaagaacctaggcaactaacttattccacaggcgaggcttggggctaggcacgaaacatctagaagtcttcatacttggcttgctcctggagatactcctcggcggtcgggtcgacgtcttcgtcttcaaactctatatattatttataaggggcaagggtgagtacttgacgtactcagcaagccggggaaaagaatggcgtgttggtttaacaaggaggctactgttttatttgcgaaggctgccattttggcaaaatgatttatttcacaaaactcctagtgaatgagtcaagttttagttgtcgggaggaggctcacgcctcaacccattccacaagttgctttgcaacaacttgtcacggttaacgaacaacaaatattttgtttcctcttggttccttctcactttccacaacaacactaatccacacaaaacacctggttatcccagcacaacatcgccatcatcatggccctaacaacacctcagtgtcggacgacaccccaggtcacacagacccgttcctaaccacccaggttagccgtctgccacacaggcggactctggtaacgctcccttttcagtaaccacttttccacaaacctttgtcaaacaaatctacgctatgagaaacaccttacactcgctcttgaccgtgggcacggctgttcgaacagttcattaatctctgcagaggttgcacgctttacccacacgacacgaaacttacaccggtactggccggtaccggaagttcgtgataaggcctttccaaagctaacccatgaaaatcgcatgccacctagttgggctcagatccatagccgagtatcaggcaataacagccgtcatccactcaggaaataccgaggacgcctcctactcctactggtatcacgccacaatagaggcaaaaagacacccatgatgggcaataaatgtgtaacacttcgtctcctcatcctcggcattccacaaccattggcacaccaactcccatgtgataacaatttacttagccagaggcatcccataatacccgtgtggtcgcactataacgtgttcggatggatttcccaaaggaatcggtccttaacgataatacgtagccaaaccacaaaggcatgactccgcatcatcaccactttcacaacacattttatttcacaactcctcggtacaacgtaccggatttttaaacatgtatttggaataacctaagtttcccacacggcaacaacgtaagcatggctaagcgaaactacctcggtaatcgtgtaacgataccggcgcaaacatttgtagagctatcaaaggtatggaaacatcaacctatgtaatataagtgcgactactaggttggtccgtcggacgtataaacaatccgacgcctaacatgttaatcgtgtgaactaagcaatgcacttttcaaacaacatatctttgcaaatataggggcaatgtgatcaaagaggcttgccttgcacagggttggggtcttctccttcgaaagcggcgtccggggcttcttcgaactcgggctcttaacgtgaaaacaaagctaaaaaaaacaaaaggcaataaaacaagctcaaaccagagaaacaatagtgccactgtgtagatctcaattttagaaaaatttaggaacttgaatggggtcaatcggagttacggttgattttctatgaattttcaaaggtaaagggatttttctggaatttcatttattggacggcaagggaatattccgctagagtaacagcaaagagagggggcccacctgtcagcggccaatggaggaaagaaggcgcgggcccggcttgtcagtggcttgagagaggaaagggaggtggggccggcttggcagcagctcaggaggtcttcttcctcctcctgtcgcttgcttgcacggctcggccctgggatggcgacgcaccgcggcgatggggcgcggcgaggcgaccagcggccgagggaggtggcggcggactccggtggggctccggcggcgacggcggcgccgggaggcgaggctcggcttcgtcttcctgctctcgctttgctcggcttgaggcggcaaggtgccgcggcagcggggcgcggctccgcggccggcggccaggagaggcggtggcgacctcgggcggtgctccagcgaggcaccgccggtgacggcggcgctagaaggcgcggcataacggctataggtggcggtacagagagcaaaacgagggagagaaagaggagagagagatgggaatggtgtggggaatttgggagagctcgggctccttttataggcgagcaacgcagtggcgagctggcggtctagacgcggggaatcggaaggtaggcggctagctgctcggccggattcctgggaggaggggtcggcgatgcgacgacatggcgtcatgcaccggtggcgactcgacagcgaaacgacacgaagggacgtgcagagagcgggaacggcggcggaacatgggtgacgcgcggccgacagcggctacggccgggatttggggcggtagggctagagagggttgacgcgagcgacggtggcgacttgacgcgagagagagggagagacgcggctcggcggcttcccgggaggagacggcgacaagacgacgaggcgacggcgaagggacgcgcgtccgcgagagctcgggatgggacggcgctgcgtcagcggtggtggcgacgcgacatggcgatggaacggggatgacgaggggtggcgtcgacgcgacgggcgacgggacggcgaggtgatgcccgcgacatcggatggacggcgacgggacaggggatgacgcatgcggcggcgtggctccgtgtctcctggagagaaaccggagcgcggtcgggcttggcacgacgcggctttggcgcggcgcgggcgtcggtttggtgcgggggaggtgcggcgcggatgttggcacgacgcgcagcgcacgggagagtggctcggtgcaatgcggctcggtcacgatggagaaacagtgcagcgactcggtgagacatttcgtcgaacacttggcgtgcgtgagctggctggcctgaggaaggagataaacagtagtgggccgagttgggccggcctgctccgggagctgaagagaggagggatggaggggagttgggcctgggagagagaagagagaaggaggcccaattcgaacagtgagctttcacaattttccggagatttgtagagtttgaattttggggagaattttgggagggatttgaatttgagtttaacctagggtttcatgggatcttaaaggcaattctaagagaggatttgagatctatttggcacaaaaacaattaagaaccaaattaactccaaatttttaaatgacaagattttaaataaatgaaaataaaaatacaggtgctacaaataatctcctctagaggagctttttccaaattattgagtggctaaagatccactactcctctaataatccagagaaacaaacaacttgcagcttattctatttcagcttattataatccagcttagagtaatttgatttaataatctacactactacaaaaaggtaaataggtgtcgccactataggtgctggcacaccaaaaaccggcaccaataatgccttccccgcccatgcacccacctccacacgccacatattaaaaaaccggcacctttatgtccaaataggtgccggtttttaaataaaaccggcacctaaaacatgtgtcagagaaaggtgccagttctagacccaaaactggcacctttaatcttctgcctcccacactgctgttggtgggccccgcacataggtgccggttttaagacaaaggtgccggttttttaaaaaccgacacctataataaattaaaggtgtcggttttgggtaaaaaaaccgacacctttacagatcgagccgagccggctgagccgaccggcgggccccacaaccatcggataaggtcatctcactcagcctctcctctctcatatcgctctcttctctctctctctccctccctccctcctctctcgcctcgctctcttctctctctctctccctcctctctcgcgcgctgccgcggaggcggaggcagcgacttgacagctggaggggagccctcccctctgccagatccggcgggaggggagacggcggcggcaggagggggaggcggcggcgggaggtagcggcagcagcgggcggcgccgggaggagaggcgacagcggcgggcggcaccctcccctccgccagatctggcggaaggggaggtggtgtcgccgcattggcggccccacggcggaagagtcggcgggggcggtccgatggcccggtggcggcgccctccccttcgccagatctggcgggaggggaggtggcggcggcgggaggtggcgacggtggcttcatcggcagcggtggtggcggcgcctcgtcctctccatccggctcctcatccttctcctctccaatttattcttgatgaatgtgtgttcttgatgaatgtgttcttgatgaatgtgatgttgatgtgtttgattgatgaatttgaggaaattttgggatttggctgtagatgggatcggcttgacggctcaatgcatcgagcctcgagccgatttttttttggctcatgggcacctcaaaggtgccggtttcaaaaccggcaaacagtgccggtttcaaaaccggcaaacagtgccggttgggttaaccgtgccggttggacaccgaaggggggttcccaaccggcatcgtttagagattctgtagtagtgctagattacaataattttaagctgaaacaaacagggccttagattgtcttcttttgagacgaagggagtagttatttggtgtaaactactacctccgtttcaggttataatactttctagcagtgctcacatttatatagatgttaatgaatctaagcacacatatatgtctaaattcattaacatatatatgaatatggacaatgttaaaaagtctggtaatataaacggaggaagtagtatttaagaccatctgttcgagtggtttggctattgctccttaactattgctattgccacaagccactggtgaatttcggagagataaacacaatcacaataatatagtgattggatatttgaatagcacacgcaaacggaataatccattgagtttgctgagaaagaacgaaggatttgaaatgccgagacagcaacctccaaatttggacagacttgtcgatgtacggataagactgagataagcactggacgagctaagctttgcgtgacaatcccgtcaccaattcaagctgagccaggaggatcccggacgagcaccttgcctacagtgaagccgccgtcgacgacgaggttgtggccggtgatgaacttggcctcgtcggacgccaagaagacggccgccctcgccacgtcttccacctccagcgacgccccttccagctcctgcatctccctcgtcaccatcctcctcacctcctccgcggtggccgccgggaacgtctcggcgatgatgcccagcgccatagccgtcgggatggcgtgcggcgagatggtgttcacccgcacgccgtcgcgcgccagctgcctcgccaccgtctgttggaaatcaaagctattcactcactcaatctcacaagaacacaagcacacacacaaaaggactcagaacacagagagtttgcaagtgcgtagcacttctttttgtttttttctcacactgaaactgattacattgatctctatttaaagatgcacatgacctgcttaagcctaaagaaatgcaagaatcctagataacaaactcacccacgtctaacagaatatctcctggtcaatctccgatgcatgcgcccatgcaaacttcgaccgcttcctgctcctgagttgatcccttcgccacatttgcatgcatggctaactaattagctagatgtactctcacctcctggcaacacgatcagccactactgatcactgccaatctctctactcactaagccatgcagcacaaccactaagctagcactcacggcatgcaacacacatacatgtgacttctactcagctactaccatacaaataaacatgctgaaaacaaaacaacaagattatacttctaataccgtctgcaccatgccgacgacggccgccttcgacatggagtacgcgaggggcccgatgttgccgagcaccgccgtggagctcgccgtgcagaggatgcagccggcgcggcgcggcgccatgacgcgcgccgcgtgcttgaggcacgccaccatggacctggcgttgacggccatgacgcggtcgtagtcgtcgaggtcgagcgccgcgagcgtggccggaggtgcgccgccggcgatgccggcgttgctgtacacgacgtcgagacgaccgtggcgcgccacggcgaggtcgacggccgcggcgacatccgcctccaccgtgacgtcgcagtgcgtgtacgacgcggcgtcggcgccgagctcgccggccaccgcgcggccgaggtcgtcctggatatcggcaaggatgaccttggcgccgttcctgacgaactccttcgccgtggcctcgccgatgccgctcgccgcgccggtgatcacggccactttcccatccaactttctggagcttgacgccgacgaggagaaggagcgatcggccaggccggaagagaacatcggacgaacacctctgctcctccccctgtaacgcgtgtacgtatgaaaataaaaagatcaaaatcatcataatttctctagagaatatgaagaagacgatggcaacctgagaagaagttgcccagctgcgttgatcatcctcaacgagtgccaccggcgtcgtgctctcgtgttcactggttcttcgattccaagctcgagtccaaaggtcacagtagagaggggctagttaaatagtttgaaaaaactgggggaaaatggtactctctccatcccataatataagggattttgagttttttcttacactgtttgaccactcgtcttacataaaaaattttgaaattattatttatttttttgacttactttattatccaaaatactttaagcacaacttttcattttttatatttgcacaaattttttgaataagacgagtggtcaaaaaatgcaaacaaaaactcaaaatcctttatattacgggttcttaaaaaaaacccactcctaaatttgaacatggacacaaggttttttttttttacggagagagcatatatgaagggccaaatgaaggacaataattagtgggttttgtgttgcgtaaatttttgaagtacaggagggttggtcttatcgttttagataaggatacggtcttaaaaaaataactttaaccaatatttttaattataatatgtatagaaacgtcaacaaatatatgaatttattgaaatattttttaagattaatttatacatttgacatatttctaagacaaaaagatattagagattagtcaaatatttttaagtttagcatcaagtttatctaaaacgacaaatattatcaatctagaagtaccattggagcatgcacaatgcgatgaagtggtcttagaaagatcagcttggacattaggctccacattggacatgcacgggcccttacgagagcgcttgtggccctacctgcgatgagagcactcggcgcctttcatgtgcgttggtggagccacattttaaacatgaggggaccaactgttggacaataatgtccagaaaaataaaaaccacaatagtagtccaaggttctcagaacttccttttggatatcatattgcccttcgcagaagatgacaaaacatctcaaaatgcttcacaaattataacttactagtaatgtgcccgtgcgtttcaacgagaaatacaattcgtttataatatgtcacttgcatgtatagttgtcggagaacgatttcatctacctttgaggaagaatcgatggacccctttagtacccaaagaccaaagttgtcattttaaaagctgaagagtgtggatcgaggatagaactctctgtcatgaagtacaaccggggattaaagcgataggcataactgatcaaacttgcatttgaagactgcatcgacgatagaactcttcgtcatattcattgatatagccatgctcattgatagtatcagattatcagtgttctgttctaggctctgcgtctgatgagaagaaaagcatccgaaatgatttgtatttatgccaagttttaatgttacggatgtgtttagttggatccaaagtttggattttggttgaaattggagatgatgtgactgaaaagttgtgagtgtatgacaggttgatgtgatgaaaaaggactgaagtttggatccaaactttggatctaaacacagccgtagtacctgttgaaatagcaagaagtacacatccaaccactctggatggaacagaccaacaaccctagtaaaatgacttaaacgaagacatatggactgtttggatacccaccttaatttaccacagtttttataccaaaggtgtggcaagatgcaaattgtgtggctcaaaatttgatggccacacttgtggcaaactttggctaagaaaagggtctatgactagtgggaccaaaagagtaaaagtgtggcatgccaaagttatagaaacaaaccaaacactagccacatttggtcaaactaacataccacaagtgtggcaaaatgtggtactaaccaaacaggcctatagagaaaatgcaggattgtgataagaatgtgtaaaaaacagagaattgtaaaacatagaaaagacatataaatggcagtttgattggactgcagaaaaaatacaggaataagatggagagagactcaaaggataatttttcaagagattaaagcgtgcgctcttgctaagttttcttcaaaatttctataggattatccattacataggattttcaaaggatactatagaatacattcctttgttttgaaaaccttaatgaaaaattttcctatagaattaaaatcttccaaaatcttaatctcaaaaaaaaaatcttccaaaatcaaaggacccttaactcggcatgtacaatatggagattccaacacgagtaatttatggctcgcatgatacaaccgtttttaacactaagattagaattaaaacatcatatattaatgatcggagcaactacaatcgtcgcgttaattgttaaacaatttactaattccaatccaaattataggacttccgtaagaataagaaccacggacatacacatgccgaggtatcaaggttacatttgaaacaaattattgaccaaattgttacctgatatataattctattttagcatttcaattcgaaacgagcacctccaagatgtcaagcaaagctcggtggattccggaggaggtccttgccgaccgtgaagccgccatcgacgacgaggttgtggccggtgacgaacttggcctcgtcggacgccaagaagacggccgccctcgccacgtcctccacctccagcgacgccccttccagctcctgcatgtccctcgtcaccatcctcctcacctcctccgcggtggccgccgggaacgtctcggagatgacgcgcgtcaccagcgccgtcgggatgatgtgcggcgagatggcgttcacgcgcacgccgtcgcgcgccagctgccttgccaccgtccgcaccattccgacgacggccgccttcgagatgcagtacgccggcgccgccaggtcgccgatcagcgccgtggagctcgccgtgcagaggatgcagccggcgcggcgcggggacatgacgcgcgccgcgtgcttgaggcaggccaccatggaccgggcgttgacggccatgacgcggtcgtagtcgtcgaggtcgagcgccgagagcgtgggcggggccgcggcgccggcgatgccggcgttgctgtagacgacgtcgaggcggccgtggcgcgccacggcgaggtcgacggccgcggcgacgtccgcctcgacggtgacgtcgcagtgcgtgtacgacgcggcgtccgcgccgagctcggcggccatggcgcggccaaggtcgtcctggatatcggcgaggatgaccttggcgccattcctgacgaactccttcgccgtggcctcgccgatgccgcccaccgcgccggtgatcacggccactttcccttccaaccttttggagcttgacgccgacgaggagaagaggcgatcggccaagccggaagagaacatcggacgaacacctctgctcctccccctgcaacacgtgtacgtatataaaagaatttaaatccgaacaaaatttaaatttaaattcatcacaatttcacagtttgcacgagcgttttctaccggagaagatgcgaacctgagaattttgttggctgctacgctcatcatcgtgaaatttggttcgcttccaggttcctcggagtatacagactgtagtatgtagagagggattggttgagtagtttataaataaaaaatctgaaaaaagaatggaaaatgtacggattactattattgtgctagaggacaataattaaattattgactttaatctatgaaatagttattaaaacgtgcggttgggggttataataaaggtactattctattagagcaggtacaatacggtggtagatgctgacgataggagtatcatgtcagcgtcgatgattaatcggaggtgaaaaatgtagtgagagagatatggttcaaaatgaattcaacaaaatactcttcaccttcgtggatcagctactgaagcggaagtgctagcctgccttgaaggtctcaggaatgcagctcagtggatccatatgccaatcattctggagttagacaatgctgaggttgccaagctctacagaacgaaatctcattgagatcaaactggctggcaataatcttggagataaaaggtcatgcggtgtctccagcagatgcaagtgcataagataaagagaaaagcgaatagggtgactcacgatcttgctcgaatggcaacgagtactaggtctagtgctgagtggaggcggtgtgctcgagtacaaattctagacttgttaaactaagaatgtaaccctttattcagtcactaataaagctctctctttagtgtaaaaaaaaatcaaaatactcccagatctacctcggacatatacgaaacaatctaaactttggcatcatcaaagagacacggcatgtgccatctcacgtggaaaaagagaaaaaaaaaacacaccacaccccaataattttgtaataagagtccaacaagatggcatcgcgctgctgttgctttgtgtgtgtcatctgtcctaaaatataagatgttttaaacttaaatacaaatattagaaattaataaaattacatggaaagatattgtgattcctttagaagattaggtatatagaaatttaaatggtgaaaggctgcgattagttgaaagagaatgtaggcgaatggtctactcaggacgattctaaccctctattttagctagttttcatagcaattaatatatcacgtaaaaaaaatatatgcaagccaactctacatatagcaactacgaataaaaacgatgagaaatgtggatgaaaggaaagagaagagatgtaattgaataataatttattttaaagaaagcacctattaggtacatatttctatatatgatttttatgacatgtcgagtataaaaactaattgatagtttctggattaagattatccttatttccctattaccaaatctaaacaacaaactggtaatcaatacataaactctgaattattaatcaaataaaacaaagtccacatggaaattaaattttctgattttctaaactcaagcacgcgccacgttgagccgcttcccgacggtgaacccgccgtcgacgacgaggttatgcccggtgacgtacttggcctcgtcggaggcgaggtacaccgccgccctcgcgatgtcctccgcctccagcgtcgcgccctctagctcgttcatgtcctcctcgatgagccgcctcacccgctcggcgtccgcccacgccagcatgtcgccgaacccgcgcatcgccagtggcgtcgcgatgccgagcggcgagatcgcgttcagccgcacgccgtggcgtgccagctcgccggcggcggaccgcaccacacctatgaccgccgccttggagacgttgtacgcgtggggcatctcgccgcccatcatgcccgccacgctggccgtgcagaggatggagccggtgcgtcgtggtgccatcacgcgcgcggcgtgcttgatgccggcgagcaccgcccgggcgttcaccgccatgacgcggtcgaagtcggcgaggtcgagggaggcaaggtgccccacagaggagcttgtgatcccggcgttgttgtacaggatgtcaaggtggccgtggcgcgccacggcaaggtccacggtcgccgcgatctgcgcctcgtcggtgacgtcgcagcgggtgtaggccgagcccgggccgagctcggcagcgacggtgtggccgagatcgtcttgtacgtcggcgatgatgaccttggcgccattgcggatgaactccttggccgtcgcctcgccgatgccgcttgcgccaccggtgatcacggccacctttccagccaacctacaccgaggtaatccgtgtattaattgcaagctcacataagctgagaggaaagaattgtttgatgtggcatttgagttatttcaaagcattcctaggataaatcttggattcttggagcaaatccattggtgagatagtcagaggcagagtagtactactactccatccgtttcatattaccagatgtttgacttttgttttattttttaaaaaatactaacatttgtaatataaaataaacctattatcaaaatatatattcaattttaaatttaatgaatttaatttggtgttgtagaatgtagatgttgctaagttgttttgtaaatttgatcaaatataaagaggtttaattaaaggaaagtcaaatgacatataatataaaatggagggagtactttatatactagatcctcccatcaatgaaaaatatttgacatataatataattcagtcaaacttttctaattctctacgagaaagatattgtcgtaagagtgaagccgttaattatttgagttaagccattaattatttatgattgaaacgagtactaattgataatctcaatggcgtatttgaaacataatattttttaaataaaaatagtttgtttcctttgaattttcataagaaataaaccccatttgaaaggcctaaaaacatagggaacattgttatggatgtgcatatatggagtagacgtgtaaacctttcgggtcttgacacagaggagaaactgttgacgaatccagtcaacatcgtcaaccctgctctgttcttgcccctgccacaaagcacaaataccacgtcatccataaaaatctcgtcttcattccttcctccaccccaaaaacgccgttgacttttttttaaaatgtttgaccgttcatcttattcaaaaatttaagtaattattaattcttttcctattatttgatttattgttaaatatacttttatgtatacatatagttttacatatttcacaaaagtttttgaataagacgaatggttaaacatgttttaaaaagtcaacggcgtcaaacatctagggaaggagggagtattttttcttaatgatccttaccgcctgccactgacttatataccatcaccatcccaaaatagtcgaattattgtaaaacaaatggagtacgtagacttttctacactacaaaggcacttaaaaaatagtattgcgatatttggtgagcgatacatctcatgattaatcgcaatatatgttaactcgacatgataaaggaagagctataggcgttatttggagagcttaaaattttaagaatccgctagttgatagccagcttatgaaaatatggccggaaagctgagtttttaagtttctgttttttaattcattttctaaattctataactacaaattcttagaatttaggtgacaaactatattgtttggaagagccagagattccacgagaaactgtaactgatagaaactctttccgacaggcacataagaagagatagtgtagtgtgtagtgggcagagtccatgaaggtctgcattcgaatgaaccgccgaatacatttagcctcttctcaatacatatgaatatgaaaagcccctcttttcatatccaaattatttctaaaatgaaatacagagtgaggagaaagaatgcacagtacctctgaacgaggtgaatggcgctgtacatcctgccttgctcttcagctgccctcctcaaacctcaagtattcaggtgtggtgtgcttctccttgaccgatcagtggtggctgaggtccttaaaaagggacagacatctccccacgtttctcatgaaggaacagggataagtggcccttatcaatgttggtagtatgggcattgggccctgttctagaaggaattgtttgcttggtggctggcacacacctactggatctatcagcagtggcgtagctagaatttataggtaggatactccacttcaacataaaggagatggagaagagaatttatggtctactttggaggattctaaccctccacttgagctagttttcatagcaattaatacactatcacacgaagaaaaaaatgcaagccaactctacatatagcaactaagaataaaaacgatgagaaatatggatgaaaggagagataaaaacgatgagaaatgtggatgaaagaagagagaagagatgtaattgaataataatttattttaaagaaaacacctattagatacataaatttctatagatgatttttatgacatgtcaagtataaaaactaattgatagtttctggattaagattatccttatttccctattaccaaatctaaacaacaaactggtaatcaatacacaaactctgaattattattccaataaaacaaagtccacatggaagtcaaattttcggattttctgaactcaagcatgcgcgaagttgaggcgcttgccgacggtgaacccgccatcgacgacgaggttatgcccagtgatgtacttggcctcgtcggaggcgaggtacaccgccgccctcgcgatgtcctccgcctccagctttgcgccctccagctcgttcatgtcctcctcgatgacccgcttcaatctctcggcgtccgcccacgccagcacgtcgccgaacccgcgcatcgccagcggcgtcgcgatgccgtgcggcgagatggcgttcagccgcacgccgtggcgcgccagctcgccggcggcggacctcaccacgccgatggctgccgccttggagacgctgtacgcgtgggggacatcgctgccgatcacgcccgccacgctggccgtgcagaggatggagccggcgcgccgtggcgccatcacgcgcgccgcgtgcttgatgccggcgagcaccgcccgggcgttcaccgccatgacgcggtcgaagtcggcgaggtctanggaggcgaggggccccacgtaggagcacgtgaccccggcgttgttgtgcaggacgtcgaggcggccgtggcacgccacg

SEQ ID NO: 20498 - DNA, 7945 bp, Oryza sativa
gccataattgccaatattataagtttcctatatttttacagtctatactagtagtccataataaaaagtaatcttggtgagcatgacactgtccaaaagtcacttatttgtggccacagggagtatttattatattagtattgtagataaataataaactaaacggcattatgttatcttctaggtaaaaaaactagcatcaccaacagtttgcactctttgtcaggagattttttttttaccaaccaactcggcacatctcacacatttttgtaagtggacaattttttagtttctttgtaaaaataaatggggcctatatcccgaaattgttttttatagttactgtaggagaagtttttgtggtacaatcttatatatagtagtaaatttcataaaacatcacttattatggtccaagtttcgcaaaaccatatataggaactttgacgtggcacataaccccatgtattatgattctaacatttcacaaaagcacagtaataattattttgactttgatctaccacacttttaaggtctacaagaaaatctcaaatttataagcattttatccattatatatatgtcatatctattttttctattttttctattttgatataggtgtatgacaaaatagttaacattgtggttttatgaaactttagaaccataatacctagggttatgtgccatatgccaacttggactataatagatggggttaatgaaatgtactctatatatagtataggggataagtacatggaaaataaaggggaaaaactctgcatactatgaaattacgagggaagcccatgaggaaaacattggtctagaggaaactgacaattacccccccccccctcctctccatttgaaactatgaaaatatacaaggtctactggtaaaaaatataagatgtgtttgttttccgtaaagtcaatatttaaaattctgaactaataattaaactaaaaatatatgtgtcaagtgctatgcatgtagtatcactatattggtatttgaaaaatatttttatataatattaatttatagttgttgataatatattagaaagaaaatattggcctaagtataatgttggaaaatttgtataaatctattacgtcttatatttccaaatggagtactccctccgacttcatattagttgtcggtgaagcaatgcattgtgtggatgataattcctacgtttgagcatttctgtggaggtttatgacgaatttcaccctgttaattaaactaattaatgagttaatgatattgttgtttgcaatatcaatattgcttccactaccatggtgcataatatgactaggatggtgtctttaaaattaaataagcagccacctaaaatgaaaaataatgtggtaagtgaataaatgaggaaaaagaagaaaatcatgtcttgcatgagacttgatttctgtacaatatccaagacatcatgtaagataagtagcattaaatttaagtatggaatagtgataatgtggagtttatggaaactatttatagtgtcttgtgatgaaatggcctaactaatcagctccattgcaagggcagcatggtgtggtcttctatttaatttaatatgggtaatgtaggaatagttaccctaattaattataacttgatatgtgagattatgataaaaatatcaataaatatgtaaagttctagattcctatgaccatctgcatgacgaccagctggcagctgattaactaacggcagtacgatctatcaacctgaaaccaattaatttttaacgagtttgttaacttatttttcttccttcttagtacgtagtaggagtatatataatatatacaaatagccggtcaattttgatctttcaaattgagaatacgtcctctcgacctatactggtcggcgttcaaacaaaaatccatatgcatatgcatatgcatatgcacacgtaacgcggctatatctagccttcttatattaaggaggttcgtagtatccatctttgtcgatcgagctagagccaacaacgatcagctccattctgcttctgctttatttctaccttgctaattttattaggatagtaattaagcttgcttaattattcgttctaccaggatgttcagatcaacagcgcaacgcctcctcaggtatgagtttgaatgttaattaattagatcaagatatattgaggaagctaatttgatttaaacatgcattttacacaaatctttgtttgctgtcttcgaaattgtaaaatgcatgttttgaaaccaaattgacaatacatatagttttttcatatatttcttcacaaacatagatttgtgttctcgcctatataattatatttgcattgccatttctatttcttagtgtgtatatacatagataacatgataacttgttgtctgtttttgtaatgttaacatgcaagagaaaaaaagtgtatttacgatatgtataatacattaatactttaggtttaaggccagggtataaggctgctagtaccgcgtattcgtatacgtacatgtgatctgaccgcgtattcgtatacgtacagggagacgaagagagtggttggcccaaggatgacgacgatgacgtcgacttcgcctgaaagtctaatcgccggtggattctccacggcggcgagctcccaccagaggttggccggcaaggtggccgtcatcaccggcgccgccagcggcatcggcaaggcgaccgccgcggagttcatcaggaacggcgccaaggtgatcatcaccgacgtcaacgacgacctcggccacgccgcggcggcggagctcggcccggacgccacgtacgcgcgctgcgacgtcgccgacgaggcgcaggtcgccgccgccgtcgacctcgccgtggcgcgccacggccgcctcgacgtcatgcacaacaacgccgccatcccggggaggttcccgcaggacgacatggcgtccgtcgacctcgccgacttcgacgccatgatggcggtgaacgcccgcgcgtcgctcgccggcatcaagcacgccgcgcgcgtcatggcgccccgccgcgccggcgtcatcctctgcacggccagcgccgtcggcgtcctcccgctcccggcggtcgccacgcactccatcaccaaggccaccatcatcgccatcgtgcgcgcagcggcggagcccctggcgcgccacggcctgcgggtgaacgccatctcgccgggcgccgtcaggacgccggtcctgcagggcaaggtgtcggtgatgtcggcgtcgtctcctaccatgagcgacgagctgaagcagatgatcgacgtcgacgcgaacgacatgatgatggggccggaggaggtggccatggcggcggtgtacctcgcctccgacgaggccaggtacgtgaccggccacaacctcgtcgtcgacggcgggtacaccgtgcacaaaggagctgacacaccggcggcgcgttgaacgcagccagacatatctaaaataaatcaacttagtacgaaatatagtatatctagattcgtagtatcaaaatgtgtcataagtttattttagaattgagtaattaagtagctagcatgaggtgtcctccatgcataagtacccaacctcatcattgttggaataaaggatagggtgtgaaaaaattctacgagatcagatttaagtttagacatatttctcaaaacaaccgcgtatgtacatgttttataattaattaattcccatagaaaatatagtggcattaccatttatttgtttatttttcagccgagcgttgaagtggactaattttgttctatgtacttgacctcgaataacgaattgaatgggctagcagctaatcgcgcttgaaaagtagagctttgacaaaaaggaaaaaaaaaacatgaagatccttgtttgagtccttgaacaactctccggtctgacaatcaacttttcagaagtgaaattttcttcttcgagagaaagaggataagtatagacaaatgtctagatcgatgtattttccattctagctacttcggtatactcatttattatcggaagctttgcaatattaactcggaaatagttaataatgcagtataagtttaagggaaagcttagcacttggaagggaaaaaaacaatctcatatggtggaagattagtccttgtaaactatgttagtttaattcttcccatgttatgttctcattctttgaaattccaggggtacttcaagactagacttttaatcacatatcactttttttaaaataatgacaacaacaaatagattaatcaaattacaaacaatatatcgatcaaaagacaaaggtgaactaggtgttgatcagaaccttactatcaagaataggtgtgtttgctaggcaaatgattattccgactggttttgggctcatcaactcaggatatcctagttttgggctagtttaactttattgtgaatgaaagatcaacctttttgtttctggtgtagatatggcaaagggacatatataagattaaggaagtgtcctctcaaagatcaatacctttatggctcgaaagaaacattgctttcaaagatataacaccgtagaatgaaaatgattgctttatttgatcgatgtataaaaataacaaattttcggttcatttgatgtataatgtgatcatgaactctaatgtgtggatccataagaggatataatgggagttaaaaggtgcaactaaaaatcaatttatgtgttttttcatcagaaagtaatcgtaacacacaagataaccttgcaaaaagttttttaaggaagggtgataagcaatattaatagttttagtgcgcaagagacaattcagcaccttttatttgaatgtcaagtagctctttttttttggcaatgtgtcttctttgcctttaaaattcctcctcctcatggggccaaaaatatatttcaaaattggccaatagtaatgcctaggtaaaataaaatggttttattcgagggcatggttttatttgggaccctttgtgttcttttattttatattgaagtgcatatctgaacaggtaaatgatttaagataattattcgactgtataaatgaatcaacaaactacaataaatttgaaaaaccgatttaaaattatattaacgaaatttatgtacataattttttaaaagaaaatatcgtttgtgagcttagaaagcatgcaagtcaatccattcagcagaacctatatcacggtgattcacgcttggtctgttttaattatttcagtccctgacaattagaggatgcttcttattgatctattactgtttcattaatcatagcaggcttcattgattccacacacaaccaccaaacaagatcagctatcaaattaagaaaaaagataataacgccagtttatgtatgtggagatcatttctctcgaaaaatatctgttcagaaattaactgtcgaatttgaccttgccaccatgcatgaggttgtcaaccttcaagaaaattcaaccacttatatttgcaagagtcatgcatgcatcgcgcgtcagggaagcatgcatatttatttctaacaagctcttattcttcttccgtcctataatataagggattttgagtttttcctttcactgtatgaccactcgttttattaaaaaaaatttagaattattatttatttttttgactttatctaaagtattttaagcataactttttgttttttatatttgcacaattttttttgaataagacgagtgatcaaataatgcaaataaaaactcaaaatcccttatattatgggacggagggagtatgtagtagtaacagttatatatgttctctaattaagtcaaatcacgcggtgttagaaaactcgcacgtgataacgtatgactttagggatatgaacaactatatgatcctatttggtggtatctaagatccatgttgaatttatagtttcaaagcttggatcaatttgtacgttaaattgtagtaatttgaaattttagatattttctataaaatacgaacaaaatgaagcgcgggaacaaaaatcatatgagactaagagtaatatgtttagggccaactcaaactcaaagacgcaaaacattaactcagttataaaattgaatacattaaatggtaacgatgcctacatgtacatattgttttgaactttttgatgagggtctcgagatctcatagatcaattttcttctctaagtactacgtaaatactaaggaattgtccaagcctatacatgacagaaccaatctattttataattttatcctgattattatcacagattatatacttaattataggaaaaataaatatggtaagaaataagcataaataatactaccccaatttcaaaatatatgacaccgttgcttttcgcataacatttgaccatttctcttattcaaaaatttagtttaaatatgtacaagtataagttaggcttatatggtttctttgataataaaacaatttataaaatataataatatttttatctttttaaaataagattaatagtcaaatgttatgtgaaaagtcaatggcatcgtacattttgtgatgggtaagtactacctccatattttaatgtatgacgctgttgactttttttcaacgtttgactatccgtcttatttaaaaaaatttatgtaattataatatattttattatgacttgattcatcctgaaatattttttaagcatgacataaatatttttatatttgcacaaaaattttgaataaaacgaatggtcaaacgttggttaaaaagtcaacggcgtcatacattaaaatatgagtgagtactagcttatcacattaaaatagaagcatggatctattaatccgttgtaataattccatggacaggatgaaccaaatatggttggaagaaacgaagaaacatcgtattaaaagattacattgacttttcgattgggggaagcaccaatgtggaagagcgcatgacttcatcgaccatcaatgattcaaattttattgcccataaatattagagtaaaatacaccgccggtccttgaacttgaagcgtggtgtcacttaagtccatgatcttgtaaaatcgacattaaggttcatgaacttgtttaagtgaatcattgcggtctaaagcacatttgaccggattgaccgtcctacatggctgtacagcgtggctgcatatttgctgttagacccctccgtgctcaatccaccctcttcttcccctaaatccttttctttttcttctctttctctcttttttcacggccctgcaggtaagctggccggcgagctcgccccggtcgtcgtcaccgaggtggatcatgcctgcgagcccctcgagctcttgccgccactgtcgggcttgagctcgacaaggtggccgtcaggagctcgacggagaagaaggcaaccgcagtcatggcctggctcggtctcccttcctgccgccccacgcccttgccggagccatccctccaccgccgccgaagagaggggcaccaccggggagaaccacgcctcactgacggccagatccgccggtttcgcttcccgctggtcgtcggcaccggatccgcgccgcgacgcctcgccaccggagtgatggatgtcgagctccgcctagttgccagcgttggatatggcctttttgccagtcgtcggcgccgcatctgaccttaccgccagatccgcggcgcgacaccttgctggcggcgtggagccagggagaagggcggcgacagcactggcgggagcagcagcaacagcagcagcgaggaggatgaacgcgatgtggcggcgcagaggatgagtgacatgaaccagtgcgcgtgccacaggaaggcgaggacattgatgcgatgcccatcgtccgcgcc

SEQ ID NO: 20499 - DNA, 17204 bp, Oryza sativa
ccatcgtccgcgccttcgattcgattagcgtctccgatgacccgaagcacgtcggcgtcgggaagccggatgtggacgtgccgaacgacccaatgtcggtgtcgggactgtcgtggctggcaaggtgcagctggtgatgcagtccatcggcaccgcgatcccaggcgtcggcggcagcttgcaatcataggccaccacgcaggacacggacgcctccactacccttgccttcggcgagccgacgactgggcagtagcaggacaagggggtgacgatctccggcacggtgaagcggcggaaggaggacgtggcacaacgcgtgccgacggtggcggcggcggcggtgccgggcgacatgatggcgaaggtccgggaggcgcccgcaggtgctgaccaaggcgcgggaggccgtcttgtcgctcaccggcgagaaccgcgtctccggagggaaagggaaaggggagagggaaggtggtgaggaggatgagggagagggcagagccgatggcgagcgggtgaagccagcggcggtcgacagcaacagtggagggttggatcggtgtgtaggggcttaagtgcaaatatggggccacgctgtacagccacgtaggacggtcaatccggtcaaatgtgctttggaccacaatgattcacttaaacaagttcatggaccttaatgttgattttacaagatcatggatctaagtgacaccacgcttcaagtttaaggactggcggtgtattttactctaaatattattcatatgaaggtgatcttttaacaggtttagacattacagatgtagcgttggtttccacccttttaaacatgcgttagattcttagagcaggccgcacaatagcagactattagccagctataaatatattttaatgagaaaaagataagagagaagagcagcgggctacagatctatagccagctgtagcacagactccaagacgcaatgtgcgtatgacaggtgggaccatatattaatagtataataagcaactatcgtatgaattggctatcagattggttataaataaattggagctaatagtgggctatactattaaacttgctattaaggggtgtatattcacggatgtgtgagtatggtgatacgtgtctagtggtgtgcgtgcttagttttgaacgactcgtaatagacagtgcgaagctctattgatagagcaggaaaaaaattagaagattacaatcttgtaaggtcgtaaccaggaaaacggaaaaagtatactaccacccacacaccaatagcaccaacacacagcagacccataaaaaggctagcatcgcactggccgctgctaggctaacaacggaacacagttgctcatagactttgacaaactcacttacggagaccaagaccgaaacgagcagccagcaggcatttcctggccttcttaaggaggcttgcatcaagggcattagccaactacgacgactagttcgatcaggtcgattctgctctgcatttttttagcaggatgttcagatcagcagctcttctaaggtactactagtctatatgagtttgatcaagatatatattactatataccaagaattcactatatattttttatactatcatagctaatcatatatgtgtagctgagtactgaataatgggtatggatgatctggtgtcataatagggagacgaagagagtttttggaacaacgagtacttggacagctggtttagtcgtcaatggcttctccacggcgtccagctcgcaccagaggttggccggcaaggtggccgtcatcaccggcggcgccagcggcatcggcaaggcgacggccacggagttcatcaagaacggcgccaaggtcatcatcgccgacatccaggacgacctcggccactcggtggcggcggagctcggcccggacgccgcgtacacgcgctgcgacgtcgccgacgaggcgcaggtcgccgcggccgtgggcctcgccgtgaagcggcacggccgcctcgacgtgttccacaacaacgccggcatcgccggggcgctgccgcaggacgacatggcggccgtggacctcggcgacttcgaccgggtgatggcggtgaacgcccggtcgacgctcgccgccgtcaagcacgccgcgcgcgccatggcgccgcgatgcagcggctgcgtgctctgcacgtcgagcggcgcgggcgtcatccccgtcccggctgtcccggtgtactccgtgtccaaggccaccgtgatcgccatcgtgcgcgcggcggcggagccgatggcgcgccacggcctgcgtgtgaacgccatctcgccgggcgccacgaggacgccgctgctgctgcggcagatcccgctgctctccgagatgtcccctagcctgagcgacggcctgaagacgacggtggagaaggaggtcggcgagggtggcgccgtcgtgctgctcgcgccggaggacatcgcgagggcggcggtgtacctggcctccgacgaggccaggtacgtgaacgggcacaacctcgtcgtcgacgccgggtacaccgtgcacaaaggagcgtgacaggtagacgacgccgatcgagcaggtggcgtgcatgcatcgctgcttggttttcaaagtcgtcgttgttgtaattggaataataaggacgtccgtgacaaaatttaagtatttgaagatgatgatgccgtttgaaactcatatagatgttgataaaaattaagtgttttacgcataattatatagtactaacgtatgattaattaagtttaattattacaaactttgaaaaatatatttatatgatattctagagcaacatccatatacaaagttttcgcacgaaatacaccgtttagtagttcggaaatcgtgccacgaatatctaaatttttatccaacttttattggagaaaagaacgaggtctacatctgaacatctgtgtgttgagatttctggctaaaaattactatattttaggacgaatgtagtattaatttatatgcaaattaaggatcaggatggagtcattattaaaaagaaggatcagcgtggagtggactgcctacttttcctctgtatagtaggtggattaattagtctaagcatgtgagggtgtatagccacgtgcgtatcatttgtttccgagaattaatccatatgtcaacaattcttcatccctggaatgaggcctttggttgttttgttagtctgcatgtatgctgtaagaacttagtaatacatgatcatttacggtaatactccctttgttctataatataagggattttgagtttttacttacaatgtttgaccactcgtcttattcaaaaagtttgtacaaatataaaagacgaaaagttgtgcttaaaatactttggataataaagtaagtcacaaagaaaataaataataattctaaaactttttgaattagacgaagggtcaaacaatataaaagtaaaaactcaaaatttcttatattataaggatggagggagtagaaatgagggtttatgccctttaataaaaaaattgtcaacaattatattatgtcgtatgctattcacatggagtacttcacatgtatgagacctggttttctaggattatttagttctgcggagtgcaacgcaacggtgtttttatttttctcatttctagaagtattctttccaatgagcagtcagacatctgatttgcaaaaaggaggaaattggtacagtacacttagttggtaccaggcattttcagaccacacaggcgttgcctgtctatacagtatcaattgcgcctatggtccagacatgacccaataagactcgggtcgtgccgtgtcgatgcgaaggcatggcttgcctagcatgctcatccttagaacaagtctaatttatccccctcatctctttggccttgtcttatatcgatgtaataagtttattttgcatttgtcatatatttgggccagttagggttatgaactcataatcatggaatcgactcgatcatcagattataagttcattccataccagaccagaccgtacacattcttattatgagcaaggatcgttgggccatgctggaccgacatatcgtgccaaagaataggcccagccacggtcgaacggttagattaagccggcatgaatccgacaacagttcgggcatatcgtgcttggatcgggccaaatctctatgccatggaaaaaaattctctgcggcagtgccgcacaccacagcccgtgcgacaccccgcagaatagcgacgcgtgtttaatctcctgctgcaggccgagccctctttggttggtgtcgagccgagtccatctcttgccgctgcttattggagtcaagctgtccagggcacatgaatagtttgtattaagtctggaagtttttgggttccctatgtaagggtggtgtattgcctctctttttatttctacaatatagaccaaatgattttacatgctgtataaatatgatgtcgtgaacgtgccaacctgatttcaacaccaggtgtgcttttaagttgtcaatgaatacatgtattttttacttgtcaggttgggtatagtgctagaattggtttgtgtgttgcaaactttcaaactttcatgtggttggtattcctatatagctccgcacctatacaattaaaaattttcggagctactactctatcccaacaaaaaagacaaactctagctacgaatctagacaatgtgttcgtagttaggattggactatttttttttgaaacggatggggtactctttaaatgttccgtgatttgttatgtcatcaaaatgtaatttctgagcacctgagatatcttgataaagtttaggtaaatgacttatatattacactagaaaaatctccacgcatatacatataccgaccaccttttaaggaggcttaattgcagtggactcttcaccactccatcagctcagttcgattcagctctgcatttgctacattctgagcaggatgttcagagcattccaactcctcaggtatcatgagcttaatcaaaattggagtatattatataacgggcctaggcttttacaaattatatatatatatatatatatatgacactcatatggggctgtcggtgatatgggaccgggagtatcatgaccagaggcttgaggcagacgcaatcgcccacgtggcctggcaccttcggggacgtcgggcccgagggtgaggtgtccgccctcctcctgatttcccccgaggggggggtcgggttgcgcttgccccggccccgagggccgaggcaccccgaccccttaaggaagtctgcgccacatatatgggataagtgagcacagctgtgctcacctaacagcatttattgcagtctggtcaagcgtgtcacgctgcatgcaacgcagtacagcgcgttcctttatccggtctgtgaccagtcacagaccggtcagatcacgggttaggtggcgactggcggtctgacgcacgccttgccccatcccgtcaagacgaaagcctctaggcactcgtctcaagccggagctagcgtgttatctcttagaaatggcacgttagccctggtcagatttataccaggcttcatcctaaccattacaggcaaggtgttacacgaagaagggcaaacatgcacgttgataagctgacgcgtggtggacaagaatgaccggtctggcactggtcgcgtcatcgacagacagccacggtcccgcgtcatctctgtcttcgggggaggtgggggtaggtgtgggctgtcccatcagaagggctcccggatggaaaccgtaccgatctccgcccattaaagagaaaaagaacagtccagtttggaaagagaaaggtgcatgtggtatccccttgagatataaaaggaggaccttgcccatttagaggggggactttttcccttttggaaggcggaggggaaaggaagttaatcctttgtaacttgtccatacacaaatccacaaaaacacaggagtagggtattacgcttcgcagcggcccgaacctgtatccatcgccgtgtctcgtgtgtcttgcgggcgggtgatctttccacatacagagagagagagagagcttgggattgcaccctaagcccctggtcgaaccggcaaaggggggcttgcgcagtctcccggtgaggggccacgagctccgtcatctggcgcgccaggtagggggctcggcgtgtgttctctgagctctcatactcttccgtgtgcgccaagtttcccttgttcagcctaatggccgagcaagcaaaggcgcacgacttctctccgagtgtgagcggcgacgacggggagccaaacccgcgtcatcgagctcgtactcccccacctcctccgcgccaaagtcctaagcggggggaggcgctcgagagggttgaaaaacccacagcatcaccagtcgcgggtggtgcaggagaacggcgagatggggagcgtcgcctcctcgtctacggcgacggcagcacgccccagggagtgcttcaggctgctggcgcgctcctacgtcacccgcccgtcgtccctgacccggagtctccagcccggcgatggctggacgacgtggccaacttggtcatgacggcacagcagcgcctgggtgctggtggacggtccgccactaccaggacccccggcgccgccaccaccggctctgtgtcatcaaggcggagggcgcggcgagcggcggctgctgcacgccattcggctaccactccctcgtcggcgcctccgactcgggaggatcagcatgaagagccggatgcccgcctcgacatcgagcgccgacgtagtgatcggcgtgctccccgcgcaacggagggtgcctcttcgtccagggtgtcacctcgacatggacgtgaggatcagccctccgtgcccccggttggtggtgttggctgtagagcctttgtggcgagtcttcggaatgtccgttggcccccaaggttccggcccaccatcaccgagaagtatgatgggagcgtcaaccccaccgagtttctccaggtctatacgaccgggatcgaggccgctgggggagacgacagggtcatggcgaatttctttcccatggccctgaagggacaggcgcggggttggctaatgaacctgccacccgcgtcggtccactcctgggaggatctgtgccagcagttcaccatgaactttcaaggcacctatccacgcccaggtgaagaagcggacttgcacgcagtacagcgaggggatgatgaatcccttcgctcgtacattcagcgtttctgccaagtccgcaatactataccttgcatccctgcacacgcggtgatctacgcgttcagggggggtgtgcggcacaaccgcatgctcgaaaagattgcctccaaagagccccagactaccgcagagctttttcagctcgcggaccgagtggctcgtaaggaggaggcctggacctggaacccctccggttccggtgtggcagcttcggccgcccccggatccgccactcagacagggcggcgtgacaggaggaggaagaaaaggtcggtccattccggcgacgagggtcacgtcctcgccgtcaaaggcgctccgcgggccacccgaaaggggaggcctgcgagcgacaaaaagaaagaggcaggtactcccagcagggagcgcccagccagcaagtggtgctccgtccacaacacctccctccacgatctcgcggactgtcgcgcagtcaaaaacttggctgagcgaacgaggaagtgggaggaggacaggaggcaggaacgccgtgagggcaagtccgcggcaattccctccggtaaacggcgaagtgaggccagacagaaggcccccgccgttgacatcgatgacggtgatgatgacctaggtttccaagaacctggggccaccattgccactgtcgacgggggagcgtgtgctcacgtttctcgccggagtttcaaggccatgaggcgagagcttctcgccgcggcccctactcatgaggcgacgcgtcgggcgcggtggtcggaggtggccctcacctttgaccagaccgaccacccaccgtgtgttgcccggggagggcagattgcgatggtggtttcccccaccatctgcaatgtgaagttggggcgtgtcctcatagatggaggagcggctctcaacatcctttcccccgcggcctttgacgctatcaaggccccggggatgatgctccagccgtctcaaccgatcattggtgtgacgccggggcacacatggccgttaggtcacatcgacctgccggtcacctttggtggatcagccaacttccgcacggagcgggtgaacttcgatgtggcggacctcagtctgccctacaacgcggtcctggggaggcccgcgttggtgaagtttatggcggcggtccactacgcttacctccagatgaagatgccgggccctggtggccccatctctgtccgtggcgaccttaaggtcgcgctcgcttgcatggagaagcgcgcggaccacctcgctgctgcgaccaagcccgagggtggtgacgagaggcttggcacctccgcccccaccgccccgaggcagcggattgccacatgcgacgaggtcccggtcaaggaggttgccttgggcgacggcccatccaagaccacacggatcagtggtcttctggatggcaaataggaagacgcgctcgtctccttcctgcgggcaaacgctgacgtcttcgcatggagaccagcggacatgcccggggtccccagggaggtgattgagcaccgtctcgccgtgcggccgggcgcaaggccggtccggcagaaagtgcggcggcaggctccggaacgtcaagccttcatccgcgaggaggtggcgagacttctggaggccggattcatccgtgaagtcatccatccggagtggctggcgaacccggtggtcgttcccaaggcgaacggcaagcttcggatgtgcatcgactacaccgaccttaacaaggcatgtcctaaggatccttaccccctgcctcgcatagatcagatcgtcgactccactgcggggtgcgaccttttgtgttttctagatgcatactctggttaccatcagattcgcatggctagggaggatgaggagaaaactgcgttcattacccccgtaggaacctattgttatacatcaatgcccttcgggttaaagaatgcaggtcctacttttcaacgtactactcgaatttctttgggtagccaaataggacgtaatgttgaggcgtatgtcgatgacttggttgtaaagacgcgcaaccaagagaccttactctcagatctagcggaaacttttgaaaatctccgctccgcccgcataaaactgaaccccgataagtgcgtgtttggtgtgcctgcgggcaagcttctcgggttcttggtctctgcccgaggcattgaggccaaccccgagaagatacgagctatagagcggatgcgcccccccagcaaacttagggatgtgcagtgcgtcactggttgcatggccgccctaagtcgttttatatcgaggctgggagagaaggcgctacccttatttaagctcctcaagcgctcggggccgtttacttggacggaggaagctgaaaatgccctcgcccagttgaaggcgtatctcagctctcctccggttctagtcgccccggagccaaatgagtccctgctactttacttagcagcgaccccccaagtagttagtgcagcgttggtagtggagcgcgatgaggacaatcctcattctacgcacccccactctgtgccgacttggcccgggagcaggcagggaggagaggcccccgagtcgaacggtggcctaaggcccccgacgaccggagtcggccctctgcccgcttgtcagacggtgctgggtgcccccgaccctcaggaaggccccgaggccactgcgggaaggccgcacctaccaccctttgaccccgaggctaaccctgtgctgattcgacccgggagagagcagggagaagaggcccccgagccgaacggaggcctgaggcccctgacgaccggagctggccctttgcccgcttgtctgacgacgccaggagcccccgacccccaggacggccccgaggccactgtgggaaggccgcacctgtcatcttcggaccccgaggtcatcagtgcaggagacgagtgtgccccgagaggccacttggacgaagagcaccccggggatacggcccctagcgaagaggatcggccccgccgaaaggtgcagcggcctgtttactttgttagtgaggccctccgggacgccaaaacccgataccctcaggcccagaagatgctttacgctattctgatggcctcgaggaaactgcgccattatttccaagcgcatcgggtcactgtggttacgtcctaccccctcggccaaatcttgcataatcgagaaggtaccggacgggtggtaaaatgggcaatcgagctttctgagttcgatctgcactttgaaccacgccacgctatcaagagccaagccctcgccgattttgtggcagagtggaccccggctccggagaccgtctcaatccccgaggccagcgcggacccctcacagctgcctcacgccgcccactgggtgatgcaattcgacggttctctgtctcttcagggcgccggtgcaggggtcacgttgacctctccaaacggagacgtcctcagatacttggtccgtctcgactttcgagcgactaataatatggcagagtacgagggactccttgccggactcagagtagcagctggactggggatccgccgcctcttggtgttaggcgactcccagctggtcgttaaccaggtctgtaaggagtaccggtgctccgacccacagatggacgcctacgtacgccaagtgcggcgtatggagcgccattttgatgggatagagcttcggcatgtacccagacgggacaacgtggttgccgacgaactctcaaggctcgcgtcctcgcgagcccaaaccccaccgggcgcctttgaagaaaggcttacccagccgtcggcgcgacccgaccccttaggggaaacggatacgcctgaccggcccccgaggcccgtcggagtccaggcctcgggacccgaaggaagcgcttcaagctcccttagattgattgcgtggatctctgagatccaagcatacctcacagataagactctacctgaggaccgcgaagggagtgaacgcgtccaacgcatttccaaacgctatgtgctggtagaagggaccctctatcggcgcgcggctaacggaatccttctgaagtgcatttctcaggaacaaggcgttgagcttcttgttgacatccatgagggcgagtgcggagcccattccgcctcgcgcaccctggttggcaaggcctttcgtcaaggattttattggccgacagctctcaatgatgcagtcgatctggtccggcgatgcagagcgtgtcagttccacgccaagcaaatccatcagccggcccaggccctgcagatcataccactgtcatggccatttgctgtctgggggcttgatatcctgggaccgttcaaacgggccccgggcgggtttgagtatctgtatgttgcgatcgacaagttcactaagtggcccgaggcttatccggttgtcaagatcgataagcactctgctcttaaattcattaagggcatcacggcccgttttggagtacctaaccgtattattacggataatggcacccaattcactagtgaactcttcggcgactactgcgaagacatgggcatcaagctctgcttcgcctcacctgcccaccccagaagcaatggccaagtggagcgcgccaatgcagaaatcctcaaaggccttaaaaccaagaccttcaatattctcaagaagcacggcgattcatggatcgaggagttgccagcggtgctctgggcaaaccgaaccacaccaagccgagcgaccggggaaacgcctttcttcctcgtctacggcgcagaagcggttctcccattcgagctcaccctgaggtctcctcgggccaccatgtactgcgaggctgatcaagatcagcttcgcagagatgacctcgaccacttagaagagcgaaggcggcgcgcggccctccgagccgcgcgctaccagcagagcttgcggcgctaccatcagcgccacgtccgggcccgatcactctgcgtcgacgacctcgtcctacgccgcgtccaaacgcgtgctggattgagcaaactctcaccaatgtgggagggtccgtatcgagtgatcggtgtcccccggccgggctcggtacggctggccacgggcgacggcacggagctgcctaacccatggaacatcgaacaccttcgtcgcttctacccctgaggagggggggggtcgggtgtcaggttttggctcaggccaaccccgcacccccctcgggtgtgcagggttggccgggggctaccacacatgcattactttcttatttctcttttttcaacatttcaatagaagcagtttcaatttcctaaaggttgtgtctgtgctgttctttccttttgaagaatcttgacttaaaataaggtcactcgtactcaaccttgccctcgggggttcggttcggtcagctaaaatcgccaaacggggcccagaaccgagccgtgccccggggcgtggtgaactccgggggggaatcggcaaaaacccacaatcgggtcacccatacccctcggtcaccacgttcccggcctggccagtctcgacatgtggatctccccaggcactagccccgacccgagccattcgaggactgggacttgggcacgagcccttatttcaagctaaggcgcaaaaggaccatggcacagatacatcctcatcgcgtatgtatagcaaaataaaactaacacaaaaattttttcgtcatttctgattgcagattaagttaatttgtacacaaaagaggcatgaaggccttcgaagaaagaaaaagaaaaaaaattggagattggcgggggcctgggggctcattccaatgcgcccgggtcgctggccccgtcgccaccgtcatcctcgccgctggcgtcgccctcctcgtcggagctgggggcgaacgcgagccgaggggccgacccctcgaagctttggacgatgtggttggcggcatcccggacctgcgcgcgcgcatcgtcctcggtcccgggagggaactcctccagcgccatccatggagagaagttggggtcccgggcctggtaactcgccagcacgagttcgaccgctccccgcgcgaggtccctcgaggatgacttgatggtcttctcaagctcctcggggagttgttcgagaacccaggccatcctgttgaggtgcggagcgaggccttccagattggtggggggcaccgtcgtctggcctttccagaggcccgcttgccgaccggcgcgcttcaggcgagagaccgcatcccaaagcatgtcgggcccaatctcgcccgccaagcgaagggcctcggcctccccggtggaggagtccagcgctcgctgcatatcggcaacggtgtgttcggcagctgcgaggcgggcggctaagtcgctttcgcccgcggccgccccaccgatatgcgccctcgcgtccagctccttttcccgcgcctcgaggtcagcagcccgctgctccagtgcggctctctcggcgcggacgcattcaagattgcggcgcgcctgctcctcctgcgccgcctcgcggagggacaggctgtccgccagccgttgtgtcgcggcctcggattcctcaagagctcgctcccgctcagcaagcgcgtcctcgcggagccggagcgcggactcctcttcggcgcaggcggtctcgtgcgccgccagcgtcgcctcccggatagcggcggcggcctcgcggtccgccaagctggtctccacggcgccggcatgatcttccagcgccatggcacgggcttcaagggcctcttcgcgccgccgggacgccgcttcagcctccgttgctcgctgctctcgggcagcggcggtgtcaaagaccccctgggcggcgtcgagctttttctttagctccgcctcccagctcccgtgttgagggcggagggagtcctgcgcctcaatcatcgcggtggtggcgatgagggcggcctctcgctcctcctccacctctcgggcgatctccgccagcgccgccttgcgtgcttcaagctccgagatgtggcggcggtgagccttacggcccacctccaccatggcgtccaccgagcgccgcccctcctcaatgcgtgcccatgcggcctcgagctccgctcgttctgcgcgcagggcctccacttgggcgctgaacccatctagcaccgcggtgtttgcggcggccaaggcctgcagaatgggctcggcgctcagcggggcgacggaagatgaggagaagagccgccttggagagaaggcgatgcggctcggccccccggaggacgtgctgggctcggggatgtccaccggacccgtttgatcctgggcgtcgcccggggaggtgggcccaggcgatgtgcccgcggcctcgtcgcgagcctccccggaggctgtcgcctgagggttgcccgagggagtgggcccagttgacgcgccagcagcagctgttgcctcagcctggcgagcccgggcggcctccaccttagcggcttcctcagcccgggcggcctcctcccgagcagcttcctccgcttggcgaatccgggcggcctcccgggcggcctcttcagcttcccgaaggcggtctgcggcttcacgccggtcagattctcgcctccgctcctctgcggccgctggatcttcggcctcggactggccgaacttggggtggcgggaggaatgcgacgggacatcgctgaagcagaagaaaaaaccagaagacgaacaaaatgagtaagaaaaaaacttctttttgggagaaagatggttgcaatgagagtgagacgaacctgcgagggggtcggttgaatgaccaccttggaggggaaatcaggtttccccggcatggttccgtctcccccgtcttgcggagccgtttcttcttgcgctccccctcgggctgcgacgtcggcgcggccccctccgggcgccgactgctggcacgcgccgccccgccccctcggggaggagatgggggaggtgttcctcccagcttcctcttcccctgggcgtcggcagggcggctgctccctgagcccccgacgcggggcccagaagcacgaccccctcctggggcagattgttccccccggcggcgctcgcccgcgccgtcgtggcccttaggggctctctcctctgaggccccgacccccatcataatggttagaatggaggcgcggtcgggatcgctgcagagggggaggatctcctgaggaatgcgagacgcctccacgaagctaagattcagcaccctttggaccacgatcttgaagtcctcgggagcccaatcccatctggctccctggtgggtccgcatgtagtcttcaggcccagtgtactcccaggcgctccgggcgcgccgttggagcggcgcaatccggcgacggaggtaatcgccgtacaccatggccccggtgagcccctgggatcgcaggcccgccaggcggtcgaggacggcgtcgtagtcctcccccagatctaccggcgcccgccagctggagacctgcgccgggggctggcttggaagtcggaggcgcgcttcgttggcgaggggggtgtagaaccagtcgctcttccagtcgtcccacttcttgcggaggacgcaggggatgtagcggttcaacaccggcccccgcggctggaagtagcagccgccaaccaccgacggcggtgacaccgactgcacggtgaagaaccaccggaacagctgaagagaggggcgcaccccaatgaacatctcgcacaggtgcgcgaagatggccaatgtcatcaccgcattgggggtgaggtgcgccatctggagatcgtagaactccaggacatccatgaagaaagaagaaaatggcgggaccagcccagccattgcgaaggggaggaagaaaatggaccgccccgggtagtctggtgccgggcgcccctcgcccagcatcactatctcccgaccggtggcgggctccggcatgaagcggcgcggcagtccggcgtgcctctcgctcacgatgcgggaaggcggtagtacactgccgtcgagcagagcagagccccgtgccatggcggtggaggaagagatgattgagaacgagcgcgtgtggcgaaagtagggcgtagcagagaaagagttagagctcaggcggcgaaggcaagaggaacaatggcgaaaggaaggaagcaaatccttttctcgatgcttttatacccttgccatcgctgggcctggctcctcgtttctcgcgcccactacctcgctccctcgtatctcgctatctcgctccctcgtttcccgtgcccacgcttccactaatcccattcgcccgcttacggcgcatgaagtgggtatgcggttgtggcaatcgaaatggattgtatcgtgcgcgcgttaattacgctcgccgaccgaagcggcgttaccgtatctccgggcgagacaaatctgctcacccagattcgcgcgctgctcaagtggtgtggcagtcttgaatagaccgcccattatggacaaccaaagttaccaataccaatgtgcatggattgagaccgttgggtattttgcccaactacggagaccggtcccacctgtcactaggctttaggggtggcgtcacgcctgaccacttcccttgggaagggaaattgctctggcataacgccgggggctactgtcggtgatatgggaccgggagtatcatgaccagaggcttgaggcagacgcaatcgcccacgtggcctggcaccttcggggacgtcgggcccgagggtgaggtgtccgccctcctcctgatttcccccgagggggggtcgggttgcgcttgccccggccccgagggccgaggcaccccgaccccttaaggaagtctgcgccacatacatgggataagtgagcacagctgtgctcacctaacagcatttattgcagtctggtcaagcgtgtcacgctg

SEQ ID NO: 20500 - DNA, 5298 bp, Oryza sativa
gaatatatcgttagcaaaaaatgtactattgttgatagatgcttgcagaatctcatcctcgatcgcactgtcatcatggagggaaaagttacgtgcaatttagtaatttcttacgataagaacctcattttttcagttagcaaacaatttactattgatttaattagtgcacagcgatgatttttgcccttatttacttatggttttttaatatattaattgagtcggtagtaaaatttttactggacgttaaaattactgtttctggaagctttgacagtgcattgtgcgctgtaatttctaaggttattttaaatgttacttttataaaaaaaaatatgggaatgtagggaggtagttatggatcagtggactcccgatccggaaaaaacgcattccatacaatactgaggaggtagtgtgtttattcctcccagtcagcattcaaagtcgagtgaaaaagcttcgctgaagacttgtgtaatgggatctccagtgcatacttccactacctcgccatcgtcccgtttaggtgttgacggtgatcattggggggatcatcatgtgaatgccgggcatccaggcagtccgtcaacaccgtcaggatcccatgaaggtgtggatcgacctccttgtgttcaggcatgtgagatgaatacgcctgagaaggatcgtgtgtacagacatgtaagtttccctgaacgacctttgcaataattagaacttctgtttcttccttaattgctgagtgatgtttgacacggtagttggcgttgttttgcgatttattccatttaattactttagtaaattatggcgtctgtaaatgaatttttttctgtgtcaatatgatatcccatatcgtcatgttgacagattgaaaaataattgttgacaggactccaaacttagagaagaaatggtaccaaaagtagggatggtttttgattcgtacgaagaggcgtacgatttctacgaaagatattcatatcatgctggttttgatattaaaaaaagcaggaataaacctacttttagagagatatgctgcacccgggaggggaagaacaaatataggggagatgaatcaaagcgtgagcggatgcgtgggtctgctaggattggttgtaaggcatatgtgaaggtgaagaatgttattagagaaggcgagtttgtttccgtacggtttgatgatgtcataatcgaacacaatcacccattgacgtcgtctccatcggctgttaagctgatgcgttcgcacaagcatcgagatgaaacactgatggagttcgttgacacgatgcagcaaagccgtgtccccaattcaagtattgtaggagtactttctgatatgcacggaggacgtgagaatattcctttcacgacacgagaccttgaaaataggtattttgtgttaaaacaaatattgttttctaaatcccgttgttcccaacagcagcaagtatagttatctaatctcgctatatgtgcaggaaagctgctaatgttcgagcagagaatgcagatgacattagcaagctgctagagtttttcaaagaatgcatgaaagaaaatccaaagttctactgggattaaaggttgatgaggaagggattgttaagaatgtttttttggagccacgcgagtatgcaagcaatctatggagattttggagatgctattactttcgacaccacatacaatactaacatttatgagatgcctttggccatgtttgttggggctaatcatcacctgcagtcaacactttttgggtgtgcgttgattcgggatgaaagggctgagtcattccaatggctattggaaacgttcaagaattgtatgggggacagcccttcaccccggtgcattctgacaggtatttattgttcactttttgaaaaacaaataaaagggattattgataaatcaacatgactactcatattgtatttgtcgattttgtcagaccaagaccaagcaatggcagtggcggttgaacgcgtttttcctgaagctatccataggttgtgcatgtggcacattatagatgggcactcggaccatctgaacacaattttttctagaaacgatgacatagagggggagatgatggtttgcattaaccagacatatactcctacggagtttgagaatgcatgggatcgtttcattgataaatatgaactacgtgacagcgtgacactacgcaacctgtatgatcttagggaaagatgggttccagcttttttcaagaaacattactgtggtcgtatgacttccacacagaggagtgaaagctttaacagaatggttaaaagtaattttgtagatcatcaaactgcactacataggtttgccagaaggatgctcgatgttgtggtatctaggaaggataaggagtccgcggagacccgaggttgtgaggtaattgcatcttaatgtatatcctttttttaggatttaatctggtaaatgcttatatcgatgatgttatagggtgtacccattgtgaagaccccttggccatttgcggagcagttatctagggtgtacactcgggctgtgttcaaggtgtttgaggattccctacatgatagtgtgtattttaggattgaactagagggatcggatggcattcattgcgttatttctcataccaaacgctcggagaagcatgactggtgccaaagacagttcaaggtgatagtggatgttgataacgggaactttagttgtgaatgcctgcagtgggaacatacaggtaaaatatccctggtgatatagcataaatgttttgaaaacctggttttaaaaatttccgtgtttattttgcaggaatgttctgcccccatctgttgcgagcctttgttcatgcgcaggttgagaaaattccacatatgtatgttcttcgtcgatacacaaagcaagctaaaagtgatgtgaactatgatcgtcgtgaccgtcctatggctggaccagacggtgttaaagaatcctacagaacaaagttgttgtcatatgatgccatgcagatcgtcaagttggggcggaggtcaaaggtagcttttgatagggcaactgctgtgctgaagggactgaggaagcaacttgaagagataccaccagattcagatgttggggttggcaatgcagtgacaagtggtaaagacgcggaaagtgtggccgataccatgcgggctggacaatcgatgtcaatgagtgaacatgattgtgaaagagtgagcagacgccctcctcctcggtcaatgacaaagggaagggcaagcgagcctaccgagaaggtaagctaggggctcgtggcgataagaaatgcaccagggggtgcgggtggtgtggtctgaaagttggtcacaatagctctacatgtcctaataatccagctaatttcaagcgtattgcggaggccaacaacaagggaaaacgtaagagaggtcgcccaagaggaagtggcgttggaggtggtcgtggacggaaagctgtgagaaggaacctgattgacgaatgggctgaagggcctgtgggaggggagtgtagcatgagaagcgaggagggtgatgatgactgtagcgtgcaaagtggtggcgacaccgaggatctttcagaatgaatgtactgaggggtttgtttcgattgggttttctcgagtttcattttgtgctttgtagatgtccttatcatagaaacattacgttaataaaggttttggtatatttatttctatgttgttagatatggcatagcccggattgctgcgtttttttaatttctttactggcactgaatggaattgttttatcgcttagtaaaacaattactcatatattacgagagagttgtgtttttttcaggcaacgatcattatgaaattgaaattccgatcatgtagtgtggaacttaaaaataacagacaagagggtagtaaattgattactatttagttgttctgtctgttagtaataaatatacttataagctggggagattattatttaattaggttaatgaccttggactcccattgagtatgcatttttaattcatggcattgtttgaacgcactttttgaataattactttgcattctaaaattagtcgattagttattagattagcagtatgaaattttattacagaatgttgccatataagaaataacattggtaaagaatttgcatatcggctaacattgcattgaattaatgaaggtggcagcaataagactatctagcattttttatactaactgccttcattactacaatagatcacatttaagcagttttttcaaagattatggagacaaaatattaataagcatagtattatgttctggaaaaacatggacaatagccctttacttaactaacagcacaaccaggcgatgcaaaatactaaagttccggaggagtggactgtataaaatacgaaatacaatccaggggcaaaagtgaagctaacagctaatgaaacgtttcttcatattaaacataattattgggcattgtcgggtacacgaaatgtctcgatgtcctgatggagctcttgtacagagttgaacctgttgaagattaggtggtgtagtatttgcgcccgtagcttgtccgaaggaaccttgcaatgtttaacatttgtcaaactgtgtggcaccaggttggttgggggtagggggtggggtgggggtgggggtggggggtgggtgcgttgtctgtagtatagtgtgtgtgtgtgtgtatatatatatatatatatatatatatatgatcagtgtaattgggcaaaaatcgacttctcctgcaaatttagtcgttagtggcttcttctccgcggcctccgactcccagaggttggccggcaaggtggccgtcatcaccggcggcgccagcggcatcggcaaggggacggccacggagttcatcaagaacggcgccaaggtcatcatcgccgacatccaggacgacctcggccactcggtggcggcggagctcggcccggacgccgcgtacacgcgctgcgacgtcgccgacgaggcgcaggtcgccgcggccgtgggcctcgccgttaagcggcacggccacctcgacgtgttccacaacaacgccggcatcgccgggaggctaccagggcggcgctcgccgccgccgtcaagctagcacgccgcgcgcgccatggcgcctcgccgcacgggcctcattcagaacataagtaggcccgatcaagcatgaggcccaagtagaacccactactctcaaatacatggcattcggcgagcaagga

SEQ ID NO: 20501 - DNA, 1773 bp, Oryza sativa
caaaccatacacctattttacgtcttccagattggagaggatgttgtgcagtatgtgccttgtggccatatttctagattacaggacaataatatcctgactacactgaacccataaatacaaacaaacaaaaaaaccataaccttgtgaccaactgaacatggtgatgtataaactacacaactgacagcgatctgcttagccgcctggaaaaagaactaagcaactttgagtcattgctactttgatgtcaacgaaagagagagagaactaatacaagcaatagtgttgcatgtgtcttacgtgtcaccgccatgtatgaaaattgacgaaaggttcttcggagtaaaagaggcgacaacccatcaaataattaatcgaattcaggacgaattgggttgttggagtttggccggcgcaaagcacattataatattgttgagataaggtgaaagttggactgacgtgtatgtttgcaatcatgacgtgtaagtatgtttgcaattagaaatgtacagtttttcattttctttcagcttttattgtgtacttaaatcccttctattagtataacgtcgagcaacctgtttggccgttccaaaagaaagattagctcaaagtccacagcgagagatgctcagtttcagagcataaatacactctagaatgctgaattgaccattatcggatcaggaggaccttatgatgcagagaacaatgcagctcgttctcaggtttgatcaccttattagagcagagttcatgtctgttcttgattgctcactaagctgtaaagatgatttggttttctgtttgcgttagggtgaagagatcgtcgggtttactacaccaattctccactgcggcgaactcgcagaggttaatttctttcatgattttctgatcattttgtgttcatgtgtgtggatcatggtgatcgattcgatgcaggttggccgggaaggtggccgtcatcaccggcgccgccagcggcatcggcaaggcgtcggcgaaggagttcatcggcaatggcgccaaggttatactcgccgacgtccaggacgacctcggccgcgccgtcgccgccgagctcggccctggcgcgacgtacacgcggtgcgacgtcacggacgaggcgcaggtcgccgcggcggtggacctcgccgtggcgcgccacggggcgctcgacgtgttctacagcaacgccggcgtcctgggctccatcgcgccggcgccgctcgcctccctggacctgggcgagttcgaccgcgtcatggccgtgaacgcccgcgccgccgtcgccgccgccaagcacgcggcgcgcgccatggtgccgcgccggagcgggtgcgtcctcttcacggggagcgtgtcgggcgtggtgggcggcacggggccgacgtcgtacggcgtgtcgaaggcggccgtgctgggcgtggtgcgcgccgtggccggggagctggcgcgccacggcgtgcgggcgaacgccgtctcgccgtgcggcgtcgcgacgccgctgtccatggtgcaggtccttgaggcctaccccgggatgagcttcgaggagctcaagaacgccatggcggcgtccatggagcagatggaagctggcccgttgatcgaccccgaggacgtggcgagggcggccgtcttcctggcgtccgacgaggccaggtacatcaacggccataacctcgtcgtcgacggcggcttcacggtggggaagcgctcaacatccccaaggagtagacagtgatcaagagcagtgcaaca

SEQ ID NO: 20502 - DNA, 1136 bp, Oryza sativa
aattcctgcagcccgtatacaacatcccggtgagcatatgcagtggcagtactctcaaacaggtaggccactgtcttctccatgtctggctcattgtagggccaaggagtgaagctttgcctccacttaggcctaccaaccggtagtcttagccacatccacatctgaatcaatagcacacaaccactcatgacgacaacagacctcacagagctgtctatatgtccacgccaacactgttgagccccaactgaaacggcccagatcaccaaggttggcgacagaagcaatgtcacccccagcatctggaaacagaacccctcccaacaagtgcaagatgtatgcacgggcatagcactcaacacgccatggctcagcatcgtcgtcaagatgtgagaagttctggctcagctaacacaggggtattccattctgcttcttcttgcccccttgcccctgctcaatgttgagtggaatgccaaacagctgctccacttgtgcacgccatccaggattctctgtcctgcccgtcaccgcatgcccccgtaatgggagggctaagatcatagccacatcctgaagagtgatggtcatctcaccactggggaggtggaagctgcgtgtctcaggcctccatctgtccacaagtgctgtcaacgcaggagcgttgaacactagcattcctctgctcacgaccaaggccaccccgagcaacccggccgcccttaggtccgggatgtacctatcgtcaaacactggggggcatgagctctaactcagagcggttgaagtacctgcattagcaattgtaaatcaattagttaatataatgtcaaacacacgctaccgatacttaggtacaagtgaatcgatgccgattcataccctccccgcctcgatcgcagccccgcgatgacgggcctcgtagtactcctccaaggctaggtaagtcggcggttgtctctcctcggccatcctacatgaaaaagtaataaattcaccgttagttaccaacatgacataacttaaaagaaaatgaatgcgagaatccaaaataaataaatagacattaaatagacaagaataaaacatgcattgacttaagtaggaaaacaaaagatttacctccttaacac

SEQ ID NO: 20503 - DNA, 6219 bp, Oryza sativa
  unsure (1)..(6219): unsure at all n locations
cacccctctctgtgacctcatatgtccttttttgcttatcgaaacaccttgaagtgtgtttgttcgccttgcttttttgcaccatcatcttactagcaaccttggcggaccaacgctcccctgactagactcgcttcactgcttcatcatgtctgttcacaaagtaatcattgcacttcatgaaggtaaatgatactatggccgtcactggaagcttatgaacaccaactagcacgctattgaactgttcggccatgttggttgccatgtaaccccaccggcggccatttctatcgtatgcacgagacaacttatctttatccaacaactcatcttcaagccatttacgaggaccttcgggaatacgctatcttagtgtctcaacatccctctcaaatatccacttctcgtcaatctgacatatccttaggagctcttctgtctgatgcttgtccgcaccggccttgtggaaattagcactgaagtgcctcatgcaccatcggtgatgaaccggtggcaatcctggaacaggagtcttcatggcattcattataccagcaagtcgatctgagataatacaaacctccctgtgcagcccaaccacaacccgtcggacaagattgataaaccagcaccagtctcgtgaattctctttctccaccaaggcaaaagctaaaggtacaagttggtcctccgcatcagctgataatgcagtcatcaaggcaccaccgtatttcccagttaggaaggttgcatctatagctagtactggcctgcaatgcttaaaagcctcaatggaaggaccaaagcaccagaatgcacgcataaaatttttcttggtcactccatcaacgttgacaaccctatcaggatgagtatcgatgtggtagaccatactgggatttctctgcttaatggcttgtagcaaagtgggcaaacggacgtacgcttcaccccattctccgtaaatgagcttcatagcctcctctcgtgccctccaagccttgtcatacttcaccctatactagaaaacctcaaatatatacaaagctaacgcagaagctgagagtgtaggttgcaattttatggcattgcataacctatttgctatgaacttagatgtcagctgccgatggctccctgaaccttcggcagtagcacaactatgtgccttaccaacctgtgatatcctccatgtgccactagacctcttagttgcatggaccttccatttgcactgtgggttttcatatttaacagtgtacctcctatttgcggcagaattgacaacacggtatggacgatggtgcacgatggcgtactcctggagccatagcttcaatacgaccatggatgggaactctaaaccctttctgagaccatccacctggaattgttctggcaactgatctaggttgatgccgccatctagtattgcaccatgggcatgtgttaggtccctaaactcaggaatgtctggcttcctcccaaacaccttctcaaacgcacgacattcctctaatgctaacttgtcattgttagttagtggagggaatggacggtcatcatcagagtcttcagcaaattcaacatcatattgctcaacacttgcttcctcgtcaacctcctctctattgacttctactgagacagaatcgtgaccaccactcaattcgacaacaaagtaatcatctggattcacatattggcctgctacttgcgtcgggtattcagggttgccttcgtacgatgaccaatgtacactctccgataaatgttcacttagatcaagcccctcttgtactaactcccttttcatctccctcgctacgtccatatcatcactaccgcaatgtatctttgatggtcctgcctcccctaaatcatttccaaataaaggtctcttcttctctccttccccctctaagtcttctcgtaccaactcagtcttacttgcaccccctccatgacgagaagaatatgtcacaaaattcttctcaacgtaatgataagaaggagatttgtttagatccaaattttctacggtacgtaccaactttgatgcaaacacctctagagatctgaactgagactctttttccaaatcaaagtaaacctcccattccaactgacctatgacatttaatatatacttatgcccttgaccaacatcgtatctcccataaaaacgaatctccacattatcctcggtccatccaagaacttctttcactcgtgaccttagttcatctagagttgggtgggtgggaaacaaaatggtcttcaatgacatatcctcaaactcaacatgtgcaccaacgtagggttccaccactctaccaccgtagtaaacacgaacaagtctatccatctacacaaaaaatcaaatataactttgcaataaaaattaaatcttccttcctaaacgtagtccaaacagacatattataaccaatgcataacttaaattgtcccaaagctagtactccacaaaaaatatttaatccacgtacaaatatcaacaagtttactagtgcattacacatcgaaatattacaaatactccgtcatacaacccaacctagttctaataactataatcaatttctataatgcaaccaaacttgtctccccttcttatagttaatggttaaaagtttaacctataggctatagcatcaagtccatcaaattaaatttactttcatgcctcaaccctaatttttcatgcatccatccaaccaaaccatccaaaaattaacataccacatatatggttcaaaaattcgtgacaccaatgagtacattgcaaacatgtagcactacaacaagctaatcccaagaacaaatgataaaatcacaaatttgggcaaaaaaggggttctagggttaccctccgatctacaaattcaaccaataaaaacgaaaaaaaagaggggggaatggaggagtctacctttctcttcgattttcacaaaaaatcccgcgaaaaacgagttcaaatggagtggatttgaggtggagaggtgagggggagagagagggggagagctgctgctgctctgctcgggctggagatgggtgcgaatgagggtggggagaagaagatggtggggcccacgcaggttaaagggggcagcccacactgaaggggtgcgccagccatgctggcncccctctgtgtggagcggcgccagtgtggctagcgcccccccttcgttccgtcagcacggccacgtaggccctagtgccacggtggcacgagcatggcgccagtgtgactggcgccgccatgttgggggacggcgccagccactctggcgccccaaaaaagatcatttctggtttaagtttttctaggggtccatttgtaaaataagttttcaaaaaggaccaaaatgtaaaaatttcagctttaatttctttaaatgcccttttctttattctaaaataccattttaaattttatttctttaatctatttaaaacccctttttgaattcaatttcctttgatttctaaaccattcatataccatcctttagccactaaatagccgccgtggaactttatgccttctatggggacgctcgtatggtctgacgaccccgacgtcgaactgaaggttgtgaaacccgacatgacctattcctcaggtcgaagtgttgctcttcgcaccccacgcctcaacgcgtacagtggtcggagcctcactactccctcgacctccacaatacgccgcacactagtccttgagctatgtgcgaccctagccgctctactgtcactcacgactgtagagtaacattgttccgctccacataaatctcccaactcactagtcgttgtgatgcttgactgtagcatcgactagacgagccgatatttagccgacatgctacccaatcttagcaccggctaaccaacctagataattagccattatgccttagcatcggctaaccaactccaaatatctagccgtcgtgctgccctactctagcaccgactagaaaccaaatccaccaaataaaccccacctatccaaattatccttccttcgattttattcaacttttagcctatagaaaccatcacctctcttttattttttttaaattaaaaagtttattttaaacccattcctttttcctctcgcatcgctctaattttatttattccttggttttatcgtttctttatagcaatttgcttataggctttatttgctatcttttcgtattcatacgttagactgtacaacaagttttatcagcatccaaggagctgacgtggacccagatggctacgctgaagccgcgggaaaatcttaaggcgcaaggcaagacataactaaaattttgatcatatagaaaacttattataatcttcatatttaatttgatgcataataccttagtcttttaacatctcgtgggtagatgttaaatgcttttaagcatgattacatgatattattgaaagatacatttgagatcattttatgtggtttattattcaaacatctttacaaacttaggaatccggttaaaatgggcatttatgaattgagatggtgaatattatgattatgaacgttgatggatgatgaagttggtgtagggagtttggaaagttttgggtggtttaaccagattataattacccccttattactcctttactttatcattgttttatttattcatatctcttcactaattatttataatatgtcttgctgagtatataagtactcattcttgaataatttaacatatagaggatcgtgctaaccggaagaccagaggatagcgaagtctacggcaacgacgagtttttcttctaggctagtctacactcgagctattgcctgtggagttctttggagtttattagttgtagtttagtaatttagaagtttggatttttcttgtattttcaaataaggatattttagtttggatcttttcaacctttaacagttgtataattagcctgtataaataaatttgtgtaagtaatcgaaagctattctgtatatcaatctatgcgtgatcgaaatcctggacgatcacgagtggattttcggggcaccaagcctaaattgggtgtcccctcagagggagaggcggggaggtggaggcgcggagcgaataggagtcgaaacgagagcagcgtgtgtccctagccggctaaccctaacctctagcaatggacttttttcttgttgagacgtggggtgccaccatagcgctgcccggtgatagtcctccccgccgccacctcgtccgcacccattgccgctcgtctgtgccaggcgccaccccgcgaccgaccgctgcagctcaaccactgctcctctcaaatccaggagccgcctcgcctccgtgaccgccgccgctcatccgcgacccgcctccgcccctcctccactcgcaccgacgagctcctccgcctccatgctcgccgctcactgcgccccagctattgggagccagacggcactaacatccgtgcaaagctgtccatcccatcccacctcagtcccttctaccaaacaaaaaactataaccatcccataccataaactaaacagataactggaatctttccatccaaaaaactaagataggtctaacccatcccacttggtccccaaaccacacacgccaatggatcgaaatggtggcctttcctgacggtggttttcaggggtaattaaaacgcatatacattacagacaggtgagtggttcaatgcgcacacggaacaccaggacctgccctgcatacgggaatatctccacgatcacacaaattatttttttttgaacctttttaatttttaattttaaaactaaaccatttcaaaatttatttttaaaatctgaaccttttagccacgccagcccgcctagcgtgacaaaatactggcacgccacctgcagtgggtgtgataatacacgccagtgactccggcgtggccaaataacgctatcacgccggggtgacaatattgttttgccacgccaggccaaaaggtttatatcttgaaaataaatcttggatgggtttatttttaaaattactagaaaaaatacatgtgcgttgcaacgagtaaaaatgttttgggattgctatacattatactccttgtttgtttttttagttgaatactccttggttttaggctgaaagccccattcatttcttttca

SEQ ID NO: 20504 - DNA, 2449 bp, Oryza sativa
agactaaataggcatggatataaattactaatattttatatatctgcgcggctctatcttgcgatggctggagaaggaaggataatgccaacgtaacttgggcacaggccatctgttgttgaacaagtcgctgaattacttccgtgaaacaaagtgagtaaatatcattgaaccgcttcataattaaaaaacacacatacctgttttggttgtccataatctcaggagagatgtccctacaacaaagacacaaaacagttcagcatccggaaataattaacttatagctttataaaagacaaatgatcacacaagtcacaattgtaaaagaccaagtgatcacataggtctacatataagacatacccttctccatcaaaatagctcaataatttcagaattgtatcccttggtaaatacggagtctctttcctaccgtagaagttcataccaacgaaattaccatgacaatcaatcaggggccctccaatcccagcctagcacaaaaacaaagtagcacgtatgaaaagatattttaaatgccttacacaagaagttccgcagaagcaggggcatttcacactttacaaatctttgtcacactgtaagatagttggttgtttcatttcctagggaacatgtgtcatgcactcatttatttcccaaaccttgcctaaggtgtggccatcttgttagacacccctttggctaggtttggtaaggcatggcaatgtttggtagtgttatattgaattgttcatgttgtaatgcaacaaattgtttcactaagaaaattaaagcctttcttttacaaggaaaaaaacaaaacttcaatttggagattcagtgtaccttactgattctacaagtggagaccttaagttctttgcagtcaagtttgcttggtttgtcagtcaatatcccacttgtggccattaatttggctgacttgaagacgcgtcctacagataatacctccttacgctcaattagccctggatcatgaaattcttccgtacgaagacaacgaaaacctttgatgctgacaatagcaacattgtaatgcagatgataatgttgcaatgtccctacagtttgttgtttgtttggaaggtgtacaacaatctgcagaagtaatgtgaggatttaccggtatctcaaatgaataagctcaaggaggacaatacaataccaaccttcaagttatcattaatcctgttttcatcatcagaaatcctaaccaaacttgctgaagtcagaatccttgtgttggattcatcgcagcctataaatattcctgtgcaagcaaaaatccgttcttcgcctacaagatcataatgaatcatagttagtgatatgatataaaaaagaaatgaaaatgcaatgagattataacaatgcgattaccattgaatgaagcaagagagacaacaacacgagacatgtttgaagcaacttttttggtgagtttactccagatatcatcagcaaattcattttcaaaagtattaaccaaacgcatgcctcctggttaaaaaaaagtagtaccacatatgagagtgctgtaatacaactgtcaaaatgtgcaatacaagggagtaatcaacaacaaactcaccgtcaaggacagctggcaaaggataaccttgggacgttagttccttgattaaaaatttcccaaattctggtaaacaaactgaaatgattaatcatcatgtgttaacaatgacagcaaaattagaaacaatgactcaccatcaccatcagcaactggcaagaaaggggaggccgtctccataaaaaatggatcattctcaattgggttttctagagaaaaaaaggtgtaggcgattaatgaccatgtgttagtaatgatcaataattagtgttgaaacatgatgacaacttttgcatgatatgtcatattagtgacctagcctgattcaccttctgaatcactagaagaagacgactcctgctcattctcaggtttcctactggagttacctaaaatggaaaagatgagaggaatgagcagattggacaaactgaaatccttgggtaaaggacacaatactagattttcatgcagaacatccatgtatgttagtacagacaggtaaaagcataaaatcaatcttgcacaaatgctgacaaacctacaaatgatgaatagtttaaaataaatgataatgatctgcttgacaggcgacatcacagtttagtagtctttaggagtttttgcacacttacgtaactcaaaagagtccgaacatccttccaagccttccaaataggacttggaggttgcaggagattcttgtatctcatttgtgctccttccagttgtgctatcaagtttcttaagctcacccctgcagtataacacagtaaattcatcaagagtagttaccaaagaaaaggtggaatggataagaacaattggggg

SEQ ID NO: 20505 - DNA, 1295 bp, Oryza sativa
ggccattttaaaatttataaatgtactctgtgtggctgtgccaacatttaaaacatgaggcttatagttcagtctgaccattttaaaagttaacactaagtgcagtcctaatttaacttttcttttacaaaaaagtattccatgtgcgctgcataccaaatgtctaagtataaaatagcgatgtataggaaagtagaggctagcgaaacgagaaaccatatagctgacagtaaaaacttaccggtatgtcttgaaattagccatgcattcggtaatagtactccttggcaggaatggtgtccttttcttcgcataaaagttcatgccaacaaagttcccatccaaatcaataagaggccctccaaccccagcctagaaaaaatatatataaagactgctataagcctaccacaaaataaagcgatactagaaaataattatatacgagaaaaatgcaactttaaggcccaaaagataaagttaagtgcatataatgatatatttaaccactgataccacgccaatatgccataattattcatttccgcaacacatgaaagtaaagagagatcagcagggcaccatggtgatttcacacgtggagatcatgagttctttccgataaactccgcttggatcgtcagtcagcaccccactggtggccattaatttgcctgacttgaagcagcgccccacagcaactaccttactgtgagactcaaattgcagctgatgctcaagatttattgctcggagaccagggaagaacttggtttcaataacagcaatattgtattgcaagtcatacttgtataaccacccatgggcaacttgtttttttggaaggtgtacttcaatctgtaataataaatcaagaaaaaggtttacaaattaatagttatatcgcaacatatgcaagtgatagagatgagataaaatagaagaacttacagacacaaatggcatgatcttgctttcatcatcaaaagatctaatcaggctagctgaagtcaggtaacttgtgccaaataaatcagttttgataactacgcctgtgcatgcagaatgcataatatcccctgcaaaaaatcatgatttccatcattaagagtgatggcttgatacaaactttaaaagccaacgtgcataatcaccatcgaatgaagccagcgagacaacactttcagataagtttgacgctactactttactcagttcactccatgctccttgaccagagttcttcaagctgccaaactcctcttcaaaaatgttatcttcatgcaattttccta

SEQ ID NO: 20506 - DNA, 2345 bp, Oryza sativa
tatgttgattttcaggaggagcttcttagtgaaggcctatgggatttcgatagaatgagccgcccttatattcttcaggaaacactggaggtttgtctttcttgttcctaaaacaatgatctatcttttttttttaacaggaaggaaaacagggcaccagcatgacatttctattctgttataggagaagtttgggtccttttggacagtaattgcagctaactttctaaatgagtacaagaaacaacattacgaggtaatgcaatcagttatattctcttttcatgtttgttgaacgtatcacctacttaaaaccgcatggcatgagtagatttagcttaggctttagtacagaagtctccatttcaaaatcagctacgtgcactccttactgcatttttccattacatttcgtcctctaatttcccttgcaatttattgttttgcacgtgtatagttcaaagaggactgcaatacagagaaaaagataattgcaaagcttaagaacagttctgaaaaatcattatggctggagaaagaagacagcattcggcgtggtttgtttgatctactacaggtaattcatatcgagtgcatataatccatgctacaactttctcttaacctatcctgatccttttcaatccacataaaaatattatttgaaattctcaacaaaatatcattgaaatcattagaaataaaacatactgtttattctgcagaatatagtccttattagagatccagaggacagcacaaaattttatccccgcttcaaccaggaggatacttcaagttttaacgatctagatgaacataggtaatattgattttatttaactccaattgtttccttctctatgttcaggtcggacaagaccttgatctgcacttttgcgttttactctgtaaatttacttcaagctagttaatgctgatgaagtatttactttttagtccaacaggttaacagtgcaggatccttgtgatattgaactttgttacatactgctcctttctgtccaaaatttgcttagttctactgctatcgccttactacatactctaataatcgatatttttcactatgcatctctagtaggcatcaagaaaaatgaaactagtatattcagcagcagtttcttcccaagaaaattatgaagtacagtagcacccaacgttttaggtcttgctaatagcactcccttatttatgcaatgagcactaactaaattgttccttgtggagtacgaactatttcatcctctcatgaaaaacattgttttacagcaaaaatatcctcagaagattgtactatgactattattttgctcgccaagagaatctctggcgtcaaaatgcgctcaagactctgcctgtgcttttgaactcatcggatatgttggcatgtggggaagatcttggccttatccctgcctgtgttcaccctgtatgatgttttcctgcacatgctagtaaacagctattgcttgttctatgcacataaatgacagaaatatattatccaggttatgcaagaacttggattgattggattgcgtatccagagaatgcccagtgaaccaaacttggaatttggtattccatctcagtatagctacatgacggtgcgtttcccttctgtttacttgggttcaatatgttcattgctacagatgcacacatacttaggttgtatatggcaaactaaaaatggtttggagaagctattcagtttgatgttcaattttgtgtcatatttttttcaggtttgtgctccgtcatgtcatgattgctccacattacgtgcttggtgggaagaagatggaggaagaagaagccgtttctaccagactgtaattggtagtgatgacgagccgccatctcgctgcaccccagaagtagcgaactttattgttaagcagcattttgatgctccatcaatgtgggcaatcttcccactacaggtatataggttggcttgttaacttatataaaagatcaatacagaataaagtagattaatgtacttggggtgttctatttgtcaggacctgcttgcacttaaagacaagtacaccacaagaccagcaaaagaggaaacaatcaatgacccaactaacccgaagcattattggagattccgtaagtcaattttccaatattattattttccttgcttcatcaaaattaggtattaagagtaaacaaattcaaaaagagaattggctattcttgacataataataccttcatacgagaaaattcccatacaattaattggcataaagcaatatgttcaccatgaaaaagatatgaggcgatcagatgatgtcacattg

SEQ ID NO: 20507 - DNA, 5787 bp, Oryza sativa
ttcatatgctaaagtgacgtctctcaagtcccatataaaatttgcgcattccctgttgtaaatttggcaacccataattgaaggtgtttgtttttccttgcatctaacttctcccctctatttctttaagggctacatgtgacattggattcgctgttggacgataaggacatccaagcaaccatcaaggaacttgtcacaagtagtgggaggtcatttcctggtaaggtggatggcgccgaagaaagcggagagaagctagctaaagtccagttgaatggtaaaccatagaaaattatcccaagaacagccgaagggtatcacggtcaaaagtaaatagaataaggcagcgtactgccaattggcatgccagttcagctggtgttgtttcagctagaattttttttacgccaacttaattccatttaacactggaaataattagtatcattcatcaagtcggcatgtggaataatttatcccctgttctttgctaataaaatctttttctgatgaatcatctgtttgctagtactgaatatctctacctgtgtctactttggtgtttaattcaatctgatttctgccgacgagaaaacttgcttctcttcctgaaccaaaaccctttctttctcggtttcttttggtaatgagcaaaagaatctcaagagaaagaaaaacaatcatgttgcttttgtagttttggttgtaccagatgccaattaatattacattagtagctggcaagctgccctgctcctcaatgtggtcctagatgtgaaggttagcttgggttagggcactctattatattcagcctctgctctcagcttctcaggctcactgaacacttctctctgaaatctgaaaagtttctaacctctgtttgctaattttaaagcaacaatgagaaggctgcaatgaaattcagaaatggacatgctcttgtgccttctggctcagatcacaactggccttctttctgcttactttgtccgaggtgtataattagaaatagctactactttcgtccctaaaagattttattttttagcctatcttatacggggcttttaactatttgccacttttagatttggcaaataactatttgccacccccatctcaatgtcatgtgggtccacatgtgtctatgacatgtaggtccagtgacaaaagttaataagttaattgccacatctaaatgtggcaaatggttaaatatctctatcttatacataccaatacagagaagaagaagaagaaaagaagagagactagaatgccttttatttctcaaattccaaggcatttatttcctactttttcaaactcaaatacattaattgctttaaaaataaagtctctttgaagtctttgtgaaggtaacatttgttatcggtgatagtaatggaaattgatatggtgtcagcaaacattaggcaaattagtgctgaattttgcaagctcagaaagcttgatgctgctcttttctaccacaagcagtgataatgctcacatgtgtgaatcacaaactttatttctgaaaagctcagaaaggacctcaacagctacctctactaggctcattgctggccactaatttagaaagagaaaaaaaagagaaaacaaaaagattctgattgataaaaaaaacccttcccttttctggacaagcaaccactttacaacctcacttagcctttaattaggtcgctttccacaccaaacccagatctgagcaaggattacagtaaaccctagtggtaatttgatagtactatttgcttaattagttagttactgcagttactgaaaaatctttgaccacaggagtttccagtcaacctagtagcttaactaccaggcagcaacgcactaatcaatcagtaaatcactacgtgattaattagtgcatttggcgaggcttccactaaaaaaaaagcaagtctttttcgccatttaatcagcagatggacatggaaagcgagtttcaccttgttgtgtgttggcaccccactacctcacgaagaattcttttttggaaaaataaatcagtttcaattgtcctttttttttgtgatttgtacatttaattatttttttttctaaaaaaacaattcgaggagtataatattcatcagtgaagaatgcacaaattgtttcaactcgagatatagagctgaatatttgacttgaattcgaaattgattggaacgctctaccgaatttcagatagaacaacaaatgttgaaaaattcaatggctgtacaaggaaatataattcgaaaaagaaaaaaaaagaaaaaaacccatacgttttgtgagtttgtgttcatcgatcacaagctcgtcgtcgtcgtcttcttcgtcgagctcgcgttcatggatacccggaggcgaggcaatcctcccagaacttgcggtcctcctcctgcctcgccgccgcgcgcttcgggtcctcctcctcctcctcctctcgccgccgccgcagctcgcgctcgccgccgcgggcagccgccgccgccgccgctagctgcgcccaccagacgccaccctcggcgacgatggcctcctcgccgccgacttcgtcgccgtcgtggcacccgtctccttctacgcagctgctgcatccgtcgtcgtcgtcgtcgtcgtcgtccatctccacgtcgccgccggccgtcggcgcagggcggcacgtgtacgggcacgactcggcgacgctctcgctgtcgctgtcgtcgtcgccgaggacgacgacggcgccggcgcggggtggcggcgggagcgcgaactgcggcggcggcggcggcgggtgtacggtggccatcgtcggcggtggaggagagcagacgggtcgcaatggaagcagttgatatttatagctgaacacctcgcatgcacaactagtagaaatgagtacactatttttacatagaatttgagatcaatttgaaatttgttcatatttctgcctgctgctccaatgctgctactcttttagagctgataaattatgctttggttggttgagttatgacgagtgatagactcagaataaaaattattgagatccaatacatacttaattaccttatttataatataatataaattaactagtatcgaataatttactcggagttatgcgaccctcgtaactactccctccattctaaaatataaggcacaatcacccttaatccaaagaccaagaaataattattatcgtcttgtagtgtgtatcatcctcataaatataatgcatgcatccaatagaattagataatatgagagtggatgatttaaaaaagttataatttaataaagaagatgtcatagttaattgcatgcttacatgcatgccttatactatagaacatttaagaaaagtggttgtgccttatattatggaatgtagggagtactatgcacgaacgccactggctatgaccgataagaaaaacacgtgtaaaaattttaccaataaattatattttctcttataaacaactaagtgaaactacgaggcaaaagtgatttaaaaagctaatgttgtaaataaactataatagaacatctataataacctctagaatggaaaattttaaagttcggatgcggcagataagccaacaaatcatcgataagattataatttgtttttcttcatgcaaatacaaagaagacataaaacgagatgtgaatacgttcgtttaacacattccaatttcactgtaacattttactgctgttaataaagtcatatttttttccttaacttacatatgattactccatatattatcatccagtaattaactaatcgaatcggcaacattcacgcggaaattaatttaaccagtttcatgcctaaaattattgccaagtgcagagcactacgagtccaccattttctagaaacacctcgtttgaccggtattaaggactgctaatttccgaccgagtcttgaatcacctgaaaaaagtcatgccaacgtagtacatattgtacgaccaaatacggctcaatttcggtcaaaaactaaaaattaaggttatttcttttcagattatttgtcatactattaaaacagacagattactcgtttttcgattcgaaaaacacattttcttaagaaattgttcttcaactggattgttattaccatttatttcaagttatatgtttagtttattaatgaaaatatttaatttgtctttgtaactaagtgtataatataatccgtagtactccctccatttatttttacttttgatagttatatttcatcttgtcatacagaccaaggataagtaattctacatatcatccatttaaatatactactagtcattcctcgtaaaaaaacgattcattaatatttacatttctcgatgcccatatagtcaatcttgtgtgcaagaatgaataatcacgcattaaattcgagaaaatcattaagatgataggttgttggtttgaaatatgcctataaaaataatttttccagatttagaaatatagctgtagggagtatcactcaataatctgtttgatactgagtcagatcaagtcatggattagtcgtttctttgagagaatttagtttcaaatgcatatatatgtaattaattagcaggagcagatcgacgcgggggagattaggtggatggaattatggagcagatcatgaacgcatcagtcctggtgggtttctagaaggaacaagttgcattgaggaacacgcggcctttgctgtctgctgctagctttagccgttctagaagctttgaccttggcctctcacccctcttctagaagccaaaatgacgtccattaaaatttcttttcaactttttggctccatgtggttaattggctacagttcaaactcttctccctctaggctagtagtactactagagcgacttcaatcgagatagtacaattttgaagctcctaaaaaaatcccatttaaattatataaatttttaagctcctcgagaaaaaactctcgtttaaattctagtctcgttcctttcttacgaagaagaaaattttacgtcggtttccattatcacgttcttcaaactactaaacaacatgatttgtgcaaaaactttctatacgagagttgctttaaatatcaaatatatcatttttaagtttgtaataattaaaacttaattaatcatgcgctaataactttcttgttttgtgtgcccgtgttttaatatgaatttatctcatatttcttagcacactctaaccgatcctctatttttttttacttctcaccattttgttatattccaactttatcagtggtacattttaaaaatgtgaagacaaacaagtatggagaaaaggatgagagccaatcctacagtcgaggagtggtgaaggaaaattttcacgctgtcacgtcaaatatttagacacatggatgaagtattaaatatagaaaaaaccaattacacatattgcgtgtaaattgtgagacggatcttttaagcctaattacgtcatgatttgataatatagtgctccagtaaatatttgctaatgacggattaattaggcttaataaattcgtctcgcagttttctggcggaatctgtaatttttttattagactacgtttaatactttaaatgtatgtccgtatatccgatgtaacaaccaaaccaaatttttttcaaacaaggccttattgggcaaatggttatggaagaggaaaaaaaacttgaaaatttggttgaagtccgctgggctgcaggaat

SEQ ID NO: 20508 - DNA, 4449 bp, Oryza sativa
tggaatcaaaagccacctacatttcactagcagctagcaagtgtacacacatctataaattgtagtagtaaccaccttagctgaggtgatggccatggcgatgagaagggtggtgctggtggcggcggtgctgtgcgcggtggtcgccatggtcacagcgcaggaggcatccaacgtgcgcgccacgtatcactactatcgccccgcgcagaacaactgggacttaggagccccagccgtgagcgcgtattgtgctacgtgggacgctaacaagccactgtcgtggcgtcagaagtatggctggactgccttttgcgggcccgttggtcctaggggtcaggctgcatgtggcaagtgccttctggtaataattgcctcatctgatttttaatcaagatttttaactatagagatatggtttgtttatcaagaagccataagtaaagtaacaatagagttggtttacaagtaaaatttcagctgaatggcccttcccaacagagttaaccatctgaacatcatgtcatattgttgcaggtgacgaacacggcgacgggggcgcagatcacggcgaggatcgtggaccagtgcgccaatggcggccttgacctggactgggacaccgtcttcaccaagatcgacaccgacggccagggctaccagaagggccacctcatcgtcaactacaagttcgtcgactgcggcgacaactgattaagctatagctgccttagctaattaattactctccattattacatgctaataaggttgctgctgcatatacattattgtcgacagggcagagtagagtggtaaactctgcctgatgaataaattaagcagctgataaataattgtgatatgttgatcgatctgctcaagatctttgtatacatattcacaggaagtatcaattaatagatttctctcgagtataatggactctgtggatggaggtcaggctgaaaatgatcaaacaattcttaaaaaaatcaatggcgtcatatattaaaaaacagaggtagtatgacactgtaatggtccgtataccttatatcagtatatatgatgtagtgatattatctaaaaggtctataaaaattcctggaaatggataatctgcgactactaggttctaaaattcctcctgaaatgttctacgagttaggtcgaatgcatccatttttctgcctctttttgtccaagtgttcggacttgctgactccagacaaaagaaacgcaccgacccattggttggcagtatgcatgaaaattgtggaatgcagtgccatttctcgcttgaaagaatactgcactttggatgcgtgtggtctagtggttaaggtttgcattgcgtctatttgtccgatctagtatgccatcagtactttaaatataagaaaatctcggttatttaatagagtttaaggttgagatgaagttggtttgatgtactttagagtttattactgatttgaaaatgtaacgtctagccatgcatgcaagtaacactgagtaatagatacagtagttggataaaaaataatccaacaaactcccttatattcgtgaagaaatgaagaagtctaatcctcatatttaaattgtggaaggatggagtcatatatatacttccatatcccgggatccacctatcaatgagataataagtgacaaatgaatttaggttttatttataatgaaaattggttatatttatagcctctgtcactaggcacatcgcaccgggctcatagattttttttaaaaaaaaaactgagcgattgcttcatttgaaatttggaatgagcgagcctcaatccctgacacatcaatcacatgaagtgcatttgcgtaaacggaaagctgttaattttatcgacttcgcgtaaacggaaagctgttataatttgaccgacttcgcgtaaacgttaagctcttatcctgacgtcacactatagttctgactactccctctgtccctccgtcccataatataagagattttgaatttttgtctacactctttgatcactcgtcttattcaaaaaaatttagaattattatttattttttctgtgacttgctttattatctaaaatactttaagcacaacttttcgttttttatatttgcacaaattttttgaataagacgagtgatcaaacagtgcaagcaaaaactcaaaattccttatattataggacggagggagtattagacacgttgtaacaatctgttgcgtggattgttttgcttttacttgacatcaaacttatttatgtgagaagggatttttttttaccaaccaatatatgcatcttttttaaaatggaaactaaacccctcaaacaacctaaaataaaactaaaccatatgaaattcgctcatataaatatttgaactcagaattttaggatgctactcaggtcacgacaaccgctaacaacatatcatttagctaatgacatcaaacttgttgacttaaatatagatggtagacaatataccgtcaacacgtgacttggtggatcttaaaatatgtcggtccataattcaaaagtgcttatagagacagaatatgcatatgtacgttcctatataagtgagtgtgtatgtatatatataagtacctacacctatctttcgtttaaaataaatagataactatttccccttaacttaatcgtcggcgaagagctattttcgctagcgggttttaacccccatctctccttacaattttgcaaacgaagggcgtatgtcaccgccagcagaaaaaaacaatgtgtattaaaaattatttttctagtagcagtagaaagatctgcatgcttctcactccaacagtccaactcgaaagccaatcactgcagcagtcaaccaattcccgagaacttcactggaattaagacatccatgagacgtacatgtccattcgtgatcgtgtcggttcttcctcccgtcaaacacgacttgacctgcaataatttcaactaagctggatagctagtacacatattgcatccaccgtttgctattcatcagccgcgcgcagtccaattttaaagtttcaaatttatcgtagtttattttttaatattaattttatataaaaaagcatatataaaagtttttgtttataaattattttttaagtcgttaataaatactccctccttccctaaatgtttgacacctttgacttttttaaacatgtttgaccgttcgttttattcaaaaacttttgtgatatgtgtaaaactatatgtatacataaaagtatatttaacaataaatcaaatgatagaaaaagaattaataattacttaaattttttgaataagacgaacggtcaaacatttttaaaaaagtcaacggtgtcaaacattttgggatgaaggtagtattatgtcttataatcaactggtagtcgaaacggtaggttgtttcagtttctaactatgaacctctaaacataaacaatacttgtcaaagtgtatggaaataaaattttagtttggaacgaaggtagtagttacttgtatgcataacaatgcttactcatccgtccccatcacgtgaaaaaaaatcttttcttcacataaaaaagaaaaactcatccatccccaatctatatcatatctatcacatacagtcatacagatatgcagcaatgcaagctcagctagtcagctctcacagacaagtcgaaacttctatcacagatttctggtcgatggatcgagttagcctaacttctccgattgtacaagagatatgcatttgttcgcccaaaattgcggctgaatttgtatgcaatcagtgaatatatatccacgcaatttgtcaacttgaacacacaattggttttccttggatacatgtgtggaaatttcaccgaagttgattttcagaagcaagtgaaagagtcagccatgacttagacgcgtttacctccttctggctctatttaagcttgtggaatcgaagcaacctccatttcactagcatctagcaagtgcacaacacatctataaatcgtagtaaccaccttaggtgagatgatggtcatggcgatgatgagaagggtggtgatggtggtggcggtgctgtgtgcggtagcaactatggccatggcacaagaggcgtccaacgtgcgtgccacgtaccactactaccgtccggcggaaaacaattgggatttgggggccccggccgttagcgcgtactgtgccacgtgggatgctgacaagccgcttgaatggcgccagaagtatggatggaccgccttctgtgggcccgttggtcccactggtcaggatgcatgtggcaaatgtctctcggtaagaatgttttttttctttcttgcgttgagaaatgtaatacatattagatatcgagacaagcttataactttgaccattgtttttttttaaagtatat

SEQ ID NO: 20509 - DNA, 9379 bp, Oryza sativa
cactacaaaattagcaccttatgaaagtattttcaaataaaacttatgatgataaaatccaacttgtaaaactagttttacgatataatctacttagtatccccctcttacataacttacaccgattttaactacacgtcgtttcttaaaagatatttgctctggtccaacaaaaagtatttcaagataccagtatctcatggtaccaagatccaacgatcggaaacgatttggtaccatgaggtaccggtacctcgaggtacttttcgttggaccgtagcaaatctcttcttaaaaatctataaaaaaaattaaacgatatcgtattatcaaattaatttgcatgcaagtataattatactactcgcattcataaaaatatataatttaaaagttgtattggttaaaagtaaaatcacattggtcaatgaccaatgatgtcaagtaaaagggaaggctgagggtacaatcgaagggagtaattaaatgatgatatataacaaacttatctgtgacaggagagagtaaacaataaaattacacatgatcccccaagatatatgaccatggagtgtgtgtaatatttgcaggtgacgaacacggcgacaggggatcagatcacggcgaggatcgtggaccagtgcgccaatggggggctggatttagactgggacaccgtcttctccaagatcgacagcgacggtcaaggctaccagaatggccacctcatcgtcgactaccagttcgtcgactgcggcgataactagcagctaattaaccactcttataaacttccctacatatatatacacatttcggacagaggagtaattaatatatctctgcctgatgaatgaataaagtggctggtgaataattgtgatgctaggctgctgtagatcgatccgtttacacatgctcgaagtatcaataaaattgtgtggaaatgtgatggatttctgtggctaaaagcctaaaaagaggtgtcaggtttggcaagtttggcagaacggttcactagtttcgggtcaacgaatctgaggtcccgttcgaatcttatcaagatgaattaaaatcgggcacgcaacacgagcaagttattagcgcgtgattaattaagttataattattacaaacttaaaaattgaatatatttgatattttaaagcaatattcatatagaaagtttttgcacaaaatatgttgttttgtagtttgaaaagcgtgttaacgaaaacggagataaaatatttatctttatgagaaaagaatgggcctcagtgttaatttcgtaattttgtggctccgttccttttttggggcgattgcaaatttaccactactttaaatcgttattgcaaaactgccattagaaaattgtaaaaaatgacaatagaattgttattagtggcatccttgcaatattaaaaaaaggaaaattggaaccatgctattataattttgtaaaatttgagatatgccatcctgactcatatgtcattgactcatgtgagttctacatgtcattaagataccgatggcatatctcaaactttacaaaattataatggcatggttccaatttacccttaaaaaaccggtggcaaatttataaatttcttttttctgctctgtttgtggaagttttacggtctctgttttgatgtgtgactgttttgacttagctccaatttctgctgtagactctattttctgactattttgtctaagtgttcggcttgctgactccagacaaaagaaaggtcaaaaccctgtttagatgggactaaaattttttaggccctattacatcagatgcttggatattaattataaatattaaacatagactattaataaaactcattctataatcctggactaattcgcgagacgaatctattgagcctaattaattcatgattagcctatgtgatgctacagtaaacatacgataattatggattaattatgcttaaaaaatttgtcacgcgaattagctctcatttatgtaattagttttataagtagtctatgtttaatactccaaattcatccgatatgacagggactaaagtttagtccctggatacaaacaccacctaaatcggacgcaccgacccatcatgggtggttacaagattcatggaatgcaaattggagaatgcaatggcataactagcttcaaatactactaaacactactgcaattcttataagattaagaggaaaacgtgcacacacacgtgtcaccgtactcacacactcgtaaatatgttcttaaggcgtttagagggacatagactagaggtaaattctgatcttgatgggataaccaaatagctggtccagctgaaagaccaaatgtgcattccaaccgctataaatcaattgaactaggtgtttttttttgtagaactcggaaaaaaaaacagaaggtgatttcccattagcacagaggttctcatgtctcatccaccaggctatgctacttgttgcaacacataccgctttgaactggccatttaaccggtccaaccggccaaccagtgaactgagtttccatcaccggtccggttataataaataattttggttatacacttatgactctatgatcatattgcacatgtcttttacaattatggatgaatggtcgcgtagtcaaggttttcgtctcccataataaattacttggattgcgtatctcaagagcccacctgacattaagataataagtgatgaacaaaattggtttcttctaataatgaaaaagaatatacatgcctagggatggcaatttgaccagtttgtcagtttacccgtgggtaaaaactctaatagagttgggtctgttatccatttagtacccatgggtttcttattgggtcaaaacctgtacctgacgggtaaatgggcacgggcatgagtagcccgcttcgcccgtttacccatgaaaaccaactaatatgtgggccctcagtcaacttagtataaaatccaccatctagtattctagggttttcttccttcccttctcctttcctccatagccgccactccagggctctctccaggtcgccaggggcaagggcggcgccaggctgacacgagagggggacgtgaatcgccaccacctcccacctccggtcgtcgccggcggccccaccctctagctggcaactttcacagccgccacgggagggttaaccaagcaagctgtgaccgtcgccgcatcctacccaggctgcgtcgagctcccacctctagtcgtcgccggcggccccaccctctagctggcaactttcacagccgccacgggagggtcaaccaagcaagctgcgatcgtcgccgcatcctacccaggctgcgccgagctcccacctccgattgtcgacgtcctctagctgtcggttgcctccttcatccgcttgcttggccgcctcccacctccggtcaccgccgcctcctacctccactgcgctgagctcccccttcggccgttgaactgtgacgggtaaacgacatgcccacgggcacatggcacccgcgggcgacggtcatggacagtatttctttcctgtcatgtagcgggtatacccgcggacatgaattacctcgtgggcaagggcatgagtagtgcccgtcgtgcccagctgccatgacatatttggatttttttttagataatggaatataacatgccatatttggatgggcctcaattcccacccatgcttgtttacaatttacaaaccaacatcttagctccaaataaaattgacactaataacactatcttcgtaacagagagtttagtttcacgggcggagaataataataatactctgtcaactgtaaagaatttatataggagtactctggaggtaaaaggggcaaaaaaaaaagaaaaataatcatgcttgtccgagcaacaactatggtacactatttcggaatgcataaatataccatgggtgactgaaattctaaaattttcaattgaagagcttcaaagatttcaacgaattccgctaagtttgcaaaatcaaatagaatttgaaagtttcggctggtaaaatatcctaccgggaccctccaataaaccctgaaattttgcgagttttgggaatttagttcctgtcaacagctgccagtgccacacccttcccttacctctgaaacataggaaattttgcaggatttccatgagaatttttagtggccaccacatataaagcgaagcaaaagtcacatggagcctgattttttcccccataatccgtcaaaattccaagcactttgtacttttttgctgctggaattccagggcacagcacatcgatctggcccttgggcgattgacaattttgcgccacatagcagcagcagataaggttttggaacggctgctacacgtacgaaccaaaaggatgaccaagaaggagaatttgaagatttttttatagtattaattatgattgttgatcgaattcgtcaatggcaaaatcggcctggctctggctggctggctgctaattcattccagaaggtagccaggaatttggaggtaggactagcatttacatgaattttcttgaactgaagaacaatcatatcttgaggtcaatattgaagcacaagttaattaggacttcaatttaccaacttatgtgcgttctagctctatttaccaactccttgcctgtaaaggtttggagattatttggaataattaataggagtattgcttgtgttgatgtgtgtaattaacagatacttgtaatattaattctggtgtttggaacatgcgcttattgctaatgtgctacttacattcttttttttttcttactacccagtgctaaaagagtattacacgttaggtgtgtaccagtgcttcccaattactaatatacaggggaagagaagaagaaatgaagagtatatatgcttctcacttgcaaccatggaatggaattaagacacaaattcttcatgccggaaaattccacaatgcacggctctcacacccctatatatatggtcccaaagtttggtgcatactcccatctgcaacagagaaagattgtgccacagtacaaactacctcattctccatcaggtgcacaatagaagaaactaaggtaagcactacattggcacccattcacccaagatccctatttctctcttccaaatcttcctctagcatgaagataagattgtacttatgataacgaattatctttttatttatacacatgaatatttagattctcaaagtgatggcggggatcaccggatctcgagcactcatggtggtggcgctcctctgcgctgccgcggccatgactgctgcacaagaagcatccaacgtgcgagccacgtatcattattacaacccacaacagaacaactgggacctgaacaaagtgagcgcatattgtgccacatgggatgccaacaaaccgttgtcttggcgccagaagtatggatggaccgccttctgtggacctgctggtcctaggggccgagactcgtgtggcaagtgtatccaggtattaaaattttcttcacattgacaaccgatttgtacttcaacattaaactgagtcgcttaaggatggtgtgctaaatttgtaggtgaagaaccggggaacaggtgcgacaataattgcgaggattgttgaccaatgcagcaatggtgggttggatctggactacgagaccatcttcaagaagatcgacacagatggtcgtggctaccagatgggtcacctccaggtcgattacaagttcgtcaattgttgatttggtcatgcctctttgcatgatcatatactggaataagaaatatatggtgttatacaataagatggaagaggttggcactctgtaatcatgctgaataatgaataaacgaaattacagttcaacaaagattgtttcatatccttaaatttccatccccctgccctgttatttcatattttcgcactattgcgaaggccaagcgccagcatgtgaaatttcaatttatcgtggaattgatgcaacccacgaacaaacatatacacacactttaatgccccaagtttaagggctcgttcggtttagctaaaattggatgatggattatggattacggaggagatcaggtcctgttctaaacagatgatggactctaggtttatgataattattcaatggcacatacgaatgaattaaatcttgaaaagttgaaatgttgctttaaaaaaggtattatcagaaatgtagatgaagtaggttaattcagaaaaatcatatcgtttacaagcttgggaaggttgtgcgggataatccataattcatcacctatagcaaatgcacattaggtttttcaattaggcttccaaaaaatgcggtctccctaaactttttcaatcatcaattcatcataccttaggtttttttttcaaaatattgattatctttatatcctataatatttaattaaaccctataagagagataattcatcatccaccatttaatctgtttcatcacaagttttaggtccgttccaactaaaccttgtgacctaggaaatcaataagataatcctcacgtttgtgtccaaatagatatgcgtttatgtccaattagacatgcgtcgagttcatgccttcatggtgatttatcgtaagaactagtgatgttgagtgggcacacggacaaatacaaattgaccgactctaatttaactaaaatatatatcatcacattataaactagcaacaataatgtacatttttggatgcgaaataggacccccacgcactcgcatcctagtgaggatgaatcatttcagctttcgaaacataaacaaaaatgatgggcgagtaccatatggtcaggaagcacatgaggtcgtctgtcatacgaccagcaggagatatctgaatatctgaaagtcacggcgacagatcagagagcaatttcatagccgccattgctacccatccagagtccagagacgtacgtaacatatttttggcatataaaagtttcatgcaaagaccatagatatggcacatcttaaacacatacctgcatcgacccccagatatgtgcatatctgacattttctttcttcgtgctaagatggattctctgctgtccaaaaccaacaactcaaattggtttcttcagacagttcattgcatgcgtcggctatgacgaccagggctgtttcatgatttcatccagtgacacgcaaaaatgaggcgctgttgtgctggacatctttgatcggataacctgaattgagtcatgacggttgcttggggtcttggaatttggcttggaaagtcatatgatcatatcagcttggatggttgtggatctgcacttctgcagtacaggggttagagcaagaactgcagaagaaagaaatggctggccatatctgctgctcactctgaaactgcaaatagaaccattgtgtgtatctcctgacaacttctctaatgttttatttgggcctgaaatatctgataagagttcagacattcaacccacatggtaacacaagtcaaaatgataatgaatttaatatccatggaaaaataaaattagtctttggtatgaaaattatcccgtctcaatctggttaacaggcaaaagaggtgaataatttgctgttggaaatgtcagagagctgcttgtcaaaaacttcaatattattagtaaggccatagccggttttatttaaccatgccttttcttccttttgcacattttttttaacaagtggctaacaatgtgcgggtacaactgagtatagaacaagatgcttgctaaatctacaaaaagaatgaataagattagcttactacgtacgtattgcaaaaaccgtgtattcatgggccattgtgtgaatcttctagcttctactgcttctacatgtgaatgttgcactgctgcaagtatgggttgtcatagtcaaggaaattgttccaataatctctgtacttgggaatggagatctccagccagggtttgagttttccgctgtagtggatcacggcggccctctcaattgcatctcttcctatgcttctgtcatgaccaagcccaagaacatgccaccggtggtcaagaggcactgtttgattgtagaagacaatctggcccagtggcaagctccctgctttccatagtctccgccttttgccctgcaaattggcaattgagatgttgagaaacaatgttcacatagaatgctttctgtaaaagcttatggttctcttattaagaaaaaacttctggttactccatatagttacagtaagctagatcttctacacagaaaatgaatgtatattttggttcatacaaccagtttctacagtagagttgattttggaccatcttgaacagaaaataattgtgtgcttttgcatctcaaccagcattttaatagtcaaactgaaaattatatattttcgagaacctgatgccagtacccatgtgctccacaatgtataagctcccatacagtttagcattgccaatggacagtttaaactactggagtgaaaattcatgcttaaaatatcattaaaatatgcaatcaatgaaaacattgggtcagattagtgcgacaggaatgtacacttacagcttgaaaccacttattataagcagtagtcagcccctgcctgcgccattccttaaggtcaaagatgttcatcccaaatgcatgtatgcaagcctttgcatcaaatttgttgatgatacttggatcagagaaattaacaaggttctccaaccgatgataaccatcaccagaagtgcacgtctcaacagcaccatttactttaccattcaaatctatctgccataatccactcaagtctctttggactacaatgtcatggtccaagagtacaagtttgttcagagaagggaatacttctggcaaataaaagcgcaagtggttaagcgcagaagtgtatcttggatctcggatgcccttctgcttaaatctgaaactgaaatcagctggcagccatttcaaattatctaagctcttgatttgaattgtggctggatttggtgggtttgtcagaaaccacatcatcattgcaggaaaattcagtgcatcagtcacaatatgaaacattatccttttgggatcctgccaaacaaaataactaaaatcaaacacaaatttcaaggcatgaataaaacgcaagaaccgttatacaagataattcctagtgcaatccttgttagccatatgattatatgtgctgcatgttcatcgatcataccacaggaataaacgaattcattgaagaaaaaaaatccatcacaagcaagccttgtg

SEQ ID NO: 20510 - DNA, 2857 bp, Oryza sativa
cgtagatcttcgctgtagtttcacggaaggtgctgattagctctgcaagtctcctctgcttgacatcatcggggacatcatccacataattccgatgagcatgagtcttttctctcatgctatatgcaaacatgtaggccatatcatatccaacagcccttacaagggtaagagtctcagcatgttcctcttctgtctctccacaaaaacctaatagacaagagatttttttttgtcaaaatagaagtgaataatcattaacgaagtgcactcagaaaacagatgtgtaattgctaattgtaaaatggcaaattgtagaaacaaaatacaagtcacagcataactacacaagaaaactggtttgacagcaggacttgtcaaagtcatgtaacaaaacaggtgatagtgttgtagtattatagtaaatctgagtacactccaagaaaatgatgtgaaattctgaagcattttcaatttttcagtatgaataattaagggggtggaatggaactagaggatatacatttgaactaccatggaaataagaaaaggagcacatagaaataaatatagaatgtggatctggttaggccaaaaatatagtatggtcaacctagttctaagttgtacctagaagatattctcaagtgcaagtgacacatttgtgagcatgcaacaaattagtcaaacaggatatagtctcaaactctaaacatgcatgccagttttattcagttagtgatacttggtggtacttagctagcacatcattttccaactcaggttattatatccttactattatccacatccaatggagctacgacatatatggtttatcaccctttcttgaagcagccaaacaggaaataaatagccacattgctagtactttgtagaaaatattgcaactttgaaaagcaggaaacagatagaagatagaccataaggtcatacaatgatgatctcggaaaagtgacctaccacttatgaaatcactgcttaacccaacatctggaatgatactacggattttctgcacaagctccaagtatgcctctctagtataaccccgacgcatacgttccagcactgctgagctgcctgattgagctggcatatgaataagtttgcaaacattgtgcctatcccgcattaaatatagaagctcgtctgggtaatcctttggatgcggagaggtaaacctgaaccgcatctcagggtattccaaagataactgatccaggagatcagcaaaacgcaaccccatattcttcaccttgcacatgctagaaaacccttcactgagctcccagtttttaccaggttctaattcctcaacttcagaagtgtcgttataactgtttacgttctgaccaagaagcattacttccttcacgcctgctttccagagctccccaacttctcggacaattgaggacactggacgggacctttccctacctctagtgaaaggaacgatacaaaaggagcacatattgttgcaacccctcataattgatacaaatgcggtcactgaattgtcagagatcctaactggggtgatgtcagcatacgtctcctcgagtgagagaagcgtgttgatacccttctgcccataatcaacttcctgcagcaacctaggcaagtccctatacgcatcaggtccacagacaacatcaaccatcttatcagaatcgagaattttctccttcaatcgctctgccatgcacccaagaacggcaatctttggaggccgcagagatcttgaccgccctgcagcaacattagctttccatgccttttcaggaaccaaaagtagttcagtcgctgccagactttctgctctgcgttgtcacggattgcacatgtgttgataaatattatctctgcactctcagggtcagggacaatttcatcatacccttcatttttcatgatagaaagcacgatctccatgtcgtttacattcatttggcacccatatgtctcatggtaaatgcgacccttgcttgctgtcaccggaccagactctaaactagacaaaccaaaaaaacaaagcatggggtcagcaaagcttgcagtcaaaatcagaaaagagaagtatgaagtaagcatagtaaattggaacaacgaaaatatttgtgtaaagcaaaagaacaagtctttcaatccttcaaggttcagtgtcacaagaaagataactacctactacaatgaattaattgtagttattgccaatgaactaattcaaatcttttttttccaaaacagaggtgaaatatttcagcgcgatcagaaaaattcccaaggtaagaaaatcagaatatatccatacctaggcacccactcaacatggattacctagggtattaactataagacacaacaaaacaattcctaggatttacatttttccacataacacatggctttttactgttctaatttccatgcaatatctttaccgcactaaacgcaaattttagcactgactcaaccatttcaattaggcaccagaagattcacacacaccactgatcattacaccaccaaaaccttggaataattccacctagcaactcgcgccgcttgctaatcttcactgcacccacaatgtgctcaatcgatgtttccacttcgaataataacgatcaccatgttcatcaggccacaattctagtaaaacacctctacttttaacactacagtgcccactgtactacccgagcaaacctacaaccacaacaacagcaggaggaggaggaggaagtgagagggggtgcaaaaaagaaacgggcacattactctgtctgcgcctcggacacggccgtggcggcggatgcggcgagcggac

SEQ ID NO: 20511 - DNA, 3550 bp, Oryza sativa
ctcggggagccaccggtcgtcctcggcgtcggcgagcacgaagccggcccgcccgcctgcgccgtcctcgagctcgcgcacgagcccctgcagcgacgagcacaggcggcaccggggcgagtagaactccagcacggtcgcgtccctcccgctcgccagcgctgccgcgagcgcccgctgctccgcctccccgcggtccgcctccgccgccagcccagggcccagccgcctcctcctcctccacctcgtcctcgccccaccgccgcctcctcccccgtccgacgagggggaggggaggtcgccggcgatgaggaggccctgcgccacggtgcggatggacttgagcagccagggcatctcgaggtcgccgcaggggctcgggctagggctagggctcgttgccttggggtcggggccccatggccacttgaagcagacgaagggtgggggcttcgcggcggcgcccatcctctccggcgagggaagcgccggcgaggcggcggcggctgcggattgggcgatgacgtgggttgatgaatggaccgcgcatcacatatcgattcaacggctgagatctaccccactggagtgtactggacgcggcctctacttctgcaaattggaccctcgtttggttgctacagacctacagttagcgagtaaactatactactccctccttccctagatgttgacgccgttgcctcttttaaatatgtttgaccgttcgtcttatttaaaaacttttgtgaatgtgtaaaactatatgtatacataaaagtatatttaacaataaatcaaatgataggaaaaaaattaataattacttaaattttttgaataagaagaacggtcaaatattttttaaaaagtcaacggcgtcaaacattttgggatggagggagtatattcctttccgggcgaccattctacccctgtcatttcttcactctcattgcaccatttcgtccatcttaagatattaataatactccctccgtttcaaaatgtttgacgccgttgactttttaaaacatatttgaccgttcttctttttcaaaaagtttaagtaataattaattcttttcatatcatttgattcattgttaaatatacttccatgtacacatatagttttacatatttcacaaattttttgaataagacgaacggtcaaacatgtactaaaaagtcaagggtgtcaaacattttgaaacggagggagtagtaaccaacgcacatcatatctttttagacggcgtcatacacggtgatcaatcatgccgtggaaaggacaatgttaaattggataatgcttcccctagattgctaaatgggccgcttggcccggcaatgaccgagcctatgtcgagatcagtcgggccggcacgccccgaccaacatgccaggccagggcaggcccgcccacttgctgcaccttcggcctaggcgctcaataaaactcaggccaacccaaaagcacgtaagtctattgtgctcctccttgaaaaagtctattttcctccctaatctctttaggctggctcttatatagctgcattgcatcctcattctttggccgtaccttatatggctagaataagtctacgttggctccctcatcttatcgtgccgacgaagaggcccattcacagctcaaagatcgggctatgctgtgcttggaccgggccaaaactctgtgccatgggccgggccatcgggccttgagccttttggccaactaaaccctataaagtggccgacgcactgcacacgatcgcactctcgcaaagtcgcaacgtcattactcatcatccgttaatctccttccggacgattaggccaatcctaactataaaacccaatggctgacataggagaggacggaaaacgcagccttgtgtctatccacatttcagacaaatttgctccaatcatatgcctttttttcacactttattagcagtcacttttattgctcaaacaaatagtaacaattacaaacaacatcaacatgatcataattacaagtttaattaaacccaatctttccttaatgaatcaacagcaatcattaatcaatcatcttctggagtaatgaaaagtatgaaacaaacacttacaaagttgcatttgcaattcatggatgctctcgatcctacgacgcattgaagcatgggaagcaaccgcacagcttggacagagccgacggcgtcgccggtgccggcgccgtggccggcgggtcagccgccggagcggaagacgaagcagaagccgaagccggctgcagcatcgggacgtgggacccgtccatgccgccgtcgcggcaccggtggcactcctcccggaaccggtcgaacgcgtcgcggcagtactgggcggcgccggcgacggtcatcccgcggacgaacacctcggggtcgtacccttccccgtcgtggtcgccgttcagcgcggcgccgagctgcaccagctcggcctggaactccgacacctcccggtgctcctccgcctccgccgcccgcagccgcggcggctccggcagcgtggcggggcagtcctccctcggcgccgcccgcgtcagcaccgtgtcgaacgtgcccgcccacgcgtcgcgcctcgtcaggaactccttcaacccaaatatcctcttcaccgtcgccgggatcgacgagtgctcgaactgcgacgtcggctccggcgcgccgccgcacgacgccgggtcgtgcaccacggtgcccggctcgatccacggcgagacgagcagcgtcgggacgcggacgccgaggcggtcgaaggcgaacgacacgggggcggcgctgacgatgccgtcgggggaagggacgccggcgaccggggtggggacgtggtcgaagaagccgccgtgctcgtcgtaggtgatgacgaagaggatctcgtgccactgggggctcgagcggagcgcctcgtagacgtccttgacgaggcgctggccatgggcgacgtcgtgggaagggtggtcgtcgttgcccgggaggagcttgaggtcgaagtagcgctgctcgatgacgacgtagtttgggagcttgccggccttgcagtcgcgcttgaaggcggtgtcgtaggggtggaagttgcccacgtacttgagttgcctcatgttcctacatgcatgccaatatatccggtattaattcatacttcctccgtactcgtaaaggaagtcgttttggacagcgacacggtcttcaaaacacaactttaacttcttgtttctataaaaatatttattaaaaagtgatatatgtatacttttatgaaagtattttttcaaggcaaatctatttgtatatattttacattttcaaactcaacaacttgagagttattcatgatttatattcttaaggtttgacttaagcattatcctaaactacttcttttatgagtacggaggctgtagctgattaaccaagtactcccaccatgtaagtcattctagcatttcccatattcatattgatgttgatgaatctagatatatatctatctagattcaatctagatttat

SEQ ID NO: 20512 - DNA, 10134 bp, Oryza sativa
attttgtcttttgtgaggtaaaagtaaatattatgaaatagtccaatatttgttttcaaagtgaatatcatatatttaaataagcaaacagttggtactaacatatctgataaaaaatatatattatgtatggcatattataatatgctttcttttacccaaagcaaagtatagacattttgctagtatcttaaagtatgtgtagagtgttgtttcatgagagctaaccatttatttttcttattctcttatttttacataggtttatagttaggttatagcttactataaattgacaggttgctgttgcaaggaacacatgcaaatcttctattatatactaaaattccattaaacttcctataaacactcttaaaccgtcatgtggcaccctacaaacgctcctaagctgccacgtggcagaaaaacatctaaccatcgattttcatttaaattggtggacccattctttgaaccattagattagtaaaaaaaacaaccaatctacctctaaactgggccccaccctatttgtatggacgttcgtgtaggtacgtactccataccatcttatgttcttctcttttcactctattatctttcttattttccttctattagatggaaagcaaaatttatataaaaacatttaagtaactatagtattctttttagaaacacaaaacaaacgcaggcattcacaacacgcgcacactcatcccttaggacgcacacacgtataccctaccccctatgaacaccatcgaaaacatttaaatcatatatgtattcttatatgcttatgttgttagattatttatatagtatctaaatcatacatgtatttgatccgcttatgttgtaagataatttatcattaataaatttacagttaaaaacccatatttactatagaaatatgtcattattatggataagaaaaacttgaaatcgttacagcgtataattatcttaaagaaaaaaattacctcctaaaattgggcccaccaggcatgtatgtacatacgtatgttactttttctaagaaaaaatatgacatcttttctccctgttacttctcctattttcatgttttattagttagaaaagcaaaaaatattttttataaaatctaaatcatataactaatttttatccgcttatatcttatgactaaatttacagttgaagaacaaatttaactataattcaactttgaaaagaaatgtcattttgggttttattttcggacttttgtgtgtcactcaggcaattataaaaaatatgaaataataataataataataatcatcatcatcattattattattattatatcatcgtacataacttcataattaaattagatctgcaaaaaaaagtaaaatgaatataactatgagcaatgctgacaaacttatactaaaaaataaataactataacatctaaatcacgtgatccgtttattctatattcactgtaatttaactttttatatgccacttcggggttatatttttttttaactttagcatgacattcaaacaattatgaaattatgaaaaaaaaatgatatagattttatcgttctatataactgcacaataattaaattagatctataatgatagaagtaaaatgccaaaaagactaaattgaattatttggagaaagtctaataagttcagaaaaaaattagttcttactttttactacaattgatgtttcaatttcataacaatttttaaatacttagatattaatggccttacatctatactataccataccatagcattatgagtttttccacatattattacatatataagaagccacactaaggttgcagtgtatgctaagtatgtaataacttgcgtcaataagaaccaaccaaaaggatgactaacttgattctacaaataaaacatatttattaataataatagttttttatttgttcaaaaaattctactaaacattcaattaaataagacaaaacaccttacttttaaattataaatgtttcctaaacaaactaaatatagctctgtactgaagaaatcatagataattatttattgcgatgttttaaatatcatatattttaaaagctaacaaatagtttggaaaaattatctaagcaatgcgatgtagaaaatttattgagaaatagtgctttttaaacatggcatgtatcatctggttgatattccgtctatataagtttttcaaacgcaatctactatacatgcccgcacatcgcgcgggctacctttctagttagtaaaattgttgctaccattatagagagaagcatcatgcatggctgctagctagctatatagattgagatctaaccgatcaagtgaccgagatttaaaaattaacaaatctcagtttgcattaattatatatggatcactacttacaaaattaatcagaagataacaaaagaaaattatccagctaaccagaaacgcccaaacctctaacctcaaagatgccgtctgcattatgtagattataaattttagtttatatatatatatacattcatgactgctatacctaagttgagcatctcttacttactcaatactatactatctaaaatttcaatctgattttatatgcgcagttgaaggcatcaaacacttagtgtttactcgcatattcgatcgtctggtaagaaattatctatggcagttgttggaaaatattatatacaatataactaagtcaggtcaactgcacatggttaagatagttaatatattttcatcttaatcttataattgtatcaagacaacatccatccaagaagaggtgatctgtacgctacatgtttaagagaatatccgttcgatatgtcctatttcaaagtcaacactagatcactacgtctctaccaacgcgtgaagcaatcataggctgttaattaggagcccctctatatatgcgataattaagcaaataataaggcaattaatggaagttatatatactatatcctaagtgtcacatttctctctgttttttttttagtaacttcaagcacaacttggacgaacatatatatagtcttaacatctgcataatattattatgcgcaactagttgacatatctgttctgttagcttcaaattcaaacaaacatcagtatatgctttgttcaaacttagccatcctatgtgttccctcgtcaccattggataattcatgtgtcaactataatgatgacttcgacaatgactataatgtactctatctcgtgcaatttgcaaggttaattgattggatgatcatttcgtcgaatataatgacaaatatgaactgagctatcgagaaccaaacacttccaacatttgcatagaacatatcgatcgagagtcgaatgcatggacacattgcttacttagctacacacgtactccctacatttttaatagatggcgttattaacttttggtataacatttgatcattcattatattaaaaaattagtgtaaatataaaaacatataaatcacacttaaagtttctttataataataaactaagtcaaaacaaaataaatgacacttatattaattttcaaatataataaaagatcagatgttatgtcaaaagtaaacggcttctccatctaataaaaatagagttaattagtctatgatattaaactaatccaccactataataaatggagcctaattcaaatagcattgtttgcaattccggttcgaaatatcggaactcccccttccctaatacgaaaccattttgaccattaatatcattttttcagttgtttgtgaattaagcaaaattcattcaaatcagtcaaaaaattattcaaatttcaaaaaagaaaaaaaatcaatctacgcgtgcgatcatgttaagcagcccgtctaggaagacttgtcttcatgtgcggtttggccgcccgcacgcgaagatggtgatcttcgcagaccctttaggcatactggccgcacacgaaaacgtgtttcgaccgtctgtaaaaaccgtttcttcaattctatagtgctagctgccatgctactgacctgtagaagagcacggagggagggaactggtagtagacgccgaaggagtggccggcgtcgtggagggcgtcgaagatggtgcgctgcggcaggccggcgcggagctgcttgccgtcgttgctgacgaggccgtgcgacgtcgccgagtggacgaacatccggttcggctgcgtcgacgtcggcaccgacgcgaaccaccggtcgcacacggcgaactcccgcaccagctcccggtacaccggcaccttctccggccggaacccgttcatcaccgtgctcgacatgccggcgcgctccttctccgcctcctgcgcgaacccgctcatcggcggcgagggcacccccggcttcgtcgccggcgaggtggtcccccacgtgtaggcgtcgccgtacacctgctcgtagatggcctggaacgagtggcccgggtcggggtccacgtacccggagccgtcgccgaagtggatcgccggggaggaggggtcgccggcggtggcgcggttgaactcggcgcccgtcacgccgtcgatctccgggttcaacgacttcatccaccccagcatgtggtcgaaggagcggttctcctggaccagcaccaccaccgtcttgatcttgcccgccatggctggcgtcgaggctgggattggaagagggaagaggaagataaacgatcgaggatggcttattagctagagctcagtggcgagctgatagtagctgcttctatgtgtatttattggcggctctcgtgtggtggagacgtgtgagatgctgctaaatacagtatgtacaagtagtctcattttgttaattaagcaaatccttgcaattgctgaggtgacatgattaattattagtacgtcgtagtaggttgttatgttcattaaaaaaaattactgtattaggttattatgtacagcgtactcttctcatgtttatgtttgaaagtagaggaaagaagaatactccctccgtcccataatataaagaattttgaatttttgtttgtattgtttgaacactcgtcttatttaaaatatttttaaaattattatttatttttttacttactttattatctaaagtattttaagcacaacttttcgttttttacatttacataaattttttgaataagacgagtggtcaaacagtgcaagcaaaaattcaaaatctcttatattatgagacggaggaagtactggaagacacgtaaaataaggtgtgccattaatatatactccctccatatttatttttatgatgctagttagttcaacatcctttatttagagaaggaggtagtaattaattaagtaggtgtattaattatttcaaacttaataaataaataattttttaaaggaatattcctatagaaattgatgaggatctaagaataccttcaccttcaacttcagcaacaactcttatttctttctcttttgtttcaacgtacactctatactatgcctagtttaacaacacaataattcaaatatgcttccacgtattatttagccactcattttaaattatttgttaagttaagtttttaaaacttcaattcatccatatagttctagataatccgtggcaataggccggagtactaatgtacttgtacagggcctaaatagactttttccctaaaaatattataggcccttggtggcccaaagttttgcaggcctcggtaagcccagtactaaactgttcggccttcgctgagtctatgggccgtgtgcttttccgattctaattcagttttcggacgcgcgcggcgtgcgaaacaagaagagaagccgttgcggcggccaaaattccccaattcccaaattctagggttcgcctcttgcaccgccacgcatcaggagcacacgcccacatgaagatgagggcggcggtggccgacggcgacggcgacgacgacggcgccggcgcgcccgtccaagtcagcgtggaccccgccgcctaccgggactggtccgcgctcccggccgacctgctgctcacggtgatggagtcgctcgccatccccgacctcttccgcgccgggaccgcctgcgcctcctggtacgccgcctactccatcgcccgccgcgcccgtatccccatacgggattcggctccgtgcttgctctactccggcgaaggcgacgacgaccccagcaaggccaccctgtacagcccctcgagcggggactgcttccgcgtgcggctcccggacccgccgctccggagccgcaacctcgtcggctcagcgcacggctggctcgtcaccgccgacgagcaatccaacctccacctcgtgaacccgctcaacggcgcgcaggtcgcgctcccgcccgtcacggccctccaccatgtggagagcttcgtggacgaggaagggaacatagtgtatagtgttgatgagtctctggggcccgacgatccagaagccaatctccccgaattcgaggagctcgccgaccgggaagtccccgtggaataccctgcggagaagctgcgcctgttcatgtaccacagggtgattctatcctgcagcccatccgtggggagggaatgtgttgccctgctggtgcacagaccggatgggatgatctccttcgcccgaccgggcgacgagagatggacccatatcaaccggacaacgagcaatggatcgctcaaatgggataccggctataccgatgcgctttacaacaagaatgatggcttgttctacctgttgagctttgacggttctatatgcgcgttggatctaagtgggtcaagtccagttgcgaggaacattgtgaagaaaaatacacagtgggataatcctagcaaatacattgtgctggcaccatggggcgatctcttggaggtgtggaggttgagagactttgatgaacctgatgaaactcctgaatgttcttctgctgagtttgaggatcgatctgataagtggttaacagaagaaattatgctatataaagttgatatcgataagcagaaacttgttaagataagcagcatcggggattatgctctgttccttggtttcaattctgtggtgtgccttccaacagagaattttcctatgttaaaacctgattgtgcttatctttctgatgaattttatgaagaaatatgtgtcaagaggcataactggcgagaaataggcatttgggatttgaaaaattgcaaactgcagagccttggtgatgtggagtctcttcatgcttggcgtaattggccatcgcctatttggataacaccatctcttagttagaaagatgtgggagattttcatgtattaggagctccaatatggatatcattaatcgaaaagagagatttatgatgaactgatgatagcccaatactcaatttggttctgaaatgattcttgctcctgtacaataaaagctgtagtagttattattcttatcttaaagctcagcagtttgctgcacccttgttcattccattgctattcttgtgcacatgccttcaacacctcagcacatgcccccggtaaacctctccttcctcgttttcatgtactttcaccgtcgttggatgttactgctgctttgcttctttttatttcctatcaattactcttttttcttcgttgttggtgttgttccctccctttgcttgtgggccgtcctgtcagttactcaaatcatcacttaagagaatatcccctcatttttgcatgtcacttaaagcttaaacaaaaaaatttaaaaaaactagtacgatagaacaatatatgataggtcacttcataaacatgcaaatttaaattcaacttatacaagtagaaacaaaaataacaaatttcactatgaagtgaatgcgtaattcacggtcacatttgttatttttgtttcaaattgtataagtcaaattttaactcgcatgttttcaaaaagatatatcatatattgatctatcttgatattttttcaaaaaaatttgataactttttgaacgacacgcacaaaatgaggggatgtcccctcgaggaacaaaaatccacttccgagtttgattgacatcattcgttgttttttagactctactaccttccatttttcattgtcccacttgtctgtaaactgttgcctttgtcttccttcttctgcttctgtttatttccttgttgcaattgtttgttgtgtgccgtcgcaagccccctggtagttttccttctctttactcctttcctttctttgcaagctctgtcacttcttctgtcatgcttgctcggttgctccgcatcttcatgatgcattcttaagatctccctcctctcttgctctcatcactctcactggcagtgcttctccatgtttaagttgctatatgtgacacggcactcacagagagtgccctagaagggaagggggaggactcggcatggtggtggcccgtgctgttctaccggacgagagggcagcttgtggccatggcttttgatttgagcccagtgggatagatgaggaggtctccccagtggtggaacatagatcaactgtcatcctgtcatgcccacatcccttctcttaatctctccatagattgctggttcttatagttctttttttgatggtttgatttggattgcttgctctaatgtttgctgatttgctctatagggtgtctttggtggtgttccttaagtaactcgcaatggggatataggatgcctgcacacagagcaagatcctgaggatgaaaaagggacagatagaaaaaactattgtgaaatctaattttggtgtattgtaactgattgtaagtgctatgtaattgagtgtaaatccaatgtaaccgagtgtaactacaagttggatataccagaacacgaatcttgatgcaatatcctaagggtgaaaaagtgaaagatagaaaaccaaaaatccattgcaagtgaactaaaaaatctgttttattcttatgttttttcccgtcggtcctttgggggtcttgcatgcgccttgggccgtggccttggcacgtgggttgacatggcatggcccgacccactacaggtgccgtgcggttggcgggccaaccgttcgggcacctgtagaagcaaagaaaaaaaaccggtcacacgacacctcccccatgcatgaacccatccgaatctttgcctccctccctctctccctgtctcccctcttcctctctcttgtcaggacttggccaaatttgagtccaaaacataaaatttcagagaaaattaggctagtagctacttagtaggaccaaaagtaagggaatttcattaaaatgggaagcaaacataacagaattgagatgggtgctacaaggagttcgctgatctcaaaaaactcgatggcttataaggagttcgctgcggctacgcgacaaaagagatggcgataacgctatgacaatggatcctctgtagaaagacttggagcatcccaggccattcgatcctcataacacactcttgcgaaccattttccttaaatctcagtcgttcattcgcaaccataactttccttgtattctccaccttgcttcaggatccagactttagttctaggcttcagttttagaacctgacaatgcccccctttaagaccacatgtcctcgtgggtgaaaaacatgaaaaactttggagatgaaggttgcatcttcctacgtagctgctaattcaggtaagttggtccaatggatcttccattgaacgaccgactcattgttgtgaggaatgagtctacgctccaggacagctaaggatgccgacaatatattcccatcaggatccaccagaggcaagctagattctggaaaagcttttgagcccaaatgcttcttcaattgacttacatggaagacatgatgaatatggcaattagtgggtaacaaaagacgataagccactgatccaatcttttccagaacacgaaaagtaccatagtatttggaatgcagtttgaaagaattgtggatgcccaatggcattgtggctgtaaggttgtattttcaggtaaaccatgtcaccaatgtccagag

SEQ ID NO: 20513 - DNA, 9192 bp, Oryza sativa
  unsure (1)..(9192): unsure at all n locations
agcgcggcctctggtgacttccctgaggtgccctgaactgagcggccttcctcttcctgtccatcttgttgcgttgatcctcctggcggattgccttgtcaaccaacctctcaaagtcggcgtagtccccagatatcagttggttggtcagctcgtcatccagacccgccatgaacttctcctgcttctcggcgtcggtgcggacatcctctggtgcatatcgcgcgaggcgattgaactcgtggaggtactctgtcacagtccggttgccctgatggagcgcccggaattccctcttcttttgtgccacgaccccgtctggcacctgtgccttcctgaagctacggcagaactctgcccatgtgacttcagtacccggtgggcgggtggccatgtggttgtcccaccaagctgacgcgggaccctgaagctggtgtgtggcaaaagcgaccttctcctgatcattgcactgcaggagattcagcttcttctctattgcatggagccagtcatttgcctccatggggttggtggtgctggagaaggtgggtggcctgacgcgtagaaactctggcaacttggactgagggggagggggaccaaactgttgatgctgctgttcggcgtgctgcatcatcctttggtgcatctgctggtgctgctgctgcatctgctgcatcatggctgccatcatctgagtctgatgtgccataacttgggcgagggtcggattctcgggaagtggtggcggaccattgccagaatcactgttggggtgcacaccatcagcgcgttcttcgccgttgctgccctcgcctgtcgtgcggttgccagtcctggtgtagaccatctggagggaaaagcagacgggggaaaagaagaaaaacagatgctcaagaactaagctttattacaaaggaattaaaactgcaattgttctgatctgaattaaaacacttaaaaagcaagcaaaaatccttattaagacagccatatcataggcacatgatatcgaccgtcaactgaccccaaacaagcaacctaaacacgcaaactaacaaccagaagctagacaatcgataaactaatgggaaaacgagcctaatgctcggaacggctcctgcggtcggtggagtcgaaggcgtcctcctgctcgtcacccggtccctctgagcgactcctggagcctgacagatcagtctcgccgctgccactgggagtagcggacaaccaacctccggtaccactggctggacctctggcggctgatgctggagcgaaggagagagtgaacgcgggagctggaactggagctgcaggaactgcaggcggaactggaggtgctgcgggagctgctggtggaggtgggttcctgggcgcaagctggatgcgcacaggtgcagtcgtcgtcttgcggggcgtggtgcggatccggactcctcctggcgctggaagaccctttagctgagcgttctccttcttcaggcgcgctatctcgtccttcagagcgacgatcctcatgagcttcccatcgttcaaagccttggtcaccttgtgcaggtccgagtgcatcctgtccaatcccctcatcacagcacacatgtgaccaaaggtggtgtcgttctcgccagctgtcggacggaaggagctgacgccatcaccatgggctcgacgggggtggtagcggtacgccgtgtcgtggaagatgtagtcgtggcgctcccgtagtctggccatcatcaagtaggccgcctcctgacaggcgtgatctgctgtgcctccagatgcctcgaccgccatgttagcgaggcaagtccccacgtagccatggacctccaagcggacacggtgaggaagctcgccgctgagcggcggaatcgtcgtgtactccggcgcgttggggtagcccaccaccagtgtcatacgtgccagctctgccacaaagtcgatcatgccttctccgcggtggttgggtgggtgaccggccatctagagaagacaaaggagtaggatcaatgcatgctcaaatccaaatttaaataaagcaataaagactcaaataagggaaacgaaccagagcgaaatttttatgcataggtcattttgcatgagagcgaataaataagacagactcacataacgacaaaataatgagaaattagatacatattaataataacaaacgaagcataaacaccttgcaacccatgttataaagctaggacctaatgcatttcacccatcaaaccccaactgactgacgaataaatcccaataattttactaaaaccctagactgactcgttttgaaaaaaccccgcttaaacgagcgaccaagatttttcccttgaaccacaagaacagatcccaattttcccggaacaaatccaattgcaaagaacatatgcaatgaaaaggattcagagggctcttaggtttttccatttggcttgtcctacggtcaaggtcggctctgataccaacttgtcacgcccagaaattcccaaatagaattccaagcagaatgtgcattataatccccatccaggaccagccggggtacacaaacgacaatgttgacattcagatccacgtcttacaaacatcataaaagtcttacaaaaatgcagcggaaacaaaagataactggagctaagccttgactaaactgcagcgggaacaccactccacaggcatcctcgacggcacggacgaagcctactcctcggggaaaccttcatctgacacaaacccgtcctctggggttgggaaaagtagagcaagactgagtactacccactgtactcagcaagtcataccggaataggagtatgatgcagggaattaacaaagaagagctagagtggttcatttgcataaatactggcatttaaaaacaggaattgaatgcgaaaacggttgtaataattaattagtattaaacatccactgtccaacgctaacccacgttgcgacaggcccaaccgtccacctaaactatccaaattcaaaagattaccctagggtgagactaatcacggtgaatctggttgaccgcccataaccgcgggcacggctattcgaatagttttactctgatcagaggtgtacaactgtacccacaagacacagccccacgacacgtttccgtgcgccgacatgccaccacgacatcccggaaagaggctgtgacaggaccattcgcataaccccctctaaccaagcacatcacacctcaggtttcacccccactcctcgcaaggcagcgggcagtcccctctcgtgcctaggtgaatccggaagccgcatagaccgtcgcagggcccatccaaactccatcacgcccacccttgcctggatgcgtcggctagaggaaagctacactacaagcccagccgttgcccacgctggcttgtggtaagtacgataaattcttccagggcatcccgtgaaccggtccttaactgccatgggtgcgaccagcaaaaccatgcacccacagcccaccatgtgattcattttatttaaccaacaccagagcggtggtactaatccaacattaccattagaaccaacagtctaaacattaatatgattttccccattgtgaactagttgaactaagcatggctaagcaattactagtccaaactctaatcatgttataaccccaagctaacaaaggagcatggtatcaaaatagcatggctgtaacaataggtaaccatcccatagtaatattgcaaaacaaatgcggtatttgaaagaaaacattaggacatttgcaatataggatcaatatgatcaagtgacaagcatgacttgccttgctctgctgctggaggaacctcggcgactatctcgaagtacaccggagcgtcggagaaatcggaatctaacgacatacaaagcaaacattgcaaacaggctataagactactgaaacagggaacaaaaccatttttaatggattctacacatttttcttgatttactaagacttgaatgggattaaacggagctcggatgaattagttatgaattttagaagattcactgtgtttattactataacaaaaatccttaaataatttattgcgcaatattaaccagggctgacgtcagcacaggcggctcggcgccgacatgcggggcccaccggtcagcggcacggggaggagagaggaggcgtcggcccgcgggcccaccggtcagcggcacggggagggcggtctaccgtggaccgggaccacgcgggtgatccaccgccgatccacgggaccgacggcccggatcgccctcggccgatcggacggacggcggcggcggcagcccccgggctcggatcggcatcaaagccgatcggccgacccggggctagcggcggcggtgcgtgcgcgtcgcgtcgccggcgacggcatccggcggcggaggcgacgcaaaagcggcggcagcggacggcggcaacgacccaaagcgacggcgagcgcgggtggcggcgacgcacggggaaacggggaaggagaggagaggagatgcctcaccgagggtggccggcgcggaggaagacgatggcgaacggcgacggcaggccacgggagggcgacggcgaccggcggacgagcttcggcgtgccctaaggaaggagaagagagggattagagagagggagatagaccccggcgaccggcattcgaggccgaaagcggcggtaggggttaaacccaccggagcgcgaggaaacgggtgttccggcggcgaacctcgacggggaaggggcggccaaggtagatctcgaccccgcgaacccgacggcgacgacggcgcggtgcggcggcgatcctagcggcggctagcagcggccgaagtagcaaaacggcggcggcgggtggttgcacggcgcgggagcgatggggagctcgggagaggtcggcgcaatggggaaaaagtgagagggagtgccggcgatgcttaaatagggggagagggaaccggacgtggccggaagaggcgggaatcgccggccgacgtggggagtggggagggagagagaggcgggattctaaattnnaatnccggccatctcgggcgcgggcgccagcgggaaaaagaggggaatggacncggaaagcgcggggcacgcccggacgttgccgacgttgcccggaaaaagcggaggcgtgggcgtgacggccgttacgggcgcggcggcgcgagcgggagaggcgggaggtgggagacgggtccgacaggtgggccccacctgtcggcgaccccgggagggagggaggcgggcggctggctgggcctcggcctgcggccggcccagtaaggggagggggaggaaaggaaaagagaaatgggccgacggcccatttgacaaaaaggaggaaaaagagaggaaaaagaaaaagaaaaaggaaaaaagattttccctggaattaaaatattgcttgctcaattttaattggttaaaattatttctagagctctgaaaattccactaaaaatcctgttaatgaatttcgacatgtagaactcaagaaaaattccacatgtcaaatccgattattatttgcattactttcttagggttttctcctgatttcacctgcattttcttggggtcatttgtaaattacaattttggcttgggaggaaaacttcggggtgtgacaaacctaccccccttaaacggaatctcggccccgagattcggaggagctggtgaagaggtgcggatgggcggctttcaactcatcttccctttcccaggttgcttcctcttccgaatgatgactccactgaactcggcaaaaccgggtaaccttgtttctggttctcctttcgctggtatcaagtatacgaaccggcttctccacgtatgttaggtcctcctggatatcaatgtgctccgaatcagcctgttcttcaggtacccttaagcacttctttagttgggacacgtggaacacgtcatggatgccgatcatgttggatggaagttctagctgataggcaacttctccccttcgttccaaaattttgtatggtcccacgaagcgtggtgccaacttgcctttcgtctgaaaacgatgtactccccggagcggagtgacacgaagatacacgtaatctcctgcctcaaaagtgagctcccttcgacggttatccgcatagctcttctgtcgagactgagcaatcctcaacctttccctgatgattctgactttctcttctgcttccgctaatacttctgttccgaacagttgacgttcgcctgtctgatcccagaagagaggtgtgcggcactttcggccgtataaagcttcaaacggtgccatctgtagactggcctggtagctgttgttgtacgagaattccgcatatggcaagcttttgtcccaagctccaccaaaatcaagagcgcaagctctcaacatatcctccaagatttgattgactcgctcggtctgaccatcagtttgcgggtgataggccgtgctgaagtttaaacgggtccccaattcttcctgcagtttctgccaaaactttgaggtgaactgactacctcggtcggatactatcttcctgggtaccccatgcaaacacatgatccttgcgaggtacaattctgccaatctctttcccgtataggtggtatgtactggtataaagtgagcaaccttggtgagtcgatccacgactacccagattgaatcgtgacccgatgatgtccggggcagtcctgttataaagtccattccaatctcctcccatttccattccgggatttgaagaggttggagtaaacctgctggtctttggtgctctgctttcactcgttggcaaacatcgcagagtgcgacgaattcagctatttctctcctcatgctgacccaccaaaatttttccttgaggtcttggtacattttggtgctgcctgggtgaatggagtactgggtctgatgagcctcggtgagtatcagatccttcagttctttgtcgtcaggtacacacaatctttctcctatccagatggtgccatgctcatcttcgtggaaatcccgagcctttccgactctcatgttctttttcagttctgctatttcagaatcatttacttgagctgctctgacttgatccacgagagtgggccgtgcctccagagcggctacgaacccgtgttcaacaattcccatgttgagatgttcaaactcctgccgcaattcctcacacatgccctcgatgcatagggcagtgcagtaacttttccggcttaaagcgtctgccaccacattggctttacccgggtggtagtgaatactcatgtcatagtctttgattagttccaaccatcttcgttgtcgaaggtttagatccggttgggtgaagatgtatttcagactcttatggtccgtatatacttcgcagcggttgccaatcagatagtgcctccagatcttcaaagcatgaaccactgctgccaattccaagtcatgagttggataatttccttcgtgtggacgcaactgccgcgaggcatatgcaaccactctaccctcttgcattaggacacatccaagtccgtgacgggatgcatcgcaatagacttggaagtctttcatctggtcgggcaggatcaaaaccggtgcggatactaatttcttcttgagctcctcaaagctcttatcgcactcagctgtccatttaaacttctcatctttcttaagcaactgagtcatgggtcgggcgattctggagaaattttcgatgaatcggcggtaataacctgccagtcctagaaaacttcgaatctgcgacacggtcttaggtggggtccatttggtaactgactccacgttcgatggatcaactgccacaccctgagctgtaatgacatggcccagaaatttgacttccgtcaaccagaagtcacacttgctgaacttggcgtatagctggtgctccttcaacttctcgagtactagacggagatgttgttcatgttcttcttcggactttgagtagataagtatgtcgtcgatgaacaccacaacaaacttgtccagaaactccatgaacactttgttcatcagattcatgaagaatgcgggtgcgttggtaagtccgaaggacataaccgtgcactcatatagcccgtaccgagtggtgaaggccgtcttcggaatatcctcttctcgaattctcaactggtgatagcctgatcgcaggtctatcttagaaaacactttagctcctttcagttgatcaaataaatcgtcgattcgcggtaaaggatatttattcttgattgtgacctcgttgagtgcgcgataatcaacgcacatcctcttcgtcttatcctttttctccacaaaaatgaccggagcgccccaaggtgaagtgcttggtcgtatgtaccctttctgcagctgctcatcaacttgcttcttgacctctgctaattcgttggccgccattctgtacggtctcttatagattggagcagttcccggtgccaagtcaatccggaattcaatctctctcttgggtggcatggtagtgaggtcttcggggaacacttctggatactcgcagactatgggtatatcttccaatttcctcaagttcttctctacggtgtccactggaacttccatctcgacctggttcaaggagaccccttgctttggcggggctagtgttttgtacactactgtttctcccttctcgttggtcaaggtgactgtgcgattcgcacaatcgatgactcccttgaacttagtcagccaatccatcccaagaatgacatctaggtctttggattcaagaagaatgaggttggctagaaatggtgatctttggatttctattagcactgaggggctaaaactgactgaggttgaactatttcccggggtatgaaccctcattggtgtgctaagctcttctttccttaacccatacctccccacaaatttctttgaaatgaaagaatgcgttgcaccagaatcaaaaagtactgttgccgggattgagttaacagggaacgtacccagtacgacctccggtgctgtttgtgcctcctctgcagacgcgtggttgacacgagcctggataaaccttggcccggcacgcctgggcttcgggcatttgtcagcgaagtggccaagctcgccacagttgaag

SEQ ID NO: 20514 - DNA, 8571 bp, Oryza sativa
ctagagctctgaaaattccactaaaaatcctgttaatgaatttcgacatgtagaactcaagaaaaattccacatgtcaaatccgattattatttgcattactttcttagggttttctcctgatttcacctgcattttcttggggtcatttgtaaattacaattttggcttgggaggaaaacttcggggtgtgacactgggtaacttgagtctggatctgtttctaccctcttttaaacctcaaacctataaccgtttcaatcttcagtttcagaatctgaaatctctcccccaacatcgacactagcggcataattccaaaatcccagaaagaaatttagtgaatcgtgccctaccaccgccacatcgcgcttcccatttcaagcaagcgcgtaggtgagtctcccaaaccttccatgatgcgcatcctccgcgaacccaggtgccccatggcgaggacatcttcccgacgagtttgaggttgagttcagataatgatgcagatacgacaggcgaggagggttaagatttgggaatcgacggatagtgtggtcacaccctctggacatcttccaccgcggtggtaaaggaagatcatcctccatgcgttctttgctttttgttccggtagaaagtgggtttaaaaattttaacccaatatatcgccttatgtacttcaaggctggtttcatggatctccactacaataagtgtcgtgcgaattttatgtgtaagaataaggacacgaggtattagtgccacaagtgcaaatgttggtttgaaggcaaaaacttcgcactaatcaatcagatgtttcagttatcaaatacggtttttatgtaaggagattggtttgtatgtaaggagattggatgatggtatatcgataagatatttcattttgacttcgatgggatattccattttgacatattttagttggtggtcatcaaattttaggtgcagctttttcatttgatattaaatctagtagttggaagttcctatatcagttgatcagaattaatatttactacaaacctaatgtatatgtgttttttctaagtttcctaaatattaatattatgtttatgactatcaaacactaaatattattgttaaggtagcacaaatttctatgagaagtttatttaatagatgtttctttaatcttatatttttttagatataaaaaaattgtaatgataattgctgaagttgatgatcatgttgctagtagtgcataagggtttagtcgtgaatatgtgtagggctacaaaagaaaatacgataggctaatagtagaatatgctgttcaaaatgcaattgaccaacttaaatactgctcctttcatattataagtttttaatttttttaaagaagtttgacaaagtttatagaaaaatataccaatatttataggatcaaattagtttcattacatctaacattgaacatatttgattagtttctttattttgtgttaaaaatattgctataatttttataagatgttgataaacaaacgcatctgccgaagggcaagcttcactcaatatgtgcgatataaagtgataaaatgtattgatttttataaaaatttgatcacctattacatgctcctgacgtctatttataggtttacagccctgggtttgtaaccctagggttttggtgtacaagtgagtttacacaaacgcccttatgacatgaacatttataggggtaataacaaacctttggctcagctacccggtctatgggcttgtcccttcatgggttgtttgcgggccttcttgattaacagggcgttggctgtcgtattggcttcgctgcttggtcagagcgatcctttggcaatttctccgctactcagtgatcagctttgccgcttactgggacttcgcctcttggttgtcttgcacctcgtttcgcggcttggcatttatgtgtttcggctggctcggtcgaaggccctcatgacatgcctctaacataaacttaatcaaatgtaaaaaagtttgacttagaaaaagttaaagcgatttataatatgaaacgtaggtagtaatcagaatttgacctgaaaatccctatctctactattataaaaattgaagatgtttctgccgaaattttggtatgtcatccatttttgagttagttgtacatcacccgtatccaattcgacatgagtcaacgtgagtccataataactattatatatccccttccggctagggctgtcaacaagccaagctcgagcgagctcgtctgccgaagctcgagctcgacacaagctcgagccgagatcgagccgagcctattgcacctttgagcttttaggcaagctcggttcgagctcgttcgagctcgagctcggcaataagtagtataatatatattttaatgacaatctcttgataagtataattattttctagttaatcacactaataaaagagtagaaaatgattaaaataaatatattgtgctaacacatgctaatttattgtgtgaatagatactaatatatatatatatatatatatatatatatatatatatatatatatatatatatatatatatatatatatatatctattagtttattatattaataaggtgaacatgcatataaactatacacagtcaagctcggtagaagcttgagctcggctcggtaaagctcgcgagcttttgcttaggctcgggttcggctggtttggagctcgagcctaggacgagccaagctcaagctgctcgcgagcctcgaacttttttgacagccctactgccagcccaactcctccctctcctagcccaacccagctggcccacaccatcccacaccccatcccgcaaccctcccctgatctgattatctctctctctctctctctgatttttctccttttcttttctccaataattctaatcctccccctctccctctccttacaatcttctcttttctcctactattctctttttcatttttttttctcttccagatttctctctacataaatatttttattttaaaattatcattatttaaggtgtgtatgtgacaagttgttactttgttcatctatataaaaaaaaacattcactaattgaataatcaaaattttagtttcaatctttggtcaataaggtataagcaaaatatcaatgcgtcaaattatggaatagccacccggttgatttgtgaggctacggagaaatatacataaaagatttttcgtgtgatgatgcatgaaacgagcgcaatcaggttcaatgctatatatgatttttgactttgttttgcattgttttgtttgtcttatttcactgtcatttaaattggctgagtttttattaatcgtaaaaattatctttcccctattgcaacacacatgtatttttgctagtctctaccttaataaaaattgaagatgtttttgccgatattttggtatgtcatacgtgtttgagttagtttttaagtttgtttgcttttggaaatacaaatctgtatttgagttggattattttaagcttgtttgtttttggaaatataaaaggagtcgtataagaaatctctttaaagaaaactcatgctaacttgagatgaaatatggacttctaattgtagctcatgattttctaaaaaaatatttaagcgaatttccacggtgaattttatcctctaaaccatataacaataataatattaaaatagcatttacccgttataatgcacggatattttttctagttaaacataaattcaaaagaccgaattggcctagtgatgcgctgcaaccatcgttccacaagtgaaagaagaaaccacttgatgcttcctaagattatccgccgccaccgtcgtcgtcggggagcccttccatctgacctctcttcatctcccatctgccaatgtcttgccggcaatattctttctcatctagacggcagtcgtcgacgaggtaggcgcatctgggcttcaacgctgccaggaattgctcggcccggaagcacgccgagaattcgtggccgaggaagaccaactcgccgccgacgcctccacgagcttcttctcgtcgccgagcaccgtcgaccctgaagatcggcagatgtttggtgcagaaaggcgggtccccgttatcgccgtcgccggcgaacctccagacgatgttgttgtgttgccctttggaaatccacttaaaaaaataaacaggagagatacaaacaattttacatactcttttattatcctagtagcaaaatgtttatgtgttgcaacaggagaaaaagagtgaacatgttatagtaaaaatcatgaaacatcgtgtcttatatttacttttgtcaacataacgggcctgttcactttactgccaaaaaaaaccttatcaaagtttggcaactatgccaaaattttggcaactagtggtagcttgccaaattttggcaggaattcttatatagttactaaaatttggcaacaaactaaatgtagcaacttttttgtcaactttatcaaaatttggtaaggttgaaaatggcaccaaagtgaacaggcccaacatgtccagcaaatcgtacttgatttattttactttcatcggttaatcctccttgagtagctattctcatgagcaccagaaacagaacgtaatcagaattgagaaacgcccaggagtcttccggctagctcacaaggtggtgggctagacaacctgggttcgaatcctcaccccttctaattatttgatattaggtcattcccttatatttgcttctttttttaaacataacgtaattaaatataaaattgtacttatattgaaacggagaaacgtagtattattgcgcaataagctggcactgttatggcctccaacagtacgtagcatcgtggcatcttacagcacggtatcatctggagacattgaatttgaacgtcgatcagggcaagagagacgtgccgagtccgactcggaaaatgtgcgccgtgttcaggcccgtccgaacctaatccagcacgtacgggtctaacacagcacaaaacatctttttaatcattccagtgtctctcaggaaaattatcgcgttcatagaagcgttttaatttgctctgtcgaccgacgatcgccggcggcggcgccgtcagatcagccatggagccgaccggcgccggcgccggcgtgatccagtgctgggagacgcttcccgaggatctcctcgtcaccgtcttttgccagctggagatacccgacctcctccgctccggcgccgtgtgcgcgtcctggcacgccgcgtaccgcaccttccgccgcctccgcctcccgtcgccgaagcagccgccgtgcctactctactcctgcgacgcctacggccccgacgccgccggactctactgcccatccaccggcgccacataccgcatccccgtgtcgtgcggcggcggcggcggtggcttccgtaacctgacgctgatcggctcggcggacgggtgggtcgtcgccgccgacgagatcggcaacctacgcctcctgaacccgctcaccggcgcccacgccgagctcccgccgctgtccacgatgcaccacgtcgaggccgccgccgacgaggaggacgaaggcggcggcctcgcgtacgacatcgttgatcgcctgtacaaccggcccagcctggtgcgcgtcccggcgcgcgaggtgcgggattgcatgtacttcagggcggtgctctcctgcggccctcacgccgccgccggcggcggcgacgcggcggcgtgcgtcgtgctgctcctgcacatgcccaggtgcgagctctcctacgctaggcccggcgacgagcggtggacgtggatctcgcctggcgccggcaccggcctccggtggcgtaacctgtactgcgacgccgcctactgcaaggacgatggcctcttctacgtcgtgcgggatgacgactccgtccacgccctggacctcaccgggccatcgccggtggcgaggaaggtgttcgacgagcggacatggagcacgagcttaccatccaggtacctcgaagatgtccacctgccatgcgcccaaccttgcagatacctcgtcaacacgccgtcgggcgagctcttgcacgtctggaggttcaggcaatgggtcagttcctacgattcgtcatctgatgatcaagacgactcctccaacgattcgtcatccgaggatcaagacgacgactcctacgattcgtcatctgaggatcaagacgactcgtcctcgagagacctgtatgaagatctcatcaccagggacatacagctctacaggactgacttccatggaaagaagctcgatgcgatggacagtctagacaatcatgctctgttcctcggttacaatacctccttgtgccttccaacggaggatttccctggattgaagcccaatcatgcttacatcacggatgattcgctcgagtttgtcaactattttaaacgaaataaaaaagaaattggcatgtggaacatcgaaagccagatcttggagggatttggtggggcgtcatctcttgaagaaccttggttaaattggcctgcgcctatttggataataccctcccttttgtagacgaaattatattgtaacaacactgaggcgatagtgttgcgttgccctttggaaatccacttaaaaaaataaacaggagagatacaaacaattttacatactcttttatattatactagtagcaatatgtttgtgtgttgcaacaggagaaaaaagagtgaacatgttatagtaaaaatcataaaacatcgtgccttatatttacttttgtcaacataacatgtccagcaaatcgtaattaatttgttttactttaatcggttaatcctctttgagtagctattctcatgagcagcagaaacagaaagtaatcagaaacagaacgtaattaaatataaaattgcacttaagctggcacggttatgacctccaacatatttatctatcttgtcttgtcagctgcaggattaaactgactagcacacccacattttattaagatttggacctgcattggagctaagcatatctcctaagccattatgttcatcgacttagttcgcaccaacaaagttctggcaccatcagtcgagcgcggatttttcatcaacacaaatttggcacgaacagtggggcacggattttatacctatatgtttgaagaagtcgacgccaatatcctggtcgcaatggagaatttgacggaggaacagaggcaacagattgatcaatcagtgactaattttcaaaagtgttatgttcaatgtttcttcatgacgtaacaaggactgattcagaagacacaatttcccaagtcgatgattgaaacacttcaaaatacagttgatgaagcagttcgtcgtgctttgcttgatcaatctggagttttggtggatacattgtgaaatttgatcaaaggaacagttgatgagttagttgctcaaagacgccagctcggggggcagattgaagaacaacaacaatatcggcttgggggacaagcacatcagtatcagtaagatgaatcatatcaacaatatcagctagaagaaactcaaaaacatcattatggagaagattgggcatttgggccgatagaattgcaaagatgatagatgagcagtttggaatcaaactcaaggaccaaacttctgtgtatcggctgccatatcctgagtggtttgatagggttccattgccacaccgatacaaggttccagacttctccaagtttccagggcaagatgatatatctataatggaacacttcagccgattgttagtgcaatgtggggaaacatctgctaatgaagctctgagagttagatttttttcactgtctttgactggatcgtctttcacatggttttcatcactaccgtcgaattctatcagaggatgtgctgatcttgtgaagcaatttcatgtctacttctttgttggaatcgatgagttgaaacttttacaatcatagatcttgctgagctttacggagcttcaatacaattttcatatggagtttgtcatgatctgtggtgctctcatttttttaggtagacctctttgaaagatctggtcgccaaaagtcaaattttacaggtttttcctcatgaaaaattcctgtaaaaaaatcaccccatttcaaagggtagttttcctaataaatcgtctgcgagaatagacaaattttcataggcagatttgcccaaccgtaaaaataggttttcaaatacggtctttaacccttcacagcctcccaaccatttatacaagctctgtttcttttgggccgcctgtgaaaataaatgcacagcgtccaaaaatgattttgttttttttcttttttacaagtagtgcatttcttcacctcatgatacttatcaaagcatcatccatgtatacttatcaaagcatacttatcaatgtatgatagatgtatctcaaatggacacgtgctttgtactcgtttttttcatccttccaaaaatgggagagatattgcacaaca

SEQ ID NO: 20515 - DNA, 588 bp, Oryza sativa
tggtttggaggagttctgcaatgcaattcaagcaaagttgaaagtacgacttgtttccagacttcagatataagcttttgttaggtcctattgcttattttattgttctaaaatgaattatgcctatctatcttctacaggactcattggtgccgatagaagcttttgttccatatgacaaaggagagctcctgagtgacatacacaaggttgggatggttgagaaaacggtgagtatcatgctcgatcattaaaacatgtttttgcctatcaatatgctctaacttttaaattgaatgtttggtaaaacctttatccttcttacttgaagataacaacgatgtttccacaaaatatttattgcaggagtacacggaaaatggtacctttgtaaaagcgcatgtgcctctgcctcttgcaaggcttctcacgccgctgcggcagcaggtggcggctgtttcatgatgtgaacgtcttgcatattgctatcggcaattcacataatttgctagcctttgtagtttgtacagagctaagccatagattttcatgccatcagtttgacctgtgtagagcatcattacaaaa

SEQ ID NO: 20516 - DNA, 10490 bp, Oryza sativa
  unsure (1)..(10490): unsure at all n locations
aactttctattatatttgagaagaacttcatgattataccagagaaacaacaggaataggcactgattgccgacggttgcggtacagcttccgatgttttcggacagactccaattctttccttaaagcacttatctatcaatggcacttgattcaagaatcattagaaacaaaaatattatccatgcaaattggacaatacacttggtgaaaaaaaatacaagccttccaattaattatcaatggagcttgtcattaactattaaatggctacagatcatcaattttttttattccacgcaggtgataaaagtggcaagtcaatgatcaagatgctgcaaaatgcatgttctttcactgatggaagtagtaacaaccaacacataaaacatatctggtgatattctccacagtccacacatctaggtgacagcacatacacacagaacggaagtctacataaactatttcgatgaggaaatctgaagtagcaaatacatggatgaggaaacaatgcataaatatgtgtatgccattcaattgaaataaagatcctgacagcaaagtagtttggcatttggtgcaaagcaaaacatataaatcgttgaacttttagtaagagaatattacttgtgttctcaagatgcgcttgtcaacttcaatttgtttctcacccatacccttgacttgacctcctgactgtcgttcaagatgactccacatctttgtcaaccttggaagttgatattccatttgtgccaaagtgacctaaaaggatgattgcacatgaaaatcaattctaaatcaaatgcagtactgtagttagtttcaactccaaaggagtctcaatcgaggccatacatcacaaaatatctatgtagaaattttgatattccgatcttgcatagtcaatgcagacttgcaaaacactaccaaaagcaatatgattttgtacagtgcacgccatttcatgaagatagtcagctaatgtactggcatgcagatttttctaccaagatatctactgttccgatatggttggacctaattactcaacatgcgttgagccacatcatctagaaaagaagggctgttggatcacgaccacaaatgtattttgtatgctaaccgttatgtattaattatagcttaacatattgtctcacctttaattcaatgttgtttttaagtgttttagaaggacttctaaaatcctgcagcaagctgcagggtatccactagttatagttgtaatagttcgcatttgccagagcctaatagcccaccaaagcaacttaccactggtagctggtaaaggaactgtcattagcattttattgaaaagattatgttctttatcacccaaatatagatgagtgaaatgtcataggaatttttataactacaaagacagttcttgttacaaggagaaatttctgctaataacacagctgcttattatacaattaaagccatgtcgcttgtctagaaaatgacaccaagatgttcagttcagttcacctgtagagcagcttcatgtgttgcagccctttggttaaatatgtccagaataagagcagtcctgtcacagactcgaacgcccccaccaaatgacttctccaagttacgcaattgtctgaattgataacatagcaaatgatcaaggataaaatcttggaataagatatagcaaacagggaaaaaaagagaaatcgagtcttgcagaagtaggtaatgatcatcttacccaggggacaactcatcatcgaaaatcacagtctcaacatcatgggcatgaattgcgctcttgatttcagcaactttgcctgaaccaatataagtccttggatttggggtagaaagcctgaacaaaagcagaaaccatgaaacatctgcagctcaaacaagacatgtatagaataacacactaagggaatacaattcatatacattatctcgaaaggggatataattagccgggccggcctaagataggcggaccaaatttacttaagaaaggggtatgtacatatttacaagggaaaggggatataattcatatagcaaaaatgtaatatgattcaacatttcaactggcagataatagactgttgtttgtggcatcttttcatgccatcagggtaagataacaatgcaaaaacttttgaaattaatttatactggattgatgaaaagtcctggtaaagctgtggcacgttttcagaaccatacttcaacgaacattaccatgtccctttgcagaggttgaatttcgtcatagaattccctaaagccagacatagggtgtggcatgaaattgagtgtcattactttcctcagaattcccaatttatgcttttgactgaacagatatgattgcacaaactagctaaccggaattttcagtccatatgatacttttccatcaatattagttcaccttttgcacatgaagcatcacaaagatggacatccctgctatacatatcccccacaggaaaagataatgtgtagcaattatgttttgtttatgcaagaaacgaggttgtatagcaaaatgcatagtcgcataccatttcttaggaagcataaccacactacaccaccacattcaatcaattatatggcacctaacgccacgccaacaaactacaacatgacctgattcgggacttacttttgataggttgagccgacaaccatgagcccggcggtatccgctagctgctccagctcctcaagtgattcctctatactgaacatacttcctccactcctcttgcactcaaccccaaccaggtatgccttctcttgaaaaatctgcaaaaccctccaatttcagtaaaattcgaaccaacaaattttcaaattgctatgtacagagtgaattatccattctcacatgcaacacaacacaggtgagttaacatcccaattagttcagagagaagagtttaattggacattaaaaagatagataaatctacaggaggccacgatgaggtgccactacctccttgccgttgatgagcttgaaccggtcgtgccccggcgcggcctcctcctcctcctcctcctgccgccgcctgctcctcaccggagccctcgctggctcctcctcctcctcctcctcccccgacggtgccgaatcctccacctccccctccccttctccacctccatccgcaactccgggctcctccacctcggtttccgcgggcggcgcggcctcgacgagccgctcgtcgagcgcccgcgccacgccgaagctgcggcgagggcgggagcagcggagggaggcgggcctccgttgacagcacgaggaggcggaggcggaggtggaggggagggggagcgaggcggtggcggcggcgccggtgaagaagcaagcggctctcatggcgcgcggcgacggcgagtgacgcggcgagtcttctcggcgagtggcagtgcggctcaggtggtggatgggttgaggtgggtgaggcgggacacgtggcgcgttctccgccgttggatagcgtgggaaaggagattgggctgttaggtagcacgaatctcgatgcagcccagaggagagtagacactgctctgtgtgtctgaactctgaattttgtgtgtctgaattttctgtaacagcttacgagcagtacactgaagagcaatttctttttaaaacaaaatcaaaacacgattcggagagaaaatgtgaatgtacgatttgaacccgtcaatgaaattttgcaatcaagtaatactccagaaggcaacataatcaccaaaaaaaagaaaaagaagaagaaacattgtgatcacaaacactgttcatcacagacccatcaaagcaactctgaaccttaactgaagttgagtgatcataaataaagtaaggtactaattgctccgtttcacaatgtaagtcattctagcattttccatattcatattgatgttaatgaatctagatagatatatatgtctagatttattaacatcaatttaaatatgggaaatgttagaatgacttaaaacggagggagtaacaaacagtgttccttgccatcaccatcaccaccaacaacaaagccttctgtttgcattgtgagtatatacattatatataaatacataaattacatcaagaacacccacatcacataaattaagaaaaagaagttatgactgacacatgccattctcacatccccaaaataaacaaagtgaaaatcagcataaattaaaaataaaacatcacttctgaacttcacccatggcaggcagtctcacacaaaccctcttgtgcatcatcatcatcataacttattatctacaccaataccacatgattgaagattgcagaagcccatcatatcactcccaataattacttagagaagaagaagaagaaaaaaaacaagaactcgattctttttcctcctgaattgggtggttggttccttcctccatgattgatccatgcagccaagcaagaaagagagagacagagagagaagcagctagtggacggcgatgttcatggcgctctggtcggagagcttgtgggcgtgtggcttgggctgcttcttggaggctgccggcttcgcggttgcaggttgctgcggnnnnnnnnnnnnnnnnnnnnnnnnnnnnnnnnnnntgctgtcgaggctgtcgcggctggcgcggcagcacggccgcggcgtgctgtcgctctcctccgacgagttggaggcgtccgccgccgtcgaggccttcctcctccccagctttggcgacttgggccgcgtcgtcggcagctgcagagaaaatggtgcagaaacagtcgtgagatcaatgttctttttctgtttcttcttctgaagattggatgtgatgaagttgagagtgttcttgccttcttgtattcagccttgggagaaggagcctcgtggtagaagcttggcattggtgtggccttgaacgtcaggctcttcctcagcagcttcagtgcttcctcttgttctttctgcaggttcagattgtgaaaaattattacagatcagcttctgaaaaattgttcagcctgaggctatgctctttagactgttggtaacaattaatttagatatttgaaagtaaacctgattttttatttattgaactaagagatgcttatggatactgcatctctgattctattcttccagctagaagaatattgtgactatagagagcagttccaactaatcatgaactgtttttaactactgttttcaaaagatcatttctcactaatctctagtactcttgctcatataggtagggaaaaaagtttaggtttagttatatgcataactgaaccatgatcaagagtactgacagaacttcagctactccaaacagtggacaaatttcaggttaagctatctgaacctcaaagggggttatggtgtatggagacagagatgaatatacatatctgggaaatggccgcgtcaaaataaaagataaattaccttcaattttgcctccaactgaatcttctcttcctccaaagcttggtgcttctcctccaacttcatgtaaaactgaataaaaccatgaaaataaacaaatgagcaatttccccctttttatccaccatatttcatattttaattgttaataaataatgtatatacttctctgcgcttctcggcacgttcagtacatctgaaaactgggcctgctggaactgttgtggtccttccatttgatgatttcctgcattttcaagagataaatgaattaggcgctgttcaggaaaaagaggttgtacacaacatgaggttggtgtaaaagttgtgaagcttacgagttggtgagagtagaagcattcccttcgtcagtattagtagcttgcagtgacttccttgtagttgcagatgcacttctctgtaaaaatatatagaaggaattaatgattcatatgcaagaaagcattcaatttggtcagatttatgagaaacttttgtttctttagtgagaaaaatacggcacttttattctactgtaaagaaactgaaaagacatacagtatactttccatatgtttcagttcacaaatttcatgaattccattacttaagtgaaaaattaaagattcatgaaattgaacatgtcaaagaaatggaattaccttcatcttctttgtcgaagttgtcaagacacactttgcattttggaagacatttccatttccatttccagcacaagctttgtcatttgacagatcaggagggtggccagtagcatcatctgtctctgatggagcagcatcctttgcttcttgaacatcttccatcgatgtgactgaggtactgtcacttcctgctgtttctgccattggagacaacagatcctgattttcctgtttatcaccattgttctcatcactctgctgcatcacatctcccttttcagcattattagcaggagatgcttcatatggttctgaattcactggctctgaattcatagcatcattgttgtcagtagacttctcacttgccaagggaacaacattttctgtagctccattggctccatcagattccaaaggttcagagattgaattatcagattgctcaactagaacaacatttactgtggcaggcacttctgatggatgaggaacacttgtatcatcagacacatctatgttgtcactagcaggagtgatagtaacagtagaatccagctcctcattgaaggattgaggtacaatttcaatacccatactactcctgaagaagtgatacttcaatgagtacttactgttgataaccttcaaaataaagatatcacatgttaggacaatatgatacttttttaatcaaataaagacatggagtaagggacaatattgaccagagaaaggaaaataggaccctgcactattttcaaagaactgaaattgacaagccaactatgacaaaatcatttatcctccctgtggacactgaaattatttactacctaccagggtccaggaacatgacatgcataggtggaaaagaatgacgtgtggagtttgacagcatatctgattgaaagctattattttattttgagatcattttattttgttttcttgcaataagttgtgggaatgttgtcattattaaattgtgagcaatcatattattttatttggagggccatgcaataagttatggaatgttggcatcatcaaattatgggaagacaaagggaaaaaaaaaaggagataaaaaagatcaccaagaattgacccctgtactgctacaaactagaaaaaagaaacaaagaattagagcacaagacgtgcacatgtaaatcttgaattgaccaacaaaataattatttgataatttaacatttgaaagtgctcggtgtcctttaaaaagcctagaactgctgtgaattgtacttgttcactttattttaggatttagcagctaagacccatccaatggtaaagaaatacaatttggaagtttgttggcatctaatctgcatgtctgttaaagcaacaaaacagcaagatctccatgaagattccggttgtgcatcttgctaatattataaaattttatcaaatttagataactgaacatttgacgacagctggtacagggccatctgcacctcaacccaaaattaaagtagatccgtacgcaacgagactgatgatgtgtgcagaattattcttgacattttgccaaccatttccaatgaacaaactgaatacatcctaaattattctaaacaagttgatcatttctagtgctgaacaaaatgccacaaaacgtactatctagcatgtattaagtccgaagtccaaactagtatgatgttcatatcttgtaagacagcgacatcacgacaactcaaagtcctgtcggcttataacaatacaacatgacaaagaagataagattctcaattgcgtcattcatgataatgagatcaaagactgacatatctatcatcagctctgcctctttctgatgcaaaaattaacagtaagtttcagagcattgagcgtcctttttccaaaattgagatgctttttaatctcaacgctttgctccgtagctgtacttcccattatctaaactacgagatgcagagaacgacaagagggctaaacagtaaacactttcaccatttcgcatcatcatacaaaccactaaacaagaaatgaagagatgctctttctttcctaactatagctagtagctaatgcaatgtaagttcagataaaatgttaaaacaagagtaaccatcaacaacaacagtttcagataaactaataaacaagagtggcaattagcccaggtttcagagttcagacaaactgtcaagcaacagcagcacttgatgcaggatttgcaggttcagataagctgctaaacaacagagtatcaacactttaacccccaaaaatctccaaaacaaaaccaccccctaactagaaatgctaatcgatcgacacatacagaaaactaaaacaatcagctcatcatcctacttcatcatctgagaagcaaaactgaagagaggtcaccaaccttttgcgtttcttgactcctctcttctcctctcctcttcttggttggcttgttgagttcgattcccggataggcacagtgaggtggtggagggtatttgtaacggggaggaggctgtggacacagtggtgggttcgttggttcaaaccgggttagctcggaggcagctttccatgagaaggggggggccttgcctttgctttgctttgcttttctgcttgggtccctctgctgcctcctcctcctctcttcttgttagctctgctttttttgcaattgttgcaagctgcagcttaggctgtgtttagttcacgccaaaattgaaagtttggttaaaattgaaacgatgtgatggcaaagttggaagtttatgtgagtaggaaagtttgatatgatggaaaaagttggaagtttaaagaaaaaaataggatctacacacggtgttagctgcttggagtatggtggtacgaatgggtaccgggtacacggttggttcgaatgaattgggcggcctcttcttcttcctcctgccttcctagcggttgatcacttgattgtcagccatcttttctgtgttttttttccctttcttgggaactgcagccatccttcttgtttgtgcaattgtgtgatcatctccttctaaatcaccggcatgtaaaagaggagaaaaatagtttctcgtgaaatagttccatttagtttactgttgtttgagtcgtgtcgtaaatagagacctaatgttgtggttgggtttagagagcaacttaaaaaatattgataggtaaaaattttatatctgtgtttttagctgtttaaaagcaaatgctagtagtaaataaataatgaaaaatatattaaaatcaactctaaaactaaggtttaaaatttaaattttagctgcggctgatggtaagccaaagaaaaaacgattctctacggaaattttaagggttaactcgagatgtgtcatatatactccctcgaataaggaacatttgacgtcgggagaactacgtcaaatgaatttgattagagtgagtaacaaaagagttaaacagtagattaggtaagttaagctttactgtcattgtgggtagagtgaaattatgtaagcgtgaaataaaggaacaatacatttcacgtgaaatagttcggtttagtttacggtcgtttggatcatgtcgtaaataaacaacgattacttttctccacaaaattaactcagaaatgttactatggtcccgttcgaatctgattacaggatgaagattaagtacgcacgtaaaacgaaacaaatcatagttaataaagttttaattattaaaaaattgaaaaacagatttatttgattttttatagcaacttctatatatagaaagttttcgtacgaaatatactatttagtagtttgaaaaacgtgctaatggaaaccgaggaaaaatctggatgttgttggagtttagaacggaccacatgatatacatgttccgtaaaaaaaaaaaagacaacctctaaagatgaatctggaaaaatgcttatttaggtttattccccgaagttaattttttatgagatggaaggcgtattgaggagttaaacttatatcgattaattaagtaaaaattaaagtacttttgattatgaaattgggattacgtgggatggaaaatctaatgatactgtcgaataattaagtatagcaggtacggtttgatggtggcgattagagcactgtgttgtcaagataatttgacggttggttggcccggaagttaaattagttggtcgatgactatttgattagttggctgattgctatagttaagccttgtttacgcatgtcgacacttcgtcgtgataggataggtttacagttccatggtcatttcgaatcaacagtgttttgaaggctat

SEQ ID NO: 20517 - DNA, 1224 bp, Oryza sativa
aatcaatatgctttcggtcgttctggtaatagtgcacatggcggtgaggtggttcatcaaaggcttgaccttgatacgacctgcgatccaatggaatagatggatcccacatgggccatggtggttgtggctgatcagggtgagatacccatggttgtggataggtagggtaagatgggtagtaatatggtggatatagtggcaattggatattgctcataggagttcttgtgttgtaattccattgtataggactatggaaggttggctgctgaaggcgtcccatatgcatgggttggtaggttgggggtagtggtagtggtgttgagtgaaatggtggtggtattggtagagtatggaagtacactgaagcattccactctagtgtcgaagtggttggaaatgcaggtggtgatgtttgtttagacaaagtagaagttgataaagcacagttagcatgcctaagatcaaagacttcatgtttagttggtttagatggttgtttatcactcctcttagctggttgagtcactgattgtgtattacctgtaaacaagaaaattgtatcacctctcgcccttacaactggagaaagtccaatatgtcctatataaacctgtctcacctctcgcccttgataactagagaaaatcccaatatgtcctagataaactttagactatgtatcacttcatccttgttagcttgggcctgggtgtcacgcccagaaattcccaaatagaattccaagcagaatgtgcattataatccccgtccaggaccagccggggtacacaaacgacaatgttgacattcagatccacgtcttacaaacatcataaaagtcttacaaaaatgcagcggaaacaaaagataactggagctaagccttgactaaactgcagcgggaacaccactccacaggcatcctcgacggcacggacgaagcctactcctcggggaaaccttcatctgacacaaacccgtcctctggggttgggaaaagtagagcaagactgagtactacccactgtactcagcaagtcataccggaataggagtatgatgcagggaattaacaaagaagagctagagtggttcatttgcataaatactggcatttaaaaacaggaattgaatgcgaaaaggttgtaataattaattagtattaaacatccactgtccaacgctaacccacgttgcgacaggcccaaccgtccacct

SEQ ID NO: 20518 - DNA, 1811 bp, Oryza sativa
tcctgcagccccgctttcacttacatagttacatcaaagctcccattgagaaacagaggtctttctgataaaaatattaaatacaaatattgcactggaaaaatttcaggaaaaatgagtttgtgatatccgtatggaacggacactgtacgtctgtacgaaaatactacagcactgacaatcaaccacaattgcatctgagttctgagatgattcatcttttccattttactttccaagtacgtactccttaatcaatatatcgatataagaaatacaattctgaataaatctgaccagagtgagtagatattacaatcaaagtttcccatttacttgtatgatgcaaaacaacagaatattatctatcataatacaaaaagtgttgataatttagcatagttagaggttttgttgtgtcctcttttcaaggttgtttcaatgaaaacatctcattaactaattctgcttgaaggaactaatccatgttgtatggatctagggtatctgatggaaagaggccgcccttgtttccctttcagtaattgatcatagtttataaataagactacggcaattacatcctcatggacatgcctaggattatccctgtccatcttcaagagatctgagtaatgcaagttgtgctttttggctgctgcatgaagagctgcttttactagcattttggcacttccctgaacagaacagaactaggttagcagcagtaacagttatggccatagcagcaaacttgcagccttttaggtcatcaagaaccagagtaccaaacacaaatatgtattgtatgccttagaacacaggtaactaaatggaaaaagaatccattatacacctctcaagcctgaaatgagaaaagtcaactaacagaaacatgttttcatcctgaatcctgaatgaatgtggaggatgggcactaaaattatattacaaggcaagcatactaccagcactgttttcatgctaaacagaactctttttttttgcatgtaaataaatcttgatcatatactgcagcaggctataaatctcgagtacttgaacataaaaattggtgttctttccatgtaattataacatttagtattagtatggacctacagtacttagtaacatcacttggacctacattcttgataacatcacttggacctacattttagttaatttatggaactacaggagcgcaatgagtgatacagctacaatttgcatatagctaatacagtcataccacgtgaaccaaatgagtgaacatcattttttttttgtgtgtgtgtgggggggcacataggcgtatcagaatctcaaatattgctatatgcctaagcctttttactgtgcgtgaacttttttgcaaggcctggcacagcataaacattttgtaaattgactggttttagtcattattgacaacataagaaagctaaacaatttaaatgaagcactatataaacaagatgaaggtgagaaaatagatagttggaagcttacagaagcttgatggtttttaacaatctcaacagcttcctgattggacagatattcccatagaacagctgagccaaatatgatgaagcggtcacttggtcgaagaacgcgtgaaacaatagatggattggcacttagtattggtttgttgagtggttccctgctatactgtgggtatttcaagtatgcatcacctatcgctctcaacacctgcatcatgcatacaatgcataagtagaacatataagattcaaatattgtgacacaaatgaaatggtaacataaagctgacctgcacg

SEQ ID NO: 20519 - DNA, 11182 bp, Oryza sativa
ggtgggccatttcccaccacatgaaggaagaagccgtgggatttcatgagcaatatgtcttcgaggaagtgcaggactagcctctgatgtcatataaggctgtgtttgagggagaggggattgagaagattgggaagatacgcaaaacgaggtgagctattagcgcatgattaattgagtattaactattttaatcttcaaaaatggattaatatgattttttaaagcaacttttctatagaaaatttttgcaaaaaatgcactgtttagtagtttgaaaagcgtgcgcgcggaaaacgagtcacaatctcccctttctcctgtgaacgaacgcagcctaagtcctaattacaacaccaattagctgcattataataggaattacacgagtaattaggttcaaaaagtgaaaccaaagtaaagaagcgaaaaattgaaacctgtgatcatccacttgtttcttctcatccttctgtctgacctcatcctcagttatgctgtctggattttcttccaagataatatcatcttttgtcatcagtctagtcatttcaccatagaaaccacaaatcaattgaatggtaattgtaggatttcttggatcattccaaacaccagtcatcaaagcagaccctgcatcaacagaaccttcactctccacttttgcatatatctccttaagccttgacaagtgctcaatgttgataaggttattgccatgcagacccactctttgcagactgagaccaacattgaaccttagcttcagtttttcaagattaggcattgcatctacctcaactttgagccaaggtacagtgcacttgagtttaaagtacttcaaagctacgaatcctcctttaccaaaactgatcctttcctcaggtgctctttggatatacacagagagagaagtgagtgcaggtaacacactaagaacatcaacatcatgtcccaacatctcactaatggcaatcttcaagatactgagattgttcagttctttgattcacctaggtaggcatgaaaatatgcatgagcgccatgaaaattcaaaccttgtcagaagaaccggaggagatgaaacactgaagtcatcagaagaaatttccataattgaagaatcagcatcatccaatgaaccagtaaataccagaattagagacttcatgtttttgagtttattgagaacagaccctagaagtttcagattggcaggctgtccactagaacatgtcatgtgaagattttgaagatttaccatcttcccaagatccacaatactttctgttgagctcccgctgagatcaaaacaccctaaagtatgaagagacttcatcggctcagtgaaatggggcaaagtagtctcacttggaagaatcaactgttgcaatcgtggcaaataaaaaatatctgatggaacataactcaatcttgcttctatttttaactttgccaaatattgcaactgtcgcatctgcattggtagccttatattcagatggcatgcatcaatatacagatactttaatccaagcaactcagcaatttctgagaggtcataagttacatcatcatcatcagcagataatcgaaggatcaaaactcgaagaactctaaactcagcaatagaaggtgtacagcggagaggtccaaaaaagacaagcgtgcgaacttgtgaccatctcaacccaattggtgttgtcacatcatttgcattgccaaaacgaagggacaaccgacgaatcttatcagcaattcgcacatctgtctgatgattatcaattgcaatggcaaaattgtgctggactgccttagaccgaatagaatcaattatcatgtaatgcactctaaaggacaacacttcattatcaaacctggtctctacaggttgtattagcccatagctgataagctaatcaaaatagatcaatgccaccctcttctcatcatttccatcaactgtatcaataaatccttctgcaaaccattgactcaacagttcatcttttaaaattatatcgtcttcttcatatattccgagataaagcatgcaggctttcaaaggatgaggaataatattgtaaatgaggtccaaaatcccttccaatttagaacttaatgattttttttacaacattccattgctctgtgcttggtggcaatcgtgttaaaatactagctacaatagccatcatgagcggtaagccactaaagagttgtgcaatctcagaagaaatttcctttagatattcatggactctgctgaagaattcatcagattcaactttattaaatggttccttcttaaagatgtatttgcggttatcaacacagcacctctgagctacatgatcaatttctgtagttatcaatattctactgtaaaaattctttggcaaagtctgattgatagtgttccatatatatgatgaccaaacaccatcaattacaataaaatacctgccaaaagtcataatttagctaatccaaagtctcaaaaaataagggatcatctaaataagtgacgatataaaccagggcttaaagtagtcagattttttttttttgaccgcaggatctatacccaacgataaaaaaaaatctaataaacaagttactaaatggaggaaatcaattactaaaaatggaaaatgaacaattaaagctaataaattagattatcaaaatgataagccaattaaaagaaagaattaccttttgtcattcagatatgacttgatctcatgggataaattatccacctcaacagtaccagtaccaggaggatcatgctgccgaacttgtgagaataaactaccgagcaccctcttcatgtcaggtttccgagataaccttagaaaggcacaacattgaaactgaaatccaaacttctgataaagttcttcagcaagggtggtcttgccaacaccacaaagtccaatgatagcaatgaccttgcattcttgctgcccatcatttagtaacccaacaagtttatccatatctttgtccataccgaggtagcagcgttggctggtctcttcagctaacgggagagttaaagacattgttccatttgattcccacccggaacgtctctctaaactaccaagatcataacgcttataaagcataatcaattccttcaagcaagaactgaaacttgagacctcatcaacaattttttgcctccatgacaatttcttctggagctgagaagcgttgaagcgggataacttctcctggagctgagaagtcttaaagaggggcaatttcttccggagtggagaagccttaaactggagagctctttggatcttggcattagcggcagcatggaaaagctcatcaacaaagtcgtcgatgtcgtagcacagctcccgcacctccttcatccagtagttagcctagaagggagggccctccagatctgatggttccatcagataatcttctatcaaaacttggaggccgtctttgagcacacctagcgctttcatctcttccttgtgcagccgcagtccaggctcggagagcaaccggaccagtttcccaaaaacaatatgaatggctcccagcgaggcagtgatgggaggatccatctccccacccctctccatcttcccaacactagagaacaccaaataaaccatggggattgaattacggatagcaggaaattaaacgaatagcgagaaattgatgagagggtgaagaacataccatgcaaatagaatcgaaatcgatcgggaattcgggattatcccatagctatcgataccttgaacttggaggacctgtgcaagggcgggctagggttagatcaagacaaggatatggtctaccagtgagaagtggagacgggcactcaccaagacgaggtttcctcgccggcggcgggaggtcgcgaggaagcggttgtcgccggcggcgtcgctcgagacggaagtacggaagaatccgacgccgcgccgcgtccacgaccaggagaagacggcgctcgagtcgagtccaatcgacacggaacggctccgggaagagacgatgccttttgggctgggcctcgactccgtatcagttatggttatggaccgtgttggattccgtcctcgtttctatttttttttctggaataagttcattttgactcccttaactagtgtaattcatatccctaaccctaaaccataataccagatatctcgacccccaactattaaaacctgtgtaatttgactctctcggtggttttgaagggcggtttcgctgacgtggtgcctatatgacaatattgacctagtcttcgttccacgtgacgttgatgtgatgcttatgttgaattagaattaaaaaaaatctgtggaccatttgtcattcaaaaaaaaatatgggacccacatgctatcctctctcctttttcctccctctctccttttttcttcaccttggccaaagtggtgacagaaagcactttttcctccctctctccttttttcttcaccttggccgaagtggtgacagaaagcactggaacggcgacgacggcatgtgggcgagtacgggagggtggctgtgccggtgcgacctggcagggccgtgccgttaaatttacaggccctgtacaaggctctaagtgaggcctaaatcaggtatcaaatatagctaaaataatgtatatactacagagcaaatgcgatatattaagaatagtatatttttttaactcttgttttgcataatcagaaactgccaaactaaaaacggagaatatttgttgctgttgctggcttgctgcttagtgccttgcatgttggttgcttgctaacttgctattagctagatgaatgaaaatatgaaattggagaagctggctggcggcctggcgctcgcaggagacgagacgttcagactcaagacgaattgaataagtcacagatacgaaaacgaaagataatacaaaaggctgtggggcctcggggctcggagtcgagaatacgaagcgccacgtacgcgaagtcgccatgcggagacatgtgtggactcgaacgggttttcggcgctctagcctcacacgaatacatgggccttctctgattgggctgatttttttgaggccctgaaaatttggaggccttgtacggtcacatggctcgcacgcccacgtgcacggccatgagacttggtgcacgtgtgaagggaatccagggcgagggagggcacctatgcagctactacctcaacgacatggaaaaaagcaaacagtggtgagattcttttcaaagttatcttaataatataatagaatgatagattttgtgccgcataaaagttagttgctagtatcaagcgtagcaaacctaccaccctgcgggtcccgtcaggaagccgctgccctaaaacgggcacgccggcactaccgccatatccctcaactttctaccgtatgatacagctgtagaagcaatccccctcaccctctacccccaccatacatacgctgattcttattaggatggtcgctatctactatccatgaagaatcaaatggtctaaatagcatcaccatcaaggatgactagaggttggggtgcgccgcctgtagacaattaagttaagttaatagatcgtaccttgtcttgtatttataggaaagtgcattatgtaggacaagcacctaaggtgcaaagctaattagggtggcataatagtggagggaaagtcaatagtttacttccatagtgatgaattttacagtcgagttgtagcaaaagaattatcctatgataacacaaggcattgatgtgctcttcatagaacactaattgttgcttagatgtgagctgccttatagaagtggaagacgcaaatggactgaagatgtatgttattctgcactgcaaaatttgtccatcatttctttaggctgcatcgaccatctgttgatacatgtaaaaccatggtggttgaatcatttcctgctgtttggacctggatgttgattgttttcttgccttccatgagtggctgtatgtacttctgggaaaattccttagtaaagtactgtaatggagactgcatgttagctttttgttacaggcataaaaagaaaaatagctactccctccgttttatattatagactttttagtattattcacatttatatatatgttaatgaatctaaacacatatatgtctagattcattaatatctatatgaatataggcaatgctagaaagtcttataatataaaacggaggaagtattaattacagttactaaaagctgaatagtatgcggaagaacttactatcctatcttgctccatgaacgtggtgttgatagtgacaatgtagaatttgcttgattggctcaggaactgctcgatttcagttctttatgtcagatgtgacttcaacgttttttgcacaaaagcacagatccttgaattcacgtttggtggtccctatgggaaaaataggtaaatggtagtttgtagagagtgatagttataatcaggatgcatacgatcgaagattgactgtagctggtatgctacgttagcaaagggaactaaaatatataatgtaaaaaataagaatatagatgtttgaacagaacggtgattcatagatgaggttttagattttatgagtatatggtgagatgtatctttactacataaatgcattagggggtgtttagatggggctaaaactttttagcccatgtcacatcggatgtttggacgctaatttagagtattaaacctagactagtaaaaaaactaatttcataaatgagagctaatccgcgagacgaattttttaagcctaattaatcaataattatcaaaagtttactgtagcatcacattgtcaaaatcatggcgtaattagactaaaaaaatcgtctcgcgaattagtccaaagttatggaatgggttttgtaattagtgtatgtttaatactctaaattagtgtccaaacatccgatgtgacagggacttggaataagtctctagaaaccaaacaggcccttagccatctaatcgtgttgtcatatgatagctgatgtgactgtatcatgtccgtggattgtgtgattctattgtgcccaggtgtctgcacttaactgtgaacagaataaaatttcagaaggcagtttcaattggatagagatggatactaaatttacctgatttcttcattccggaggcaatatcagttgtaagctctttgccactgtcggaggatgtaatctgaaatgcaagaatgggaaaggagcataagtgaaatcatatatatacaagtactcacaaaacggttgcgatttaggtggttgaatcttagcatggatgatacgggtcgaaccaagacttaaaaaccctgaaacaaatgctgactataagttgctaccaagatgaggataatagcaggggaaatagaacagcaggccaaatttataatagcatgtatccaattaacccattttttagaataaaaaaatagtgatggtgagtcgctgacagactgccaccaccactattttatcctagtagtatagattaaatatttttagagcaatcgtgatttattgagtatacgtgaccatacgacgtgctagtcctggttttatgctgtaataataaagtggtaaccgagtaaaataagagcttatataatagtaggctataagctagttgcaagaagataaatgaggagagagaacggcagcgggctacagatttatagccagctgtagtacggactacaagatacagtgtgtgtatgacaggtgggaccaaatattaataggtagtatgtaactattgtatgaatgatctattagggcacccacaatggttatctataagctctctacaagagatccatgtcagcatattttcctacttagaagatattaaatgaagagagagagcaaagctatctactaacttagaggtagtctatagagaaaaacgaggcaatgcatgagagagctatagatacccatgtagacatactattgaggtggtttactattaatctagtctattactgagatgtgcatgttttatagataacaccttactttaccattgcgggtgctctttaattggctatatagatgaattggagttattagttggctatagtattaaacttgctctaagaagctcaaactacaaccggagttgtcgatctccgatccgacggctcacattaaccgagataccccttaacccgctccaaaatatcctcacccgctaaacccacctccactctcctccacccatggccgccgcggccatggccatctccccttccatccacctccacctccacctccacctccaccacccgcctcgcctccaccgcctcctccacctctccaccacctccccctacccatggctctccgcctggccgaccgcccaccgccgccgcgtccccctccgccgccccgcctccgcgctcgacctccgcccggagccctccccttcctccgactccgacgacgacgccgccttcggcaccagccgctcctcctcccgctccgccatgtccctcatcctctcccgcctccgcaattccggctactcctactcccccccggagctcccgccgcgcccgccgaggggctcggtggaggacgtgttccgcgtcgacgacggggtggtgccgaacgcgcggggagggttcgacgacgacgcggagtcggcgctggtggacgcgcggttcccgtgggagctgccgatgccgccgcccgaggcggggcccagggcggcgaggtcgaaggcgtggatggcggagctgacgctccccgaggccgagctgaggaggctgaggcacgccgggatgaggctcaagtcgaggatcaaggtgggcggcgccggggtcaccagggagatcgtggagaggatcagggacaggtggaggaacgacgaggtggtcaggatcaaggtcaccggcacgcccgcgctcaacatgcgcctcttccacgagatactcgaggtgcattgccgatttcgcaattattgtgttccttgaagttgtttaatgcagcactatagattattgcaagcgggaaaatgctgaattgctggaacatttctcagaagttaaactaattgctagacgctcacgctgcatcataaatttagaattggtgaccttttcagtttttcttagtggagttgtaactagtattgatgccctatgtgaactacaggagttttaggatttgattactggtagaattctttgtgatttggtacttgggaagcttaagcacaaaatgtgaggttgagcacggtttacttcaccgctttgtttcataaattgcttatgaagttatccctgagcaataccatttagcctgtaaagagattcggttgttgtgatgaactggagagtgaaggtcgggtgtgtttacagtggttataactattggtctctatgataattattgatactgttgtttgctcactccagttcttcccagctgttgaatttgttcaactgagcacctgacatccaagtgctattatttagctttgttgtaaaaaggttctgacgaaaaacgtttaaatgccaagcaaatatttcagcaaatttcatgcttataaaatcaaattttggaactaaactgaattgaggactaatgtcgaaagcaagatgttgtatgctgcataaatattccatttttgctgctgtaatgtagctcccatgataaataacagagaaattgacttaccggctaagtggaaattatacaaccgaaggttactgtggatctgttaacatgtacactgaatgtataaatttcttaatatggtatttcatttcttcattctgcaaccaacctgtcagatatttttggatatatgtgttatgtgcctggtaactctagttaatctgatctctgtttcttttgattgatggcggttagagaaaaacagggggtttggtaatatggaggtctggaacttctgtttctctgtacaggggagtagcctatgacatacctgagcccactaaaggaacaagtaagaatacacaaactcttggtatgaagtcctccatcaaagagccacctggtcattcgttgctgcctaatgagaaagtaaacgagatgcaagacaacaatggagcattggtatctaatgctgagaaagatacactagttgaaccagttccagaaatcaaatatgaagatgaaattgacaagctattggatgagcttggaccaagatacgacgactggccaagacctgatccatcaccagtagatgcagacttgcttcctgcaactgtaccaggatataagccccctttcagagttctaccatatggagtacgaccatctctcagcagaagggacactacaaatttacggcgtcttgcccgtgggctgccacctcactttgctcttggtaccttttctatcatttttagctaattattattatttcaatcaattcttactatgttgtagacttgtagtgacccttttcttttctgatgaatattagggcgaagcagacaactccaaggcttagcagctgctatggtgaagttgtgggagaaaagttctattgcaaaaattgctctgaaaagaggagtgcagcttaccacaagtgagaggatggctgaagatataaaggtatatatacactctttaactttactatccccttggcatatttagtgctttagagcttagaaatgttcatcgatttggcaacagcacagtacaagtttatgcatgcaacataaatgtttcgagtcctttctttcacatatattgagataaaagatacaacatcaattatattcctcctttttttagaaccctatacttttatgcgcctcgttttttgcctttcatttccctcgaaaaagtctgcatttcatttgtctagctaatttaatatgttgtgttcgtttgagtttgagagaatatagcctatggaatctaggaccttgatgtatttattagaagtcaattatatgttatatcattctctttgatctggaaagagaccatgcgttgatacatgcctggatgtttggtttctgaatggttatttgtagctccagttcatttgtttaggtggggcagaagatagctactgactgatgattccaaggagctgagaaagggctgcaggaa

SEQ ID NO: 20520 - DNA, 5841 bp, Oryza sativa
ttcctgcagccctttcgacaattcggtagctgtccagaacggtgatgatcgaacctcccttgatggcagcgacgccaattctgacgacgagggtgactactctgacgaggacgatgatgaagacgacgacaatgatgaagaggatggttttgattatgaaaacgatgatgaggatgatgtgcctccgactacttctgatggtgatctatacaaccacacggattttggtagttcagacagtgaaaactatgtttcactgtcagggaggggtgacccagatgtaaaaagtaaagggagtgcccttgacagcagaaactcgtacagtgagcaatcaactgaactgacaaacacatgtagttagatgcactgcacagcacgtaaataggactactacccaatttatttggtcggtgccatcgttggctgctgctttcattacatcttttggagctgcattcactggcgtctttactgcaagctggagcctgattgactttgatcgttggagctgatttcactggcttttttgaccgaaagtccagatctacacgcatatagaccaacatgaatcttgtgcgtgagttcttattatggactatattttggtccaatttcattgcttagaaatatgttttacacttttacagatcatcaggagcaccagcagagtaaaaggagcaacttcctgaagccctgatgatccttgtaattagtactccctctgtcctaaaatgtcctaaaatataacaatttttagtcctcaggatttgtcctaaaatataataacttcaccaacattctcttcctaaccaatcacaacccttcaccgtttacttttcctacctaccttcactacctatcccatcacaatcctttaccattttctacatactttttcttaataaccgtgtttaactctaaaactttttatattctgggagggagggagtaattgtttaaaaggtatagagaactcctgtgttccaaattaaaagagtcaaatagttccctccaatacatgttagtataatacactctcagtttgatcaattttatagacaccataaaagtatgtttaataatggattcaataaaactaatttgttatcgtaaatgttgttagtttttcgacaaatttcgtcaaacctaaaaaaaaatagtttgtctttgagctggacgggaggagtagattttctttgaaccactgtaattctctgacgtggcgagcaacgattggctgacccacgccggatccggcccggcccggcccacgaacatactactgctgaagctgcaaaggaacagggctccgcctgacgcggcggcgaacctccgtgtgctgccgtcgtgctggcgctgctccgggcccacttgtcatcgggagagagagtaccagtacagtagaccagagcgctcgatccgatgctgttgatcgcgtaggataggatacaccccacaccacccggtggctgtggcttgggcttcgcttcccaaggcaaatgctcccggaggaaacgaaatttgtcaacccaaccgcgacacacgccgcgcgtagtggaattactactagccatgggtttttctttcttttttttttctctctttcagtagcaatgctcctacactagggctaagttcagttgatagtgttgagagtgatttgcgcatgattaattatatattagctaatttaaaaagcgtgaaagtaaaaaaacgagaaatgagagttaggagccttaggagaaataactaagtctaagcataggtgcaaatcataaataaatggtgcgagggatggaattttacgaataattacttttaaaaagtactatgaccgttctaaacacacacaaaatagttggtacagtatgtaaaaatattgtacatgagtgataagatcaaaggaacttgaaatcatgaggtcatgtgatttacttattttgttttgttgcattctatgtatataatagtattatataatttatcgacttattcaatcgaagagtctggtagcaactccgtgttacgaattgtagaaaaaatgacgtggaatcaatattgcatagtattcaatatcgtgggtgttttaatttttttcatcaaatagtcctcccacctagattactctagttgggataacacagacctaccacacgagttagaaggaaaagattttttattggctccaattgtctagtctaaccaattaacatttcttcatcatgttgacaattattaggcaaaattaagtttatccactgtagaggaggcaaatattcatattatgcatccgttgtgtacatggtaattttagacctatattgatgtcttcccacttctcttaatttgctccaataaaatagtttctctctgttatttttaatttgatattgtaagtaaaattggaggtgtagactagaccgaagaatatctaatgtgtaattaaggtttcctccccacttcattcgtctcataaaacccaacttagaatgagattagctaatctattactataatgaatatgaacgttctcctatccaaattcactgtaatagattatgttccatctcattttagtttaggttttttttcgacggagtatgttctaccaaacagattagttagttagtattgaaattataagcatataatgatttaatttattccataaataaatcatgacattgcaaatgtaaactaccataaacgcattattagatctatacatgtaaactaagcagtaaaacatgaacatatcaaatatgcacaacatactgagcacgtaccgaggtggcggaaagaccggttgttcggcaagaactactcgcggttgcgggcgtcgacgaaggcgcgcagcacgcgagcggagaggaaggcgagctgtcacggacgaacagggagcagtcgtgcgaagcgcttcccaaaaaccttattactgtcgccttctcccggtgcaggacgtcgaagacagaggttctggagacctgctctcccgatcgccggtgcacgccgacgagcgggatggagtagtctacaagcgacggcgcagcacagagtaagaggcaaaccctaaattgatttcgcgtatcttgtgtgaaggcggcgactcgcttgatcagggcgcccgcacgatctcccggtgcaggacgtcgaagacagaggttccggagaccagctctcccgatcgccggtgcacgccggcgagtgggatggagtagtctacaagcgacggcgcagcacagagtaagaggcaaaccctaaattgatttcgcgtatcttgcgtgaaggcgacgactcggtttatatagagataggtcgcttgatcagggcgcccgcacgatatatagagataggtcgcttgatcagggcgcccgcacgatatatagagataggtcgcttgatcagtgtgtccgcacgatatatagagataggtcgcttgatcagtgcgcccgcacgatctccactgatagaaattgatttcgcgtatcttgcgtgaaggcggcgactcggtttatataggataggtcgcttgatcagggagcccgcatgatatatagagataggtcgcttgatcagtgcgctcgcacaatctccacttcgcaaaacaaaaccgcaaaagaaggctaggcgaggcgagtgttccccctcttctctccaccacacatgctttaattggctaggagggcatcatcccttttaaagaggtccccctcttctagaataagtaaggtggtactaaactttccatgtatactatctcataaggtgggcttttatgattttctaaagaattaatctttgaatgggttaaggcccatctattaattcaacatttagcacgtcaaaacaaatgcaaggatccattcgcagcccctggctagccgctagctactcccaattactagtactaatcaaaatcaatttgcatgtactattaaaaaacaaacaaacaaacacttaccttttgcactctaatccatatgcatgtgactctcagaaacaatatccacgaaaccgagcaaattattaatcaagcaaacaaacacatacctttcgtactttagcgcaaacataatctaagctagtgtccatatcattaaaaagtacacttagccattctcacaaagtactcgtacttgacaccggccaatggaagggacaagcaaaataaaattaaaaaaaaagaaaagaaatccccctgaattccagtgaagtggccttcacgtgaccaacctaatgagtggcgatgcgttcagcttcttggtgagattgaactgcacgtgacatgtttcaggcttgagagtgctaggttgagtgcagctgtaatcacacagcactacactacaagtgtctggctgcattgcaagaagatccaacagaaagaagaaaataagaggaagaaagagaatcaaggttcaaggaggattttcagcaaaaatgaacgaaaaagaagtactaaactaattacagacagacaattatacatatttatttggtaattctctatgagtggttgtgcccttttacacaaatctagggttttgtctgactactatatattagaaaattaagttaatctcagcaatagtttgaagtataatagtctgtttgacacagcttcagcttggagcttagccaaacagttaacacttcacctaaaatagaaacggagctaggtgcagcgttctcataaaataaactaaagatgtggacctagatttagactactccataactcatctttaaacccaactcttattttaggagttgaagttctatcgaacaaaccctgaattacaacaacacagccaccacctctctttgcaagtctgtttgggaaagtccgaagaaaaaaggattttgaatcctccttttcctttttcccttagaaaaataactcaatcaaaatccaattatctactctacaagaacgaaacgcttgttatgcctaatatacttagtttaacctgtatttgttttaattctgttatttatccgactagttttttcttcgccaaattgcccgaagcttatgccattttcaacccaatcgtggattttatgcctgtcatacctgtactcttttttctattagcctttgtttggcaagctgctgtaagttttcgatgaaatctttactactctgtctgccaaattgaatcatgtattcattctaaaaaaattcgaaaaatggataagagccgagaagtcttatattatgaaccaagataaataaattgacgggacgtttcagtgcaaacataagaacactatatgaaatctccgttcaattgatagctcaaattttaatcattacatttaagcacaaaattcctgagagtagaaatatatctaagttgtcctctcaatctatccaattaaacccacaccagcaacaccaccacccccaatggaaaccctatttaccaccgacatcacaaaacaggacagccatgatggctccaacatggaaaccccatctcttttcccacaaaaaagccatcattaataaggaaaagccactaattaaccaacctatataaaaaaaagcacaaaaagaaaaaggacgggaaaaaaggcgagaaaaaaaaagagaatttccagaagcgcgtcctgacacccgtcctccccacgaaagagagagacacaccgaatccaactccccgaaacccccatcccgtgggccccacacccacacctcacactgacagtgggcccgggtctcccaacccgggcccacacgtcggcgagacgggaacaccgtcccattcctttgcctcctccccccacctatgctgttttttgttttgctttgtttttttttgctcccactcgataact

SEQ ID NO: 20521 - DNA, 1928 bp, Oryza sativa
aggagggagggagagggaggcggcgctgctgctggtgctgatcgcggcggcgtgcggcttcgtcgtcgtgctcctcaacctccccgacggccgcgccctccccggagccggaggagtacccggtgcgcctctctctctcgtggaatctactacttgctcgttcccgttcatcctcctccggcggccgcccgcgctgatgaacttcgcgattcctttaggcatttggtgctctgattctgattctgattctgattctggcgtgctgcttaatttagccgcgtgcttttttttttgtgctgttcctgctgcgaactaatggcgatggcttgatggctttgcggtggggttgggtacaggtgcggttggggagcacacgggagggacccatgtgtcggtgaaggaggtgggtgattcggattcgagttctagttcgattcgattctactctgttttttttttctctccaattttctgtacattttttttcaaattcagttcagttgttgattcagtgttggtttttttgcagaggcggatggtagagatcgtgagacagcagcaggacgtagcagcacaggaggtatgtaaaagttagcttgattttagctgcatgtggatgtgtatacacattgtgtggttttcgttcgatttcgtcttggtggagtagtgtggtcgcagaatggagtagtgacactctctcagtctctctgttcaatccataaagatgcagagtgctatactgctatcggagtatcgattttgttgtgctcagtgatctgttctaacctgagatgattcatctctgctgaaatatagcttctggtgtaaggggaatgcttagtcttctgacaggacagagtgaagtaaattgaattagggatgagatttgggtgccctttttgtgcatttctgacacttgtcctagtttacagtggagacagttttgtgttgcatccctgagcaatatgcgtaatgttgctcaagctcaactaactgtgtttggaggctagtatagatatccaatcaatgcaaatttagtgaagtataacttctggtgagtggggaatgcctagtattctgtcattacagagtgaagtgaattgaagaagtgatttttgtgatccttttgtttttcattttatacagttgtcctagttcacgattcaatcgattttgttttggtcccctatgggatatgctcttttgctccaatgataatgttttgtcttgactggtttggataatagaataaatattcaatcaatgcacttaagagaaactgatgtcagttaatttttctgcagttagaaggacaaactgatgaaaatgctgcagaggcagatgaaagaatatctagatctcctcctggcactaaagagaagttatggatgatgcaagaccagctaattatggccaaggcctacttgcagtttgcttccctgcatggcagtgcacatttagttcgggagttgaagttgagaatcaaggagatagagagggtgataagccactttagcagcagttcccgtgtacccacgaggtaagctataatccatgatctgcaagtaaaggattgatttgtaatagtagttcagtctcacaagaataaatatggatagttgtgctattgttaccatcaatagtcagttctatgattgaaaccaaagcaattttgcagtgcactgcagaaaattagggcaatggaaatgaccctatctaaagctcaaagagcctacccacattgttctcatatgacagcaaagttacgtgcaatgacacatcaaagcgaagagttggtcagagcccatcgaagcgaaacttcattccttgagcaggttgcagtgaggacattaccaaaaagccatcactgcctagcaatgcgacttacctcagaatacttcctgttagatccgaaggaacgtgaattt

SEQ ID NO: 20522 - DNA, 535 bp, Oryza sativa
ccggcggcgtcgctcgagacggaagtacggaagaatccgacgccgcgccgcgtccacgaccaggagaagacggcgctcgagtcgagtccaatcgacacggaacggctccgggaagagacgatgccttttgggctgggcctcgactccgtatcagttatggttatggaccgtgttggattccgtcctcgtttctatttttttttctggaataagttcattttgactcccttaactagtgtaattcatatccctaaccctaaaccataataccagatatctcgacccccaactattaaaacctgtgtaatttgactctctcggtggttttgaagggcggtttcgctgacgtggtgcctatatgacaatattgacctagtcttcgttccacgtgacgttgatgtgatgcttatgttgaattagaattaaaaaaaatctgtggaccatttgtcattcaaaaaaaaatatgggacccacatgctatcctctctcctttttcctccctctctccttttttcttcaccttggccaaagtggt

SEQ ID NO: 20523 - DNA, 691 bp, Oryza sativa
cttggttgctgcctattgtttgaagtccctattctggtttatgaatttgttccgaacaagacgttacatgacttgttacatggtcaagacgggagatgttacatatcacttgcaactcgtttgaggatagctgctgaatcttctcaagcacttggacacttgcattcgttggcacgtcctatcctccatggggatgtgaaatctgccaacattctgctaggtgacaatttgattgccaaggtcgccgattttggttgctcaataatcgcacgaatggacgaagaagccctcgtggcaaaaggcacagtcgggtacctagatcctgagtacctgcaatcatgtaagctcactgacaagagtgatgtttatagttttggtgttgttcttgtggagcttttaacaggtaagaagccgcggtgccttgtgtcggtgtttcaagacgctatgaaggagggcacggttgacgagctcatagataaggagatcatcaaagaagacgacttggaggtcatccaccaagttgcggagctcacaagcaggtgtttagctatgccaggtgataagcggccgacgatgtcgcaagtcgcccaagagctccgacggttgacaggattggtgcgacaacgtctggatgcggcaggcgagctgattgccttgcgtgaggtggatagaagctttacgcggacaatag

SEQ ID NO: 20524 - DNA, 10482 bp, Oryza sativa
gggttttttttgggacggagggagtatatggcacccctcaagtcttcgaaccattcaaatcatcgcattcagcccaaaccacgaggtctttacactgtcacgctgatgcggtagtttagtaaaaaaaaaaaagtacatgacccacctactagtgtggcgttcctcctcctccccccgcctctttcagtatcctcggtcggctgcagtggtctaggcagaagttgtgaggactaggtggcgacggcgtgcttatggttggcgcgttaaatatgaactaacaaaccttaaatattaagggatggagcgactattaattttccttttttaagtaagagggagtattaacttataatcaagacgacagtagatgcatagaaaaacagatagatcaccaagtaaaaacccctcaattgttgcaacgtccattttgtttgacagtactatttgtctatcatgcaacgaagaacaccaggaaatgcccggttgtatgtttggttgagctatgcctacgagctacaacgaattgatgaaacaatcaacgttgtctcatcgtgcctttataagagggggcggtataacgttgaaacatgtgtgaaatgaaatagatggcctatttgattagcaatataaattaatatttggaaaataaacatagaaaatatataactcataactagtaatgttagcaatacaatacgtgagagtttttaagaactcgtatttttgagaagcattatccagcaaatgataatcttgtattaatcaaccgaattgctaattaggtgatccaaactcttgacgtttaggccgggtttatatatatgtgcgacttgcttgagcttttggccggtaggtaaaataaaacgttggattagtgtatgattatttgtgtataattattataaaattggaaaattattttatttgatttttttttaaaaaaatcgatatacaagtgtagcaaacctagaattgtgtaacatccacggattcttgctcgtctgtgaaaaaaaactggttcctgctttgtggcttcggctctaaatgtccctgtatttacttctgggccgtacaacccatgcatttaactggagctgagtgtgtggtgtgccgtactgacggcccagttagacgaatggcacaaaagaggtacgaggcttctcaaggaaacaaaaggaaaaagtacatcgaaggtccctcatcatgtcctcggattacaaagtcctcctgcaaccacaaaccagatatttgacatcgctcatcttacaaaaccggatcacttttggccctcgggcgattttgactccgattttatctgacttggcatctgactcggtgtgggtcccacatgggccccacacgtcatcctcatctttctctcccctctccacctctcttgctctctccttccctctcctcgggcgggactgcggagcagttcggtgcgccggcgggcgcgggcggcagcgggggagcagctgggtgcggctggtggccggcaggggagcagctaggtgcggctggcgggcgcaggcggcgggggagtatctgggcgcgagtgacgggcgcaggcgacggggaggagcactagcaacagcctctgatggcgtggcgacacgacgacggcggtgacacgggagccccgacgaagcccccgtcccgacgctgcctcctcccctccccttcccttattcttatcgaaaactgcatcgataaatggcggtgcgtatccggtgaagagggatttgaggtccgacttgacgtcgatgagcgccccgtacattccgagcatgatgtagagcttctccgtcgccggggtggacatggccatggcgtccgcgagccgatgagctgcaggatgcatccccttgggatgtcggcgaaacactcatggccgagcttgttttgttcatgtggatgtgtatgttcatagatcggcagacatcagtgtcctgtatgcagaatcatagtagtatttggctgtctttggctagctctttgctgcagaaaagctcacatgaactctttgaatcgccataattaactatagagctggtccgtgcagttgttgatactctctccgtattttaatgtatgacaccgttgactttttatcaacgttaaccattcgttttattcaatttttttgtgaaaatatgaaaatatttatgtcatgcttaaagatcatttgatgatgaatcaagtcacaataaaataaatgataattacataaattttttgaacaagacgaatggtcaaacgttggatgaaaagtcaacggcgtcatacattaaaatatggagctagtccttgataggcatagccccgacgacgcacatccctcgctggtgacgagaataatggcaatccccttaataatttgggcgtaggcgatgggtgcagccgctgcgaccaaccaccgctgtggctgcggggctcttcccggtagagcggcgcttgtcatcgttgtcacggcgtggaaggcggcaacaagaagatggtggctgtaggtgacgagatggagacggagtctgctcgggagaggacggcagcaacgaggcaatgatggtgccggtgggtgacgagatcgggctcgatgccatcatcctttatccgcgcggagtcggcaaggacgggaaggagctgcgcgatctctgacagcgtcggagagcgcgagcagcgtggcggcggctgggcagaggggcctgcccgcccgcgcgtagctcctcccccccccccccccccgccgcctgtacccaccggcggtgcgggcgtgcgtgccaagctgctcccctgccgccgcccgtatagaaaggaggagagagtaagagaggtggggaggggaggggaagaagaggctgacgtgtggggtccacgtgggtccatgctgagtcagttgccacatcggacaaaacctgagtcagaactgctcgaggacctaaagtgacccggttttgtaagatgagggatgacaaatatctggttttgttgttggaggacaattttgtaatccgatgacaagatgagggaccttcgatgtactttttccaaaacaaaatagccgtccggcccataaagcctgcaaaatgtagaacatataatggccatgattttgttttgagggaggattagaaaggacttgataagctccttctgcagttacaccgttaatattttttctgatgtcgtgcacccaactcttgtccatatacatcttgtgcagtaggttggtttttttacggaatatggtatccatggggagataagatttgtgtactttttttttaataagtagacctaattgattttcgaggtaaacccgttcaactctagtcaccctcgatctataaatagagggccaacgtgtgcatagttgtacgcacaaatcattagagagctccacaatgggatcaatgggatacaagcttctagatctatttagcgcttcatcttttgcataagaggaggcagcagttctggacgagccgtcgacgtagtcagttctataacatgctatcaacatcgatcactactgctagactgatgtcgtcgggcagctataactacatatgcttcctcgtaaccatctgacttgccactccttcgagtcgtcctgcgctgatcaatctattttaataattgttgattgccattagtaaatttagtaaattgattagattttcttgcttttcctcaagatcttgtttttcctacttaaggtgtagcactagattagtttgctactttccatctatttgcatctattgcttcatgacggaaaaaatggaagaaaaccgtgtctacaaaatgaaaaaattgattagttgccccctttggactgaacgtacccagttacgcttgggctgaatcaggcatgcatcatccctacaccccatccttgcatctcccaacgccattatctcagtcgctctttctagacctttcatccttgttggaagcacgccaggagtatgtgtaccgctgccaaaccgcccatgctctgttgggtcgccactgtaggaaacgccacctgctatcacgtacgtcgatgttgttgcaggaaaccgctgaagacgagtgggaccaaatccatgttgccattgccgcaggaccttataccaaggataggcagtaaagtaatcaccgttaatctctcaccgatgcaccttggatacatggtgggaggtcgatggagcatccgtcgccaacctttaatttgcatagggatcacggcatggctggacacggcttagtctccgttgcaggagcctcagtcgacatcgaagttgagcctacacccactgccattttgaggatgcgtggatcgtggtggaggcagctctgccgaacaacgccgatccaccgccgcgcgctgtccctgccaaccgaggagcgatgggttgctgaccagcaaccacgtcgtgcaccgcctcgatgcccactgccaccgaccgacactcggcttcttccgttgctactatacagccatgctcatcgccggcgcgctgggtgaatgggcgtctccgcgagtgctggtggggagtggggaaatcctactctctctctcaccatcttcctcggtcttttacaggagggccagttgcgttggcatgtctgttagtgcctaactgctatcgagaatgctattgcacaactagttacacgactgaatacttgtcgcgcacggagagggggcacgggtggcggcgccgcgcggtttttcttatttttctcccacagttttttctttttttctttttgcggtttttttttgccggacggtttcattttcttttttttctttccgtatacttttcagtttttttgtttttaatacatatgtatacaaactttatgtacacgtatactaactttatatacacgtatataaactttgcatatgcgtatacatactttgtatatgtgttttttatatgcatttgcatatatatatatatacaaagttggtatatttttatatatacaaactttgtatatatcgtatacaaattttgtatatgtgtgttgtcgattcgacaactgcatcacgtcgaaagacgtggttctcccaacagtggttcgaagtaaagacaattgtattgcttagtaaaaatttttcaggtctccttgttacatggccctaaggggctatttatagccctattatagactcttcctttagtattttaggttttacaggagaatttacatggttgcccgtatgatagggacatctttacgggcatacagcgtcttttgcttgcatgggctcctaatggccaagtgactcagcccagtccttggcgaagcctctagaaggcatgttagcccgctgggccttctccttgcaaggtttgatacttggcaaaacccatgcccttcgtggcaaggctttcccctcacggctttcaaccgtatgctcctccggcagggtccttctttggcgaagctggtcaactcgatgccacggcttttgccgtttggctttcaccgatgctgtctcttcgaccttcgccgcttgcctccagcccgcgcctttgcttatgtccttggtttcagtaggcccggtcgaaggttctcccggccgaaggttctcgtggtatacctccaacaatgtgtatatattggttatacataaaaatataaaaaatatatacatattaaaaagtatatatatacaaaaatatatatatgtataaacttcgtatacatatacaaatgtatatgcatgtgctgtggagaagagagactaagaggggagaaactgaccgcgggccgcgcggggagcgcgactggtcgctaatcagcctcccccaaccactatggccctcctgaacgtgacagcctatgcaattgtaaaaaatagtactacctccatctacttttgataggtatatttccatatctagaaaatttaggcatattttaatctaaccacctatccttataataactttcttggatttaatgcgtgactctctattcttccacacaagattggctatatgagtgtcgagaaatataaatattaatgaatcgcttgtttacaatgaatactagtagcatgtttaaatggatcataacaaaattacttatccttggtcattgtgccaagataaaatataactgtttacacccaaatttggcacctaggattaaaatagggaaaattatcaaagtttggaagtctgccagttttcctctgtggggacggtctgaccgccgtatgtgggccggtctgaccgccgggtgagggccggtcagtccggcggtgtgtgactggtctgaccggcagagtccgagtacgggtctgtttcgccgagtcccgaagtttccttgtttgggaaggcatgtttcgggtttcctttggattctatcccgagttggacgtggaggagggcctgtagagggcaagactaacccctatatgagggacatggccggttcaattgtaactatccaatctacaatcaatcaatcgaatcgttttacatattggttttagttttcgcttagtttgttcatctttatcgttttgcgtcgtaaatcacccgtcgccgctgcgagagtgtcacacctctttgtaggtttgtcctgaaaacctttcgttttgactacgagacgggtagttatctagaatcggcttcgctagccggtttagttatcaaaacccatcgtggtttagcttttgctaggttgcggtggttggcgactctaagatcaccgtaaggcggtaggtgttgtgatcgtgcttatcaacttgtcacaaaaaattaccaataataactctcaaaagtaaatgtagggagtaaaacataaattcctagctggcctcgagtattgaattccgtctacggtccatggatggggatccagcggaaaatgatcaaagccgaacggtgttttcgcccgattggccacgttttactaaacactttgtgtttaagtccctttcactgttcaatataatcttacgatttgaacagctcgtatataactgattgaatgtgttcgtgcacatagactataactttgctgtttagggcttatgggtctctggactagtatgtaatgatgtttttaagcatttaattgtgtttactcttgatgcaagtccaattaattaatctactacatatgatttctatgttgagctttccataaaaaaatgtgtttacctagtgtaagtgacgctctccctttgtttgggtttattttcatgcatatataatgttttttggagagcataaaaatttgataattaatgttatataaggccaataataataaaaaaaaaataaatgtaagaaaaattacggaaaaattctgataatgacatacttcctccgtttcataatgtaagtcattctaacatttttcacatttatattgatgttaatgaatctagacatattaacataaatatgaatgtgggaaatgctagaatgagttacatgcatttcccacattcatattgatgttatatgtctagattcattaacataaatatgaatgtgggaaaatgttacaatgagttacattgtgaaacggagggagtagtcaaatgtggaaaaattccgataatgacatatgacatatgtcacattgttatgtgaattggtttttgcatgttaaacagaacaatatgtgtgaaaccaattcaaaatatcaacattgaatcgaaatgagaaacttggtcagcgcgcggcgcagatgttcagagctaggaaaaagtacatatatatcagttatattgtgaacatctgcatgttaaacgcgtttttaaaattaacaccacaccacatagtatcaatccctctctactatgcagctctcttatttttctcaatgaatattacgaagttatatatgccctggatggtaaaccgttcacaaccaccggtactgtactgtgtcataaaatgcattaatttattggagttgatgttttaaaattttgaaacaactcaggtgaagcatagctagacatcttcagtgtggtcctaattaatcgaactaattaagcagaggacagagagctgttagttggtacatataaaccactcgaggaatcaagctaattaatgacaatctagcttgcttcacattaaatcgaatgagaatcttggtcagcggtgcagatgttcagagctaggaaaaagtacatactatcagttatactgtgaacaccgcaggatgaagtaaattaacgctgcagttagcatatttgttggttcaatcatgcagtctctactcgatgccctaaatattaggtgaagacgactttgagctagggcaagtccaagtcaaggtaaccatgcagtatatatagtactacagtctagttccagtggtgtatgcactatgcagagctgctagctattagaagccctcatttccacccaaaaaacaacagggatgatgcaggcgctgctaatgccaccactagtattgcgccgcacaatggtagccactttactgtgtctcaccgtagcaatggcggcatgtcttgccgctgttgcagcatcctgccagaggaagtgcggtgagatagacatccctttcccgttcggcatcgccggtcagcccggctgcgccatgaccggcttcaagctgagctgcaacgacaccgggaacggcgtgcccaccctgctcctgcggaacgtggaggtgctcggcatctcgctgccgttaggtcaggctcggatgaagatggatatgtcctacgactgctacaacacgacaaggaaggatatcgactgcgtcgatatggttgatctgaacttgaaagggagtcccttcactttctctgacactgctaacaagtttattgtctttgggtgccgtatgctcgcttatcttggcccaggtgaacaaaatgatgtaggtagcaacctaactatcggttgtgcggccacttgtggtataggcgatgatctcgtgagtatcaacagtgccgggtgctctgggataggttgttgccaaacgaacatccctaaggggatccggtattacaaggtttggttcgacggtcgtttcaacacaacggacatctacaactggactcgttgtgcttacgcagcacttgtcgagacatccagctttaatttctccacggtttacaattccctatcaaggttcaatgacaatcttggtagccagccaccttttgtggtggactgggctattggtaattccacatgtgagcaagctaaaacaaattcagattcctacatgtgcataagcagcaatagcgtctgtttgaactcgcgaaacggacccggttacatctgcaactgccaaaatggattcgaaggaaatccttacctgaacgattcgtttggttgccaaggtaaatttctcaactagaggcttttgctggctagagtattgcatttacatatcatctattagcaactagcatactttagctttaaagtacatgtatttaccaaaatattgcatctttgtctagagcgtatttacatgtcattgaggggggggggtagggtatagcggtataagtaggtatgatatcaaaattttataaaattgtgataactatttattactcaaaaaaaaaggataactcaaataggtaacataaatcatgatcctacttaaggattgtaaaaggaattatctgtctacctattgattgccagtttttaggaatttccaagtagacaaaaaaggtgtgaattaatttagcatccatttaggacggaagcaaattattatgtttcaggtaaaacaaaaggagtccatatgaggtgcaagttggtaagtattaactgctaacatcaaaactagagtttatacttcatatgagctacgacttgtcaattattatcatgaaacatatgtattattaaattaagaaaacactaatatcttagatgagaggtaatctgctattttgttccaatctgcttttagccaaatcttgagttcatggaacggacagcaagctgattatcaggttatgatctccgtaattcacactagtttaattgtctaggtttgttgtgctggcataggaaaacaaatctgaccagctagcttattccatcattttggtggatgtattcaatatctttggttgaagggctaaaggactttggtgaatgtgttaattaatgtgtgttagttataactacttgtaaacaaaatgaaataagtatcttgcggttaaaacctcgaaaatgagtaaatttgtggtggaaactattgacttaggtgaaactcgtgtaaactctcacaaaatgtgatgaggtggtgtatctaaatgtgatattgttttaaaaaaaataattagatttacatgactttttgatcgggtttaaatgagttttcaccgcatagttatccccctcccaaccaaaaaaacaaaactctagaactaccaaattcggaatggtattgaagtgtgtgctagcattttcataaatcatcatgcttttgttttattcacaagcaaca

SEQ ID NO: 20525 - DNA, 15633 bp, Oryza sativa
attgcttactggtacacatatattatcatctgagtatattgttttgccataacctctatgtacttgaatgttcatgtagaaaccatttcacatccctacaatttatgaaaaggaaattcacattctttctcaaaatgttttcttttgtacttgaatgtatctgcatgcatagacactgttttttaaaatgaaaattaatcaaattttcttctctattctacattgttttatatattcagaagttggcacagaatctgaatctactctaaaagaaaaaaaaactggtacaacaagttatttaattagttcaatatttgaactcttaattgactcatatcagaacaaggtttcatttaagttatcactgcatactttagcatatcattaattatttactagcaaatacaaaaaatcttataagggtccctaaatgtaggtattgttatcggtatggctgctggttttggaattcttgtacttagcttatctgtggtactccttatccgtaaacaaagaagtgacattctgaagcaacaacggaaaaaatattttaggaaaaaccaaggccttctactacagcagcttatatcatctgatgaaagagctagtgataacacaaaaattttctccttagaagagctgaaacaggcaacaaacaactttgacccaacacgtgttcttggtagtggagggcacggcatggtttacaaaggcattttatctgatcaacgtgtggtggctataaaaaaacctaacatcattagggaagaagagattactcaattcatcaatgaagttgcaatactctcacagataaatcatcgtcatattgtaaaactctttggatgttgtcttgaaaccgaagtccctctattagtgtatgattttgtcccaaacggttcactaaatcaaattattcatggtgctacaagtaatagggaatcatcattgtcttgggatgattgtttgaggattgctacagaagctgcgggtgctttgtattaccttcattccgcagcatcagtatcagttttacaccgtgacgtgaaatcttctaatatacttttggtgcaaactacacggctaaagttgcagattttggtgcatcaagattgattcctaatgatcaaacccatgttttcaccaatatacaaggcactttcgggtatttagatccagagtactaccatactggacatctgaatgagaagagtgatgtgtatagctttggtgtagttcttttagaactgcttctcagaaggcaacccatttttgaatgtgagtctggcacaaagaaaaatctatctatttatttcctttatgagataaaaggaaggccaattactgagatagttgcccctgaagttcttgaggaagcgaccgaggatgagataaatacagttgcctctatcgcacaggcatgcttgaggctccgaggtgaagaaaggccaactatgaagcaagtggaaatgtcattacaatctgtaagaaataaaggtttcagttcagctggtaccagcccagaaagcaatcatgggatgcaaccagccctatccgaaacatatgtaaatctgcatcagcctcttggagttcatacaattggtataattaatttagcatcttcaaactgcaatagcttgcagcaagaatttatgttatccgctagtttcgcaaggtaaattatattactccggctattgaattatttctagatgttttcattatatattattgggaacatgtgcattcccacaatcaatctgtatgtcctaaataatacgttttgttctcatttgtgaaacattattaattgtttgtgtgaatttaatgcaatttgttttgtatgcttcatgctgaaacttttggtaagttctcatctcaaattggattcttataacagtgcaacttgctctaatttttttagtgagatgtgtgacttatttttctctctcattttttttacttgctcaaatatatctatcaatattcagtattgtggacctcgtggttttcggttcacctcgtacatatgtttttgttacaagattaataggctagttattgtagcagagacgactcttctatctctgtttgtaatattttcaaatcctagtgcaatgtgtccgcatttggaaaacttccatcttgaatattatggacttcatgtgaaatacttcaagttgcaaagacattcagcttgtagccaaaaagcttgaataattttcagaatgtggaatacttcaagggtttatttcttatttaccaccggcaaattcgcatgattctgagcttgatgtgtcactgatatgtgttccctagacccacatatcgttatgagaggaaaagagaaacaagggaatgtatcaactttccatgcaaatttgaatgatccatttcacgttcgctgaaaaaactgcacacttgatggttcaattacgtcattgttccattgaaaatggtactagatgcaagtcctcttaggctcttactctccaaccggacctgggaacaactactcacgacatcatttccaaaaacaagttagaagtcataaattactgccaaaagatttaacggctttctaataaccccaagctctaagagccagttcaagatgctcagtggaatgtaccatatatcttaaagcacggtgttacctttaaagtaatcactaggttttccttcgttaaattcacgtatatgcatagtattttttgaccgcctcgctccagatgcccactagaatgacaattcataatagccattcttgagcaaatataatttaaaagtgcagtaagaaattggattccacgaaaacattttttccccaaaatatatccaaagagaaaaacttccaagttttaagtttaagagtatatatgtatcaactatgcatcgccatttgcatgaaaagcctactgcagttgaaaagaatcaagtttctatccattgttgagtgagtgcactccatactatagatggccatgtgggccacccggcacagcacggcccaggcccggccttgcctagaccgaggcttgttgggccggcacggcccgaccgacgcaccgggccgtgctgtgccagcccacatgccgcactcacggcccaacactactcgggttgtgccggcccggtctgaaggcacgacggcctatcctgcttttcctcagaataaatctaatttttcttcctcctattgggttgtgacatatatatataactaaaataagtctatttaaggtccctatgttttggacagtgacatttatatgtctatttttagtccctatactttgtgtgccgggcctggcctgctggcccatcgtgccgggccagcccagcgcgccggtggggaggcccaggcatggcccggcggtcaggctgggctgacacaggcccgacccaagtcgggccgtgccgtgcttgcgccaggccaaaatgccgtgccgtgggccggaccttggggcctcgggccttatggccatctatactccatacattaacaccaacagaaatcagtcattcaaaataatgcgttatcccgacacagggacttggtgatcttcacccgaatgtctcctgagtccttcagcattccagtccctcgactcctgatgatttccacatttattccgaccactctacaatcatctgtgaactcaagcaatattctttcttgcaatcgaatttgcaaggtgcgttctgtacagccgtgtgccgcgccatcatactgtcgagtgtcgacagtggctggttcaattcggtgcatgagctacgtattacttgttaagcagtggttgctctcagcatagtaaaaatttactcaccaaatggtgaatgaccgggcatatccatattttctgtaagaagagcagcatcgaacggacaatctcttcccgacttcgaagtctgaaaggaaaattagtaagtgaaaagtgatatgcttttagtattaggtataaacagggcaaagcgtgcatttgctccaatttagtcgctcacttctaattcctcgtgccggtagcacatatttcgtataacatttggcatcatcgacgcagcagatttagaagaaagaatttgataagaaaaggattatggtgtatcctactgcgctgaaaataaaccaatatacccgtggagaggtgacaatctggctgtcaatgttgtgatgggcacaactatctacacatacgtatgggtagacgaaaagctcataactggttaactcgctcagctcgtgactagctcggcttggctcggctcggctaaactcgttgagccagcgttttagctcgttagttataacgagccagctcgatctagctcgagagccaaacaagcctaatgcagcaaatgagcagcccaatcctagccggccctgtaaggccaagcctaatgcagttcgatctcccgtctggctcctcgcccattcggccgttccgggattgggattcgatgacatttccccatgacattctcgatgattgagtcactacacgtgggtccaggctcatgtgggtcccgcatgtcagtgactcaatgtcactgagaatgtcacgggtcacgggggaatgtcaccgaatctgcgtccgccgttctgagcctcgatctaatgttgctcctctctctcctcctgttgtctctctcgccatgagcagcgacgcgctgtccatcttctccctgttcgggtgtccaagtaggtgcggtgcggaggacgacaaggtccgttaccgcggagtccgccgctccgacgtggtccggccggcgccgccttgtccccagccgcgtggtcctcctgccggttcgtgtccagcgcaaccagccaatcccatcctcccaactgcgaacctatcgcaaggtgtacagagaccaaatctctggctgagtcgctggtgcgttgcacaatgggatgttcagaatcaggtgcagagaagacaagtctggtgaagggacaacgggatgctcaggataaggggtagagaagacaagtatcttgaagcgaccatcgatatcctgatgacttccattcaaattgtagctcccatcatcgatgtcaggcaactgagccatttttttccctcattgctcgtgctagcttatcttgccgcagaacccagctgacttagctggctcaggttggtgtctgctactctgttgggctgctactcagggcatgtccagttcccaaacaaaatttttcacgcggttacatcgaatgtttggacacatactggagtctcctatgtagaaaaaaaaaccaattagacagttcgccggaaaattgtgagacaaaatcttttaagtctaattgcaccataatttgacaaagtggcgctacagtaaatatttactaataacggattaattaggcttaataaattcgtctcgcagtttcctggtggaatctataacttgttttgttattagactatatttaatactttaaatgtgagtccgtatatctgatatgcaggggcaaatttttttttgccaactaaacatgcccttattcaaccacagtggctctgtgtgaaatccgatgcacctactggtcattaaccgagcagattttcagtacgaaatctgcaggaaatggattttcaggaagaaaggaacttcatgtatgcgtttttttttaaataaaccacataagacagtacaatgtttcatattggtatagtagaaaaaaaattacaacacaatagtcctggagactataacccggaaaaaagacaaaccacactatgtgcctacaacatatgtcgcactgttgagaacaaaaaggagagcgccgacccaatgcactccattccatccatgtctttgggagtaggggagagagggcgacaatgaagaatggatccgctctcccctgtgaggcctgccaacgtggctatcttgcgttggctagtgcgctgctgctagaggatagaccatctgaagagtgtttcgaaagaaatggcccttcaaacgatgcctcaagggatgttgcgttgtcgatgatgacactatcgtcgtctgtcctggaaaaaccaggaatatatttttttttctaaaggattccaccggagcacaaaggagagacaatacccctaggagggttgtcgctcgaaagcgtcaccactatcggccctggacggactaggctttcacccagagatcttcctacggtcctacctgcagctaccactatttgagcaccttgaacatacagccacctcaccaatgccccaccgttgtgcgcccatgccaggggccctcctcatctgcaaaatccccgctgccaccgctcacccaggtcaccggcactaccaagcacgaggggagggagagcagccaccgatgtcaccataccttgtgccatcgaggatgcttcctcccaaacatccaacaaccagccacactgcccccatcctaaccggcggacagagataggggggggcatccatactaccattcccggcagccgcctaatcctccccctccaatgcgccaagcaaccgccagggcctctgccctcatgtcgcactgcattctctccctccccttgccaaggagggggcagttgcagtcactggtggggatatgggcgatggtcatgccctagctgccgccgtcccaccgacgttgtgccacattgctccttcgtcgtcgccaatgacagcatcggcacacccaccggagcagccgtcactgcatggccagattttagtgtggagggccggatccgtctgcgacctaaccaatgtcgacctaccactgcctccaccatcgtggacaccgacgtacttgccgtaacacccaggccacatcgtcgctgtctcaaggaatgatccaagcaatgtggcccagatacggccgcgacctgaccgatgctgttccaccaccgccgcacctcacccatccgtctccgtcaccgccctggatgccgttgcggcctcctccgcctccatcactgccgtgcatgccggcacaagcgggtcagctccctcagcacattgttcgctggttgcccaacagtccaataagaggggaagaagaagaacagaaccccgccactgccatccttgcagccgcgtggtttctggtggctcgctcaggtggcagcgagggaggaggagggaaggcgggtggtggtgcgtgggctgagtcgtcgcctgtgtcacccggatcagagcgacgcgggggctaagctacgccgcctacactccgtatgtggaaggtgcgttatgcttaccttcaggtatgttacaattggtattctcttatgcatgaacaaatggatccattagtgacataaaaattgttacgtagtttcttgtggtctcattagacagagataaggatatgggagcatcatggttcatacatggtagagagtaatcacatatacaggacattatttcaaccgtctatcggaatatttgttacatcaagtcattgtcaccgtttctctctttttttttctcagatctgctgtaaactgcaaattgtaaatctcctttgcttaatacaaatatacacaagctttatgcatattgtcggaaaaaaatccaatactagccattaagttatatactccttgagtaaatgtatttaagttacatgattctacagcgaaatgtgaagggaatctagcaaaacaaatgtgtgtgggctgccttgctagttgggtctaaacagtgcacagaagtaattcccctcttttggttgtttgcgtctaattcctcaatccggttgcacctattttgcaacttcctgctgatcccaaactttttgcatctgcaaattgtgacagatctgaaaaagaaattgattatgccaagacaaaacaaaccaacatacggaccgtttttttctgtgaaatactgagagtcaaaaaagctggttgtacagcgtggaggtttctttcggctgccttccaaagacagccctaaaccagacccaaatgtccaggcgacgatcccctcgaatggttggctcttggctagccccgaacacaggtcacctggagcaggatcattttttctcgtgctatgttgttggttcagaagactctgcgcgaaggcattgtattcggcagtgccttcttggtttatgaattcgactattcaggtagtcatgccgtgcaaagtatcctgatgcctcgcactccaattttctaccatcatcgatgcctggcgttcctatttgtctaccatcatctttctaggtaactgaatgagtttctctggtttctcgtggccttttttgtagcctatctcgctcactgatgaggctggctgcctgtttcatatttaaggacgcatgctatatgccaaaaactaaaacagtataagctactccctccgtttcaaaatgtttgacaccgttgactttttaatacgtgtttgaccatttgtgttattcaaaaaatttaagtaattatttattttttttcatatcatttgatttattgttaagtatactttcatgtacacatatagttttatatatttcataattttttttaataagacgaacgatcaaacatatgctaaaaagtcaacggtgtgaaatattttaaaacggagggagtattattaacggatgcacatgacaccaccactagcacagaacccaccatccatcacgggtgctaaccctcatctgtgatggataaaagcgtggtcaaggatgtgtggtcgctgatgtaaaaaacccatgcgtaacgtgtgaagatccgacacatttgagtttgacctctaacggtttacatgttaacacccgtcatcgatgtacagtaagtgtgaaaaaaaaaccaaaaatgttaatccttggtctttgatgtcgcattaaacacaatcacaaaaccattagttaggtacatttaattgttcggatctcatattacaatgtaacaaaatctcttgctaaaaagaaaaaaccatctccctcagctgattcacattaatcacaaaaagcaaccctcaaatcatctccccctgttccccacaatcatcaagtaagcagattcacatgtacaaaggcaatacaaatcaaaaaaatgtggacaatagacacaaaattgcaaatgtttagggaagtggggaaaatatttctcacttcagctgcagctacctgcaggtgcttcaaattaatctgtagcgaaacatgggtactacttgcaaacgaatcaagaagatgttctggtgggatgagatggcggcggcagtgtactgtctcggtgagatggatctggccatcctaatcctagcggcgtcggatccaattaagcagcgtgccgatgatgtcaccaaggacttcctgaacaagctggattcatatctttttggaagccacttatggcttttgtgagagttgagtttacaaagaagttcgagtttcgagattagtcaaattttttgagaggagtgcttttattgtactttgtaaaaatgaatagaagtaacaaacttcaatcaactttcgagagttctttgatttgtgtttgctcgtttgcatcgatcacaccggcgagtggatggtggtcagactggcagtttcacgttggttagaccaatggtggttcggcggttagaccggcagcagcggtggtgacaagttttggtcattcagtgtgcacggtcagacccgcccacaaggcttcaccattgttggtatttgttgcatacacaaataaatctgtaaacgcactgataccgccgtaacacttccccttagagtattacaactgtatcgtacacaaggaacgcatgtgtatatctacgaacgagatacaagcattcgatgaacaattactttataaaataagcattcgatgaggtacaagcaagaagaatactaatagctccggcgcttctccggaactccggtggaagaattccgacaaacccgacactcctccgaaagttctcggtgagaactatgatactctggggtactccttccagaacttcccctcactctctcactaacaccacatactaaagcaaagcctaacgcttgagttgatgttgtgtgttttccatgtgagtgaagacctccttttatagtgtgttatgactgttggaatggcgattactcctacgcaaccgcaattgggagagcatcaggaacctacatgtggaaggccaggatgggcggccagtatggttgttcggcattttggccaaactgtgggccccacttgctggctgctccttcggctaggaggctagcagtgggcccctatggtggttaaggatggtgtgttcccactttaggttagttttgactatcatgtgggccctccaatccttgtacttgcgtgtgattggtcggagattcattttgttgcatgttgggtctattttcatccataattgacctgtatacatatatataccaaagctagtggaaatggttattagtaaacccctactactaagtttcgatataaaactttattttgtgtatacatgagttaacgactaaagtttgcactgagtgaccgtcaacaaccagtaaggttgaaggtgtctgtgtggtcagaccgacttgtcaactccggttagaccgatcttcatagttttttgacggtaacttttattttcgctaaaagtttttgatttttggtgttcctaccattcacacctctctagtaggtctagttcttggtattcaatcctacatgcacctgtatggaatcatatatagtgtgctgagaatttaacttacagaagttagattcagataagcatagcaacataatacactgaaaggagatgattttgcaatatattggggatattggttacagagaagaaggaaacaacagaagaaaaatagaatgtttttccttttgaagcaaagaagaacaaatgttagggaaccggacttttactgtgctacttactgtcacctgttcccatggttcacagtatacatatgcgaagtacacagaacaccatggacaaaacatgcactgcacatctattcatcacttcctgccttaacagatcttgtatcccacttaaggtttgtatctattgatgattcgctcatccatttctatctcaggtgcgagtgtctgacagagtgacagcctcaaaaacggtttctctgatcactacgctgatttcatttgggtctgtcaaatggagtgatcagtcggcgtgatgcttaatttcttgatggatcagaagactcggcaggaaccaacacggagctgttccaacactacctgcctttctatgcagccagtgcactgtgatatgccggtaggcacacagtgcaggcaaaatcatgtttagagtaagctccgaccgatatcctgataccttgcattccgaacagtcatcctgcttgtttttcgatctgattgtccatggccatcttttcttgcttatgttatactggctgatgagtgatgaggttgcatggctggctgctatacatatttaacgacagatgctatatgcccaaacagaaaaacactaacttatcattaactcagcggatttttcgtacgaatgttaaatgagagtcgacacctctctttcgcctttctcatttagcaaaggaaagctagctactgcatattaaaactactaaaaatattaagtcccgcctctgaccacccaagacactggcgacttaattaaattggtcataaacgacagatactagaaaatagccatcccatattcatcatggacgaaaagaaaatactgttaatgcagaatataaaatgagcctatgatttgagatatacactatgtgttataaggtagaaaaaaaaatccaaaatgggttggtggtcttgaaattttctatgaaatatagtggctttgacatgtgaatatgccagacagtgtatgctggctgtcaactcacaaaaaattaagaccaccagaccagataaagttgaactatggactatggtaacattggcagcaaaaatgtatggtagtaatagctgtcagataaccttgatcatgctcgacaactggtatttgtgttttgcagctttactcgcttcttcacacgaaaaaaccaacgtagtattgaatgagacatttcctgtacaacaactttgttgttgtttgaacaactgccgcaccatctatgctactgcatgacccccatcctccacttatatatttcttttatccttatattttaaaaaatttaatttcattttacatacaaaattttatgtacttccagggttattttgtaaatttgattttactgtacaactaaaaagcaaagagataataacatctctcgatcttctccttttcgtcaccattcctgtaggctgtagctgttccttttttctctctctctagctgatcattgaagttgaaggagagtccagaggggaggagctttcatgctctgtcaaatcatccggaacctctgtgttttgatgggctctatttttattttactggctcctcttttatttttctatcggatggttaatatccattcgcctattgtttgcttgtgaatccattgactacaaatcaacatatgatgtggctcatctttgtgacatcttggaacttacttttcactaatacaaattagctaccagcctataaacatctatcaatctcagcaaccccatcaatttcaattttcaatggtgaccttctcccattcttagctctgatagagggctcaccaaccatgtcaataaccagagcaaagactcaaaaataaagagctgcatggattgagtgatcatgtccatcccctcaccaaaggaaacaggacacacatgcgcgcattgatgcatttgttctgtgttgggttgcccagcacaatttttcatgctttaatccgttctttcttctcaccaaaggcacggcgatctgcctttgctctgcttcggttgcccagttctaatacctgagccggttttcacttatttttgtatcctggcgtggacgctacgtacaattacagctcaaattacttcggatctttccagaggcatttgggatttcctctaccatatgtggaagatatagaaaaatttcgagaacaaaatcatgtggactatgctattttgcagcaaacaaatcatgcactcctaaaaaacgattttcctggatgaacccctcgtcagattccagacggcccataactgaccgcgtctgaaaaaatcatcctctcatttttgcgtgtagatccttaagatgcacgcacgtgaaaatgattttcgcgggcagttccttaagaggtccacacgcaaaaataagcctatttttacgtgcggacccttgaaaggcccgcacgcgactatcatcttaagagcaccgcgagcgaaaatccccttcctccttaggcattttcccctctcaaccacttcaaaaattctatcttatcgtctccacctactcgttgttatcctatttcttttatctctctctggtctcttctctccacaggcgtggggcacggtgatgggtgcgaggcggccggcggtggccgggaacaaaggcgagcgacaggcgcacggcggcctgcgatggccgacggcggccaggagcggcggcgggcagcggattcgtgcgcacaaccctgtggaggtgcccctcgcccgcccggcataatctggaggcggcgcccctctcccgcatggatccggcggtgggcggcggtgacggggccaggagcggcggaaggcaacggcaaacaacgacaatgacagcggtgaccatgaggtgggcggcggctagggttaggttcttgattttatttttttgcattttttttgtgcgtgcaggcgacataagccaaccgcacgcgaaaatctgatattttcgcgtgcgggtgcgtcacccacatgaaaattttcgtattttcgcagacaccccattgtagacgggcatgagatccgcacgcgaaaatccctttcgaccacacacaaaaatcgttttcgtattagtgatggaaactaattaagatgaggattggtcatccctgatcagtacaattatctcattgttcacgcacgcaagtaaaaagctggacctgcaaatgccatcctggcatcctaccatctgttaactctaaacctatccaaacgtgtccagggacctaatgatggtgacataatgtcccagccctcgaacgatctactagcgtatgcaagccattttgaagcatacaatgatcagggcgcctccactatttgtcttgctggtctagagcactcgataccgagatgttatgctctggcttgaattgaggatgccttattgccttccttcactgcgtgatggaatgttcaggaaggttgccatgtacgtaaaatcaggcctagaataacgtgcagactctccaggctggtgttggtatcctggtgacttccattccaattggctaccatcatattttctaggcaactccgccgatttctctaattgctgctggacttcctctctttttagcccatatagtcgcagaggatagctggctcaggttttgtgccttctactcatttaacctcactggatttttcacattttggtccttttgaaaaacttatttcgcaaatagacccttggaaaaacttatcccagaaatggtcctttttggggccagagtggctggcgccgtcgtccaacttgacggcgctagcctctttggcgccgtccccctgccgacgtggcggggcgatgctaaggtggctagggggagcgcgtcagaatggctagcgccgtccccccccccccccgaaattttttatttttcttttatttgtttaatatttttttcattcttagggacacacaagaaccaaccatagaaaaaatgaacccaaatggacgtaatatgtgacctgtaaaatttttcctctcctatcctctctttccgaactagtgcagaggagagagatgtgcaacttttttatttttattttatttttttgatatttttttcacacttaggaactcacaagaaccaaccatataaaaaataaacccaaacggatgaaatatgtggcatgtggaattttccaaagctctaccgaaaaacttctctcctcgaaaacacaatcttgcaagcggaatttggaggttttaatattgctgaactttttatgtagatgtacgtggatatattatttgcctgatttcgagtccatatgagaaagttacgcctattttaataaatgacacatgaatgacttttcgggagagctttggaaaattctagaagtcacatattttatccgtttaagtttattttttctacggttggttcctgtattctcctaagtgtgaaaaaatatcaaaaaataaaataaaaataaaaaactacatcatttcatgtggttagagattaagtaatttcatatagtggtagagtgattatgtttaacatgctaaaggagttatggtttaattttaatgaaggtgcaaagtaggctaagtggtatactattttcggatatctagctaaatggtatattccgttcgagtttaattttttttctctggtagttggttgtatcgtgatcttaagtgcgaaaaaacattggaaaaaataaaacaaaaataaaaatgttgcaactctatatagagaaacaggaatggaggcgaggggtggggcggaggggggcgg

SEQ ID NO: 20526 - DNA, 9437 bp, Oryza sativa
ccgtcccgttggacgacggcgccagccactgtggcgccccaaaaaggaatatttctgggataagtttttccaagggtctatttgcgaaataagttttttaaaaggaccaaaatgtgaaaaatccagtttaacctcagctgctctggggggaaatggtacacatgtcaattttgcgtcttccgcctatccgacggtgacggatgaggtgaaaagagccaaatgcacatagggaagtgggtctcacatgtcatctccatccatcatcttctttgctctcccaccatctctttctttacccagaaaaggatgctccatacagctcattagctaaaaggattttcagtagtaaagttgcatggaatggagaaccattttcctttatcactaaggaaaggattgacacatgataccagtagtgaaaaataactagttcacccggaatatttgacgtttaggataagatttgatcaaaatcttttataacttttattatttgacaagagattggtagtttgtgtcaagagcagaatgaaactaagtaagaagaatagaagtttgtggaaccggttaatactttttccatttattggatgattttaatcctctatccagtgcagtgccacctgggtccaatcgttcatggaacatgtaacaaagcacacaacacgcaacaaactaatcaagcacgctgttcatctcttcctctcttcattgttctcactagaggcttgtacatattgctgcttctctcgcccttctctatgatcacgtgatatgcagtaaaagtcccaaaactccccattctctttgtgtttcagaagactcagggcagatcaacatagaactgctctagtcgccaatactgttggcccaaaaccgagagacgttagcccaacctggtgaaaaccttgctacactctaaaaggtagcttaagaggtgagggactcccctcacttacttttaagttgattcaactccccatagataagcaatgtgggactattcccaacaaatacctccacggtgtctgcattgtgatgttaagctaggcacactgtgtaggtaaaacacaggtcttgcataaagctcaatttctcgtacagtaaaaaacttctcaagggaatggcccctggcccagatttccatataaaggatacggcgaggaaaaaaaccttctttaacctgaattctaattgattggatatcctgcataaggaatcgaaggaagacccaacgaaaaatgcacactactcccacttttctatcaaatcggtcataagcactacctatattccacaaaatagtgccccacaagtaggatctaataaataggcatgtgattccgtagaaagacatcacgaccccctatgaaaagaaaagccagctccggttggtgtcctgatgccttgcattccaattggctaccatcagttatctaggcaactcgttacaggctgctaagactggctgccccctgcttatttaaccgtagttgctatatgcaacaaaaaataaatatgtgtgcattgttgactacaacaacttcgcattgattcgtgttggtgtatgtgtgcctttgtaatgctgccctgaagatgtttgcctggacaatttagaagtatcgtacatagacttaatattatttataagttctcatagatgtttagttccaatctcatgcagtgatggattttttttttaaggggacgggtagggagctcctacaatttcactatagaagaagggagatctgaggatgatgggtcccatggctacacccctagtccgactcctgcgaaatctggggcaggttctcacatttctccatggggagaacaccctccttgcgatttccagtactgcggcgaaatcggggatgaccgccaggaggaagaaaaagaaagggaaggttgtacaagtcgcccgcggcttttcagactatatagtgcaacttgtctccctagctctcttcttttctcagaactagtctgctggtcgactagaaaacacgtgttatatataagtccggatattcttccggttagttctgactcctctaataggtgtgttgcatgctacttaattacataatactgtgccatggtaaattaaaccggcaatactagtacacaaaataactaggagattttcagggattggatgaatcgagggcttttacttgcatgtgaactctgctggacaagagttaatttaattgttttgggatgatgtattagtcgatcctgtcagattaaatgggggaataatgaaggtgcacagtgattcgatggctagcttttctgagaattatggtgcaactgagccgttaatcctgtcaataagtttcgcattggtgagctgcatgcatcagccagttcaggggaaagtttaaaccaatggagaataacatagttcatttatactctaatagatgcaagcaggcaatgtatgcgtaagcttttttaagatgttaacttttgtaaaaaatataacggaacctttattgatcattgttggagatagatcgtagccagtagcccaccctttggctgtgttctttccccaattttcccaacccacctgtctcgttttccgcgcgcacgcttttcagttgcttaaaaaatcatattaatctactttttaaaaattagttaatacaacattaatcatgtaataaaacgagcttcgttttgcgtgccggacggaggggttgccaaccactcctcccaaacgcagcctttatattgggacgaatcatgaacagagtggatggcaaaacaagaaaatactagtgatgccaagatggcaaagcacgccgaaggcgatgggaccactcctatctaaacttgtccaaaaaggcttaaaagtacagtttgtccgagtgaagggacaattatggaaactactactagtaagatcactttaaacctcacgatagtttggatgttaactacctgtaattaattattaaaagaaaatgacaataaataagatgtcctagtgagttacaatcacaagcgatctctattcaaattttggacttgtctaacatgtcactagacccatgtgatagcaggtcacgctttcacggttcatattcgtactagaaatcagaatcaaacgagcttttatccttttattccacatgagatttctattctcgttgagctcatcttagggcacctgcgttatcttttaacagatatgccgcccctgccaaactccccacctgacaatgtcttccgcccgagagcttccacttatcctacacctctcaagtcatttcacaaagtcggactagagtcaagctcaacagggtcttcttttcccgctgattccgccaagcccattatcttcgctgtggtttcgcgggatagtagacagggacagtgggaatctcgttaaccattcatgggcgtcattaattagtgtcatagggcctgttcactttgatgccaaaaaaaaccttaccaaattttgataattttggtaggatttcttatatagttaccacaatttggcagcaaactaaatgtagccacttttttggcaactttaccaaaatttggtaaggttggaaatggcatcaaagtgaacaggcccatagttactcccgccgattacccgcacttggttgaatttcttcactttgacattcagagatctgggcataaattacattgcgtcagcatccgcgaggaccatcgcaatgctttattttaattaaacagtcggattccccttgtccgtactagttctgagtcggttgttcgacgcccggcgaaggcccccgaagggggccgttcccggtccgtcccctggccggcacgtggcggatcgatctcatggcaggatggacagacagtaacttgggcttcgtggcattgagtccagcaggctgtacgtgttctaatttctatcccagcgctagagattgccatttgaatggcaatccgagttcacaaaccctttttctcagctgtctcacttatggtggcaaatattcctagctcaccaccgctgatggacatgtaaacattggtaaacatggtctggatactctgtatattaggaacgaaattcctgataccttctattccatgcatacagctgcaactaccacgtatcatttggcatcggcgtcttatctcattgacctctcggcatattcaagggctcaataacatgatcttggtgggattggtgcgtcgggtacttatgcatatgaaaattgagttggtcatgatggacatgatgaaaatacaattaatgcacatgcattattccaggaataggaagtacattgctgtcacaattcatggtgtgaaatatatatacgcgtatgtgcagtatatagagctctccaaacatgtgaaatattcatctggtcctatttacaggctaaagcttagtaatagctactaaattttgtttttccttcacttaattatgatacaaattttaggagcacacctgttatttgcattcacctagtatataaatatatactacctccgtcccaataattgtatttctaggatttaaatttgtcccaaaatagttgtcacaatagagtagtaattgtctcattaatcacttcccattcaaatttctccctattttaccctcaaccacctttccacttttatctatacaccatttaacgagggacatcatagtctttcttctcaaaccttaatatatgccaaataacctagaattacaattattttgggacggaggtagtatgtcctactagatgtaacgggctaggtctacggcgaagtgatcaccacaccgagatatcttccaagtgatggtagtgtcaaagagttatttaatggtaaagaggcttcctcaatttaaattgagggctagtagggccatcctccaacaaatattattcaatagatggtttatatatatggttcgagataacgttggcaaaatcctatatatgccatgaaacacctcatctgtgacatatgacaaccctcatttgtgatgggattttggtttcgatgtagatcttatgacttataatgcatatatatttgtggatgtaaacgatctctaataaaaaagttgtcagctataagattgtatatatcattttgatctacaactttaatatatcacatgtctccatctgtgattgtttgcaaaattgaaaattttgaattttcagtcattagtaatgtgtcgtaactaccaaatgttgggtggtagttacgacccatcacgaatgagtgactcgtttatggttcatagaaattatctgttacaagttacaactacgctcacgtatgtagtgagttgtaccaagtagccacattttaaatgagttaattttcgacctgttaaagataagttatctgaaaacctgttatatatggaaccaggatctgtgatagaaatgagcataaggtaattcaaatcatgttattacttagaaccctaccgtacagatttcttccccttaattactactccctctgtcccaaaatataagcgtttttagaccttgacacaatattcgagatgctactttgaccaacaatatctataaaagtaggaaaaagtacgaattacccccctcaactatcgtggtctatggaattatacccctaaactgaaataacagacattttacaccctaaagtattcataccggacaaacaacccccctcaacactattttgagtggttttcacttgagcttgcacacgtggcgccaacgtggcaacccagtcagcaaaaaaaaactccctgggcccacctgtcatgcccatccgctcggacggccggctgccaaggaggaggcgcacgcattggatggccggtggcagaggcggagctcgcccgagcgtccggctgcggaggtggagattgcccgcaccacgagcggctgaggcgaagctcgcccgtgcgaccagcggcggatgaggcggaccgggtggccaacggtgggcgactgagatagagatcccctgggcagcgggcgactaaggcggaacatgaccaggcggccggtgttggacgtggagcacgcccaggtggtgaccgactgaggcggagctcaccttgaggccggcagcagaggtggagattgctcgagaggcaggctgcttaggcggaactcccccgggcgtccagcggcggaggcggagagggacctagcttccgccagcgttggtggtgctggtgctgcgtgggacagagagctcacgctcccacaaaggtgacggccctccccttcgtgctcaccgcctgccctcccgccacgcctaccacccgccctcccccattgcgaccttgtctgtccggaccaccgccgacgtcgtcgccttctcctcccagaccgccgccgtctcctcttccccgcccaccgcctccgcactgcaggaaaggggagggagtcgaaagagaaggagaggggaaagggatgatcagcggtggcggccctcctcactgccatccacctcctgtgcggctccatctcgtgcgtcgccgccgtggacgtggccaccgaccctcgtgcgtagcatccgtgatcgcagccggccctccccgccgcatccgcagtcgccgcccaccctctgcgccgcgcccatcgcgcccctagcggtagagagagaaaagacacagaggggtagggtatgactatgggcccatagttttttattattatttttttggaattctgcattggctccacatgtatgccacattggattaaaaccagtccggattgaacaagggggtaatttgtccggtttcaatagtttggggtatcaaatatctggttttgtgggtaattcgtactgtcatgattgttcagtgggtaattcgtactttttctataaaagtaatatgttataaataaaatgagttgcatattacaatactttgtttaatgataaattaagagacataaaatttacatgattgatgatccttttgtttgttttgctattaatagtcaaagtaaaatatatttgacttgacactgctaaaagtgtttatattttatgatggagggagtaggtgattaaatttctcatgaagccgccgtcactgcgacggtgtgctctggcagggcgcaccctggttggccaactagcagctaaggtagcgcacggaaagctatccccgttgagaggtagtgaacgctgaacagtttccttcttctcgctgcatggagccgatttggtctccatcactaaaacttcattgcaactggtacatggaataatctgattctcaaaactcaaattgtaaaagttcagatgcagtgatagaataatttgatttcacctagagaaaaatacatccaaacacaaaaaaaaagtaattaactactcatttacaaaaatgtttaacaaccgattgatggtcatccctcgcgtgactcagcattctattcaacctgtgcccttgaaatgcttcacgtagtaccgacaccgtcaggccccactggttaatattacttaccacgaaaaacttctttatccgggcgatccatatatgctgagttggtgaattaattagcatcataacaggatgcaactcatggctggtcatcggcacagacaacttataatgtttgcccgtgcagttttgatcgcacgacggaaatataggtgcaccatccgtggtaaagaaggtatacatcgacaccctagctaaccaagcacgagctgtatccccaaggccttccattccaatttgagcaacccagtaaatttgccctgtgaggtatcatcaaccagtctaatataaaacgcatgacgttttgcgagggtatggtttgattggttgtgttctctgccatcgagctgccaatgtcgtctggtggtggctgctacttttatgcagttaggcatcgatctgcattctgtctcactctctctgaagcaaatgcttattgggcgcaaatagctagagtatggatgcattcctttattgcggttggcctctgatttattactagtgtttgtgcacgtactctctccatctcataaaaaaccaacatattattatattcgacacatcatattactacgaacctgaacatatatctgtccagagttgttctattagaatgtgtcatatctagttatagatacgttttatgtgggacggagggagcatattacatccggacatccagtcattgacagggatcggtccctagttaattaatatatatgtgtttgtgcacatgtattaattcgatcagggctcacactgaggccaagtttagttccaaattttttttttcaaacttccaacttttccatcacatcaaaactttcctacacacacaaacttttaactttttcgtcacatcgttacaatttcaaccaaacttacaattttggcgtgaactaaacgcaccctgagttataaggattgtattgggctacagtgcacagtcctttccactgtccaactcaactatttttatttgttagcctaaacatatatacaaaatttctttcaaccttttggcattttttcccccaaccataagaatttctgggctaaaagcttagacccatcaattaccaggtctgcactgagtggatgtttcacacaagtaaccatgatgcacgtataatttgttctaaacagagcacatatgcaaaatgtatatactcaagaattaaagatcaaataaattgcagtgaaaagaatcagtggacaatgaaaaagttaccaaataattgcttccctcatatggtaccggtgacataactagacgaaaatatggaaatgcccaaagaaaactaaaagttgtgacgaagttacaataacattggaacattatatgtacatgccaatgtgactgtcgaactaataaaaatcaggtggctgacgagcaaaacagatatataacgtcaacaaatacgatggtagaatattatgtcgggatagtaaggctagctagtgtcacgaaccaagcaccacccaaccaattctcaatgcacagaggcctcaatagattgcaactgctcaaatacaagtgttttgggatacaaattgaggagaaagagaggtatagactgggaagagagatcagacaaagaggaagcaggagattgggactagagaataggaattgagagggaaggtagcagcaagaaggaagaagccagtttcatccaatctgttcgatccttctccaactaccagttgcctcttatatcagtttcccttccagccatttaggcctaggcctgcccttgatgcccggcccaggaaccctgtaaggcccatatcgtgacagctagcttcctcgattggggaaatatttatgtgcataaaatataattggggcaaatatttatgtgcaagcgaacaatcacaagtaggggtactgaggagaattctgaactatatggcagagaccctcatctttgtttgcccttct

SEQ ID NO: 20527 - DNA, 11403 bp, Oryza sativa
catgcaaatatcttgcccaaaatttcctcttcttttattgaattcggtaaaagaaatgttcaaatttagtcaaaattttgcaaaattttaaagtactttggtgcagtaaagttccaaaaattttgaaaatattggtgaaaaatcagaactttcagaacatttgtgaaaaataaaagtgtaaacctccatgatacactgtatcgacatagaatttagtcaagcgatccgcgtgtgagcttggaacgcagctgatgtcactctaaattttttggtacagtctattcctatactccatccattccgtaaaggccaatctgaaatataatatgacatttttctagtagaatgaatctgaacataccatgtctagatcttcattacactagaaaacatcacatgttatccttggttggttttcatgtgaccgagtgagtactccactactttgccacatggctactcatgtttgcttcattgcttgtaataacatggatagtacatctacaactaccacatcgtcaaagatagtcagacagacagtctaaacatgataatggcattgatcgtgataaaactgatgattcggtcgacttctgccattagttttgaaagaagatgaaaatcatcaaacgaaaaggtcctatataccatcaagcatctcgaagcagcaactgaaggacaaccaatggagcagcaaggccaagcgtttgcagaactccaccaccttccagcatgttcattggagcagacgctacccgaaggatctcgtgggtttggctacctgcgagaataagaatcactatcttgctggcctctgtagcttgctacaatttctagtaatggaccatcacaattagtgcgaaacaaggtgcagagttggatggaacagtgatacctcgtgcgtctcaaattcctcataccttccattccgactggctgtaaagagagccggcgtactgtgcaatgaatcgtatacaaattaaaggatcaagcaaactggccaactgtatgtatatgagtttgcttggaaacctagctggtgcttttgggatagtaaccatcttttgtttagtcaggtcacgcagctggggccgaatgagctcaaataggcgttctgtgtcagaaaaaaaaaagattgtagcgcccgttccgtcgtggcgcctagcgggaaaattatctcttcaaaaccctaattgcgaaatttgattctttgcttgttgtctagagtccgtgccatctcaagatctcaaatccccgatctatcgtctagttcaattccgactccaaatccttccaaatcaaagtccctccgcaaaagtctattttgcctcccccgggttcgatgggccgaatctctctcggcccatctccccctccctcccggcgctctctctctctctctctcgctctctccctctctcccaccccctccgctccgccgcgcgccgcgcgcgcgagcgcgtgagccgcgccgacccgagccctcctctccgctccctcgctcccgctccccgtgcgtcgttcgcgcgcgcgcccgcgtggtcgtcgcccgcatcgtgcctgcgctgtctgcgccgcccggccccgctgcccggccgcgcctgtcgccgcttggcccggcagccagtgcgcgtgcccgagccgcgccactcaatccgccgcgcctcccgttgcatcccgcgcgcgcgtgccgtggtagccgaccgcctggtcgccgccgccatcaccctctgccgcgcctgcccgcgcctgtcgcccgtgtcgccgctccgctccaaaccgccccgccgtcatcgccgtcgtcatcgcctcgaccccgccactccgcgcgcaagccgccaagggacggaggcagagcccccctccctctgccgcgtcgcccccgctcccctcctccttttccccaaagaggcaagggggcaagcccccttttctctccctcttttccttttcccctccccgccggcgtcatccgcctctgtcaccgttttggccgcgagcgccgagcgccagctcgcgccttgaccgcccaaggtcggtttccaaaccgacatcgtcgtcctataaaccaaggcgccctcccatcgatttccccctcccgtttcgctcgccgccaccgcgccattgccgccgccttccgtgctctgtctcgcctccgccgttcatcaccaagcaccgggagaaccggtgcgttcgtggacgcggaaggggactccgggcgcgccctctccttcctcttccccggcccgaggccggagagattactcccgcgccgtcggcctctcgtcactgcgccccgtccgcacggtagtgcctccctccgttcttcctcctcgctccatctctcccccttagttttcggtagtagcatgtgtagcctccccgtagctagtcggcgccgccccgaccgttgccgccgctcgccatgtgctcgccgccgtcgccgcccgtgctccatagcacccgctcgtcgccggcctcgctcggcgtagcgccgcccaatccgacgctagggacggattcccgtagccgcgtagatgctctcaccgccggggattggcccctcgtgacctcgtcgccttttccctcttccctccccgccggttgctgccgccgcaatccgccgtcgacgcactccctccggcgaatccgagccgttggctcgtctcccctagtcctgagcaaccactcggtgtactcgctttcgcctgtaacgccatggttcgctccgccgctcgccgctgtcgtccgccgtccgttacggccggcgtcgtcgtctacctcccgccagcccgcgtggcagccacgtaggcaccacgtcggcgccagctcggccgagattggcccgggccgaccccggtcagcccctcccgtgcgcgcgttccaccgcgagccgtgaggctgcgcgtgggcccgccgcatccgttccaccgtgtccctcccccgtccgcgcgcgtgcgccgcgtgctcgctccgcacggtaaaccaagtcaccgacaagcgggtcccacccgggaccacgcgtggtgagcccggtccaccggctctctccctcctccctcccgcgcgcgcgcgccctgggccgccttgggccgtcttgggccggccagcccatttagctcggccggaccgccccatctctctcgggccgcgccctagccgcccgaggaaaagtctaatttccctccttcttttcttttcttctctattcttttttcaaaaaggatttaattaaatccttttcctttagaccaaaaatccaataatcttagaaattcaatatcttcccaaccgtaaatccatttgactccgttcaacttccaaaattcctcaaatctcgagatctatctaatggcatgcttagaggtcattaatagggctttattttcgctgtttgttgagttgtcccgtttcgcgtgtagtttcggagcccgaagacccgcagtgcgaggatttcgaggatcaagctccagatctcgagcaaggcaagccacctttgaacatcttgagcctatatttgaaatttaattatgttgcttgaaaatattatgcattgataggatcgcacttaatctgttgtcccgtctgcaaggcagattggcggacctacctaatttgttgcatttgatccttcctttgttaattgttatatcatgttcccttgtaaccatctagttgcgcctcgatattcgtgcactctgtgcgagtatcgacggtcgccttcaaacttaaaatctgagtaacaacttgggtaaaacttgggttttacaaaagacttggaaaacccgatacctgggtcggtgcttgtgaactaaatgaatttccaaaaccgcagaccggggaacgtaccgggtgtacggttttcccgctcttgcacctaaggaccgtttccttggaatttcatccgaacataagacaagtacgaccacatgggtggaatgggacacccctggctgagtaactagcttatcaggggagccttgatgccgagagacatgtggattcgccggggtggtgtcggggaggacccctgggcttcctcgcacagtatggtctgggacctaacctgttgttggtctgggacccctctcgtcagcatatggtaaacctgtgtcggctttggaaatgccttgtcatgaaagcttggaggtcttccgacgtggctgatccccacgggctgggtgatccgggttagtaatgtcgtgtgggtaaagtgtaccccctctgcagaggttaacaaactgttcgaacagccgtgcccacggttatgggcggatgtgaggtgattcctagcgtagttttgtttgactactgcttgtgaaattgctgttgtggaaaggggttcgctgtttgaaaaatctgcagctgatgggatcagctaggcccgggtggccgtttgaaagttgttggccggggtggccatttgaaaagctgttggccgggtgccaaccttgattcaagtctaaagactgatacattgcacatactccgaccgggcaagacgcactgtctcaaccgtgtcgtttgagaagcactcacttagttgtttttagaaaagagttcaaataaaatcatctgcaaaaacaacagcctttccttgaagcctgcattaaacacttatttcccttggcttgctgagtactcccgtactcatccttgctctatataaataatcccccctagttgctgaagaagatgaagcggatcctgctgatgaggagttcttccaggagcaagccggctacgatgagttttagggtttcggcctagttcccaagtcacgcctgtgttggttggtcctagtcctggcttccgtttcctttttgtaatgcagttgtgagctcgggatctatccgtagcccaacatgactgtatctctactctataataaagagaccgttgttgctgtgatattctgtctccctgtgataccagcactgtttcctgggactggtatcgatcaacaggttaatttggagcgtcacgggctagttccggtcgggattagttcggggcgtgataagagatggtatcagagcacaggcttggccctagggcgaaacccgacgtttaggacgaccctaaggatactaaattcaaaactacttgcgaaaagctaaggattcttttgttttctttattttcaatagtttgtttctaaaatggttactgatctttctccctctttcaaaattgtagatggcagtgaacgccagcttcagttcccacggttttggtgagggtcaccacgtcgctcagcttcgtgacctcgcccgtttccttggcttctcgtgtcccgagtacacggggtactccgtggaccgtgttccccctcactgtgagctctctatgtacctttacccttgtggaggtatacacagagctggccttcgcccacaccacttcactgtggccaggcccactctccagatcgcgtaccaggacctctcctggactgcgcttcgtcgcctggcccacaactacagccaccgtctcgggggctccgccttccggcagcttccacgccttccttctggccacgcagacgccaggtacccttgtccgtacagcgagtctcagccagtgctgactcgcatggttgagctttcggaggctcaggccactcagcacgacctactccttgaggcttaccgctcccttgccctccgctacgccgccttggaggcccgtctggccgaggagggtgtcacctcagttgacactatctcttgggactcaggtcgcctctatcacgccagccacctgtcctcccacagctcccgcggctctgcccgcactcccagtggcccgcgctcccccagctcgcgtgcgccgtactcaccagtgtactccccctacccacacccagttagcccttcctacacccccggacacaccctagttgcttcctcccgccgtggcccacgctttatccgcactgcgcggaagcgtgttgttggttcttctaccgtgttccgattccactacccagctcccccaccgccagcggcccgtgctgctgccggccctcgacaggttccgccggtcccttcgcgtcaaccgatcgacgtttcttcgactgaggagccgaccacaggaggcagccaggccgacgaggagtagaggaggcagtcttcagcagccgtccgtgtgttaggcccttttgttccgccgccaactcttttggagtcgtggcgaggtagtgcgtgcgtgtgtttgatgtgggtgttgattggtagtctggttctcctaggtggtgtgcgcacagtcaagctcagcgtagctctgtgacttgtccacacccgttgtatcaggtgtttttatgatttgaaaaatccagtttatgcctagtgtgtgctatctgacttgctatttactttgctccttgccctcctaagtgcttgtctgactcttacctcgccctcttctgggagtttagatggctagccgcccccgccgtgcagctcgtgcaccagcccgcttcggttttgaagaaggtagagttgagccagaagaaaatcatgagtcagctaatgagcagtctcaccacagcaaccgttcgcaccgtactgcttcccgcaacgcagaagttgagcaaccccgccgcagcaaccgcttgcatcgcacagtttcccgtaatgcagagatggaacagtctcaccgctctcaccgcactgccagtcacaattctggagaagaacgcctcccttccccacctcatgtggaaaacaacatgcagcacctgatggcggttcagacacaaatcttgcaaggattagccgcagccgtagccagttttcagcataatgcgcatggaaatggccaccctcacatgagcaacaatagatccaagctgacagattttctgaggtctcgtccggcagagttctctcagaccgtcgagcccgtcgaggctgaaagatgttgatagaaaactcaacttagtacagtgtactcctgttgagaagacgctctacgcctctcaccagctaagaggacctgctacagattggtgggagaattactgcaatgcacaccctgaacccactaacattgcttgggatgagtttgcgacggctttccgtgcagctcatgtacctgaaagcaccattgatatgaagaaagaggaatttaacaggcttaagcaaggcaacaacagtgtcaatgagtacctaagtcagttcaacaaattggctcggtatgcccctgaggaagtggacacagacaagaagaagatcaagaagttcttgaagggaatcgcagttggaatgagactccagttgcttgctcatgacttccccacttttcaacatatgatcaataaggcacttctacttgaggatgccagaaaagaggctaccgaagaatacaagaaacgcaagtctaaccatcagggaaattcttcccgaggcgcacctcgccctcgctatggtcaacccatgcaatatcaccaatcggtcactcaggctaaccgccagccaggctacgcccctcgtcctcagatgaaccgtccggcaccccagccacagcagtgtgcccctagtggcaatactgcgccaaacagtgttacctctttcaagtcaccgcagggaccgtcagcagttcagtgtttccggtgcaaccagatgggtcactatgctagacagtgccctcagaatcctaccaacaccaactcagggcatgctaatggcagcactgccaggactcctactccagcggcagctcagtctcgtcctagctctcaggcaagtggacaaggttcacgtgcttccaacaactttggtcgaggccgggtgaaccacattcaagctgagaccgctcaggatgctccagacgttgtgatgggtatgttctctgtcaactccgtacccgcaatagttctgtttgattcgggagcttcccattctttcatatcacaagcttttgtgaaaagaaatggttggaaaacccaaaatttacgtgtaccaatgatagtactttcccctgggaggaatataagggcgactcgaatatgcccggaagttaaccatagaattgaggaagttgacttcctagccaaaccgatagtcctagactcacaaagcttggacatcatcctagggatggattggttggctaagcacaaaggacagatagatcgtgccgaaaagtccatcaccttgcaaggacctggaggaaagcaagtccgctttacctctaacacccctaccgcaagtcggtctatcctaacctgtttacaagtcaccaccttggagtcggtgcccatagtctgtgaatatcccgacgtatttccagaagaattaacgagtatgccaccagaccgagagattgagttcgccatagaactggcgccaagcactgcaccaattgcaaaaagaccataccgaatggcagctaatgagttagcagaagttaaaagacaaatcgaagagttggagagtaaaggttatgtgcgacctagctcatccccttggggagccccagtgcttctggttaagaaaaaggatggctctgagagaatggtaatcgactatagagccctgaatgaagtaactataaagaacaagtacccgttgccacggattgacgatttgttcgatcaacttaaaggagcaagagttttctctaaaattgacttgagatcaggttaccaccaactgaaaatcagaactgaagatatcccgaagaccgctttctcaacgcgttatggtctatacgagttcacagtgatgtccttcggactcaccaatgccccagcattcttcatgaacttaatgaacaaaatctttatggaatacctggaccagtttgtcgtggtgttcatcgatgacatcctgatatactccaagaatgaggaagaacatgttgaacacctgaggctgataatggaaaagctcagagatcatcaactattcgctaaattctcgaaatgcgaattctggttagaccgagtagcatttcttggactcgtgatctccttcaacggtgtcgaagtagatcccagcaaggttgaagctgtacttgcttggaacccgcccaagaatgtgtcagagattcgcagcttccttggcttaactggatattatcgaagattcattgaaggattctctaagctagccagacctatgaccgagctgttaaagaaggaaaagaaatttcactggtctgcagcctgtgaagacagttttcaagaaatgaagaaaaggttgaccactgccccagttctcaccttgccagatatccgaaaagatttcgagatcttctgtgatgcatcaagacaaggcttaggatgtgtcctaatgcaagaacgaaaggttgtggcctatgcatccaggcagcttaggcctcatgaagtcaattatcccacccatgatctcgagttggcagccgtggttcatgctcttaagatctggaggcactatttaatcgggaacagatgtgaagtatacaccgatcacaaaagttttaagtacatcttcactcagaccgagttaaatatgaggcagagaagatggttggaactaatcaaggattacgatcttggaattcataccaccccggtaaagctaatgtggtcgctgatgcgctaagtcgcaaggcctattgcaatgtagctcaaatacggcctgaccaagatcgcctgtgcagagaattggagaagttgaggctgatcatggtacagtcaggtgtccctgccagcttgacagtacagcctaccctagagtcgcaaatccgagaagctcagaaagacgacgaagggataaaggagttaacaaaaagaatacaagagaagaaagacaccgatttgtccatagacgaccaaggcacagtttggtgcggtccacgcatctgtgtaccggccaaaaaggagttaagagatctcatcctaaaagaagctcatgagtccgcctactccattcatccaggaagtacgaagatgtaccaagatatcaaggcatacttctggtgggctggaatgaagcgagatgtcgcagaatacgtagccttgtgtgacatttgccaaagagttaaggcagaacatcagaggccagctggtctgctgcaacccctaccgattcccgagtggaaatgggaagagatcggaatggatttcatcaccggtttgccaagaacccctagcgggtacgactccatctgggtaatcgtggaccgactcacaaaatcagctcatttcgtaccagtgaaaaccacctttgatggaaagaaactagcagaactctaaatgacccatgtcgtatgtagatttggctgtcccaagaaaattgtgtcagaccgaggcactcagttcacctcaaggttctggaagcagttgcatgaagccctcggaaccgatctaaattttagtacggcctaccatccgcagaccgatggttagacagaaagggtaaaccaaatcctagaagacatgctacgtgcatgtgccctggatttcgaaggcacttgggatcgttgtttgccgtatgctgagttctcatacaacaacagttatcaggccagcattcagatgtcgccaaatgaggcaatgttcggaagaaagtgccgcactccctagtgctggaatgaggtgggcgaagcgctggtattcggtcctgacatactcaagtcagcagaagaacaagttaagctaatccgagaacgtttaaagacagcgcagaaccgtcagaaaaattacgctgacaatcggaggcgtgaccttgagttcgaaaaaggagatcatgtatacctgcgggtatcacccctccgtggtatgaggaggtttgggatgtccggcaagttagcaccccgctacattggcccctacctcataactgccagacgtggcgaagtggcttatcagctcgagttacctgaaggtctcgcagatgtgcacaacgtgttccacgtatcccagttaaagaaatgtcttcgagttccagaagagcaagtcctcctgggtaatatcgagctggaaaagaatctgacctacaaggaaagaccgatcaaggttcttgaagaggcagaacgtcagactcgaaggaagaccaccaagttctacaaagtccaatggagcaaccattctgaagatgaggcaacctgggagcgagaagatcttctccgtgcagagttcccggagctgctcccctaggtgctgaatctcggggtcgagattcttgttaggggggttggtctgtagcgcccgttccgtcgtggcgcctagcgggaaaattatctcttgaaaaccctaattgcgaaatttgattctttgcttgttgtctagagtccgtgccatctcaagatctcaaatccccgatctatcgtcgagttcaattctgactccaaatccttccaaatcaaagtccctccgtaaaagtctattttacctctcccgggttcgatgggccg

SEQ ID NO: 20528 - DNA, 1358 bp, Oryza sativa
gttcatatgtgagattatcgatgacatgcgcatacatctcagatgcaacaaatgcacaagtaatgttcctgtggtatttctgaacaccaggtagaaaacatgtatgcttggtaacgactgacactgtccaataatccttccatttccccttatacgcgtgcacactccagggacaaccatctttttccttaacacaccgaacttcatattgcgaccggttcgacttggcaacccaaaactctctatgaagtgacactgcaaaatgttttaccgcctccttcatatcttctgctctactataaatcgctccctgaataacctcattttctttgtactcccatttcacactatcctcttcagagacgatcagcccagaaaaatcctcactagcccattctgctggattaatatccgtctcatcatctgacgaatcaccttcctctacacgctcgttgtcagaatcctccctctccatttcatccacaatggcaccgacagtctccccctcgtcggccactccacctggttgaatgcccactggagctactacgcccccgtcctctcgtgggttgacctcctccacagaagtctcgtttacttcagcacttggtccctcgccatcatccatgttcatctgcacacttggatccttcgggtgaacaaacggaaccaaagctagaggccacccgcgttgcaatgcattttccaaataccatctccacactcgagagttttgaactggcattagttccgaataaaaaccctcagttgcccgacttactataacattgattgttatgtcacttgtctgtggatcaactctcaagcccctcattaaccatccttttatagaaggtacactcctctcagccggtctatcaattcccctttctgatacaataaaatctgacagatctaccccagttggcccataacggacgtttcctggtccatggtaaacttgaaatatttgtttgttcgacatatctgtcaacgaaataactagatcatattactctttcatgcaataaacatctacaacgtaatatcttcttgtgtaagccaatgcaacggtaatgaattgattccaaactagcagatctacgtagttaccgatatctacaatacgcacttctagattagtacaactaaaaccctaaaaatataatgcatttattcaaacaaatttttaaagaatacacactatttaactcaatagtcacatataggatctatgaatattacctgaaattagcgtctgaatccggcagggcttcgccccttcttctcttctcctcccctctcttcttttttttttcactggaattgaggagagaagaatgagggctgggggctgg

SEQ ID NO: 20529 - DNA, 12326 bp, Oryza sativa
tttataaaactggaactcaggaaggctttatttcctcaattgcatcaaatactcgtcttcaagaaacactagaaggatgattcttttcagtagaacatgaggttagtagtactatgttttctcctttagtattaataatatgtgtataaaataacacattcaagttatatagttgattgaaaatatgctttgtttatattagttatatgaaatttccaaaatttagggcgtatttctttcaggggccgcaaattcctggagacggccctgatgagtgcatctgtgctggatgagaatgacacgttcatatccattggatttccatgaacccttgccatgtcatcatttcagatagattcggatcggatcgaattgtatattttccgaaatttattagctcttctatgttacgatgacatggacaatggtaattaatagctgtctaaaaaactggcaatcctaccaatctgttgatgtgaaggacttaacaaatatttattgtgagcactcctagcacaagttaaaattgaatattgatgtacgatggcaaggatgaaagaaattgtagaaaaatgatttagtcaattattgttttaaaggaatatcctctagacgatgtatattccaaggtgtgacttgccattagtaatttagtatcttttactgtatgtctgtatagttcatgcgcacaaacttggtgaatgagttaaacgggaccaaacaactttaagcagagcaaatgcatgcatgttctgttgacagcatattacatgcattgtgcttttcatgaatcgcagaggagtgaatgcatttgatgcagctctctgtgttgacatcatcctttggtgtaagctatgagcctcacaatgagacacagatactgtaattagataagtagcagttagaaaccacaaatggattgccagatgacggagcacacatccacaattttttagggtataactggcgggtattatcagggaaatcgcttgagttgcttacatacgtggcgctgcctagtaggaatggaaggaatcaggcatatctccttgtgctatcttggacgtcacagtgcatccgagctgaaatcggcaagaacaagcatcgcatgggtctctaatgtagttagattcattgtcttttacacctatcccgagaggatatcagaagaatcaagatcgaccatagttgttggtgcattagttgaaggtgtatttatttatgtgaaatcagattactttgagaatggaactaaactttcaccacttgaaaattatattgttttgaatgtggaattcttacatgtctacatgttacaatacagtttcaccccaagagcagatggacaatatataatacatgggccatatgggcagtaccattgaccaaactatgacacgaggtataaaatttgttgaacctggataaatcaatccatgctatacaactacttgcacagcttctcggactgggagacagcaggaacgactctatccaagagtgcagaacatgaaagtggtgctgctcatgcactagtgctatgggatatctggtgatcggtctgcctctgccctcgatctgctttcagttaccttcagaagctagcaacttaattctgctagaaatatggcacctcccaaaagttgggttgttgtcgtgctttggggcgaggaattgaaccagaccatagaaacgtctagctgcagcctgtattgaagtgcagtagagatggattacatcaaatatgtatgcaaggattaattgatgaaatcactatgttcccccaactacagtaccgtgttataactgtttagtcactcttaaagattacgcagtagtatatgtatatattatctgcgaacgaccaaatatttagcaacatggatgcatttcggctacattagttttcatgtatttgctgctgattctttactaaccattccaaaaccgtgatagctgacaataaatttctgttgttaaatatgtagcatgcacctatttgagcccatcagacttagctagtagagtgcactgcgacacaaaccatgcatcactatgcaagttagctttaaaaggtggagcccaggagcaacagagtgcaactgcatacctgttcttaattatgtggaaggccctacacttgcaaagcaatcaatgaatctgaaatattttagttagtgttataaaactagtatgaaatcaccatcggaaaacaaacgcaagagaaataccataggatatccaaacatgatgatgacaccgaggcacaatatttgttaacgaggttcagccgaaacttgcatctctggggcactggttacaggcagtcctcccggaccagcatattacaatgtattagagtcacaatgactcgttgtcggacaccgccggctgtcgctccctctcgctatgctaagtcgccatatggttataacaagtccacccctatatttaagagatattctaagatggagtccgctctttctctagtcctactacctgttacaactctaggtgctaaattgtaaccgactttgtatacatattcgacacaaactctagcatagattcgtgagagggttgcacgacaacaggatgatataaattgcttgatgaattagtagatattcaaccaatgtatactgcaacacttgcctggcttctcggaatggaaggcatctgggatttgagatgcagtacacaactcttccatcaaccatcaacctgagcagcggcagcttgtacccatcactatgtaagaagagctaaccaaaaatatggtcttcctcttcgtccatcagatcaagagcttgaaacatgagtgagtccaccctctcgttatctctctataccaccagaagctgaggtgagaaagctgcagacggaaaactgcatgaagtgtggcacaaagtggataattagaccaaaatttacatgtaatggttgatggtctcagcttctttcgacgaactcttaggctatgcaaaaaatgactaacgatcgttagcaatattgagcagaccactagggccaatccatttcacgatctcctcaactgttattatgcacgcctggtagttttttttaaaataaaaatgaaccacacgtgatggtgcaatgtgtcatattgatatagcagaaaaaattataagactgtgacacatcgcccattgcgagagatggacaaaaatatggcattccacgacgctcgaaaccatccaatttgtttacgagggagagggcaagagagaaggatatatccacaccccgtgtgtagtcctgccagcgtggtttgtggtggatagaaaagcaccaccgcaggagttaacagactgctagagaagaggtttgtgggggaggaccttcaaacgacacctccaaccaggatgtgacgctgaaggcactgccgttgtctaaatagaagccaggacaaagttttctctacaacgatttctcggaagggaagaagacaccacgatgacgcctccaaggaggttgcagcgcctgaaagtgctgcccctgctggccctgaaacggactaggccttcgcccggagaaactcatgccctcccgtgcaacatccacatcgcccccaacagccaccactatccaagactagtttgacgtgtgttaccattgcaccagcaccacaccactaactggccaccatgctggaggttcctttctgaggaagggccggtgtccggcacgccatcactgtagcactgccattccccaccaccacctacaccggagcccggagccatcgccatagaggaaagttgccacaatcaacaccacacaagtgagcactacagccacaccctcccaacagcataggccactgtcgtcgtcccgtcagcaagagaggaaggttgtgggggtggggcgaggactgccaccttgccaccacacctggacggcactccagcggcccctcacccctcccccaccaccattgtgcatattcgtcgagctgatcgctgcggaacgccggatccaagctaccttgtatgaggagagtggccaccgtcgctgccacacacggaagtgttgcagccgctcctccaaacccacgatcattggagatgaccacgtcacgccatgccatcatcgctgctcctcgatgtttgttgtctgtagaagtcgttgccgagccgaaactggcacaggaaagtgctggatgcagtctcgaggtcactggattcagcagcccctgccgccacgtccacatcctccactctgctgctccatacatcgcaacctccaccttgcgctggccagcctctcctctacccagccacctttgcctatcttttctccgtatcgctgtatgccggtccagctaggggtggcctagatctgggtggcacttcttcccccttcctggtagccttatcgctcggtctagtatggcatcgttagggaaggaagaaccctccactgccaaccttgcagccccgtggcttgatgtcgggccattcgggcggcaacgaggtggaggagaggattgggggtagggtgcggcgcttgctgagcggagtatagcttggtggctgctatactggggtgagattaggtgttgtcaggattacaagtccgctaactacactaactaactaacttccagcccattaagcctgccttagcatgctttcttcactcttatagtgtgagagctgagaacccattgttaatgaatctgatgtacctactcctgctgaaccagctctgattatgactgggttgtgctttttcttaccgagagaaagtgctcttcaataagtagcaggcaaccatttggggccatcagtctgcagcaactccatagagcgcaggacattgcaaccagacacctaatacagcccaaaataatgtctcccctagtttacgttcacgatgacagcggttccactgaccacatctgatacaaccaaaaattatgtcactggcattcaaatctgcgctagtataaacacattcagttgctatatcatctatgtttggaaagttctacgagtctagttttcaacacaacaaatggtatatcatttgtactcccgagtaaggagttatcatttgtatttccaccaactacaatacggtgttaaaaccgtttagtcactcttaatgaataagtatagtagtatatatatctatatcttcgaataaccaagtatttagcaacatggatatacatttctgctacattttttttcatgtatctgttgctgattttacttatcatcaaaaatccttgatagctgacaagacattctgttgttaatttcagtgtcattatcgttaaagtaatactacgagtcgaaatattaagtgtccagcaggagaggaggtaccaaaatcatgtacgcccattggaacccatccgacggctgacgaacgtcggtaccgcgaggtaccgtaatgccgatgggcggtacctcccctccatccgtgttgtgctgattaagtggaagggcaaatctggaatttcgcatcgtacatccgtttctgaagctcgctccttcagatccatctacgccagtcctacaccgcggtggcgtcgcggcccttcctccacctccactctccccctgcgtccccactccccaagtccccaggccagatccggccgccatcgactttggggcagcgtatctggacaaggacggcgacgggaatatctcctcgagctcgtgggcaggcaaacaacgaccacaacgaagatgcggcgccaaggcggcgagctcagccggcgtatgcggcggacccctgggtgacagtgacctcggggtggtgggctgatgtgggggatgcggcaacctctcagatggcggcggtggcggcgatcgggcagaacctcttgaccaccctcccctggtccccccactactagaatagtgaatgtcaacgaccaaaaattaacgatggctgcataatcttggtcgttgatactgctttgggtcgatttctggtatccgacgacgctagttttttgtggtcgctagtgcgtagtgggctgaggtcgttgttgttatttactcaggttggatgggcaattgcaaatggtcgttattactcagcgacctgtgtcctcagctctccggccattgccgccgccgccgccctcggcttcagccactgccgccgccgctgccctcggcttcggccaccgccttcgattcgctccacagctgcaagcctgcagctgctgcccgtgctccctataactttgctctttgctgctctttgccacacaaaggaggtagcggcacagcgggaggaagaatccccatcattggcataggaaaagtctatcagatcccctccaatccgctgctcccttccaattcctaaatcccctcttttccctaaacatatttcgccccaaatcaatatgaatcaacagtttttgattccaaatccgagatcccctctgctacccccacatatttcgccccaaatcagtataaatcatgaggttgagagatgagaggagtgttgattcaccgccatgtctcgcagccgcagtttatcaccggaggtgacaactaggggctgcatcgaatggcctacatggtctcctcagggctcccaaatgtcaatcctccccaccactgaacatcttgatgccaagctcctccatgagtacatctttccacctgatctgcccagccactctgttatttgttccagttcacttgggactcatcaatcgacgaaaatagtcacaacaggtattctccaatctcctaatgtaaacatttgcatatgatttgtgaaacatattgaattatgtgctaggttaaatgttaaatcttgccaggttaaagtgttggttgtattgtcctcttcgaaactaataaaagctgcaaagtttgcttggtggatactgattatttctatgctgccctcaacctgaaatgtttgatatggtcctgacaatttatttttgtggtagctatggcactttcattagcattaggctgtgtttagttggatccaaagtttggattttggttgaaattggagatgatgtgactgaaaagttgtgtgtgtatgacatgttgatgtgatggaaaaggactgaagtttggatccaaattttggatctaaacacagccttagtaatagaggaatgtaggcaatttgtttgtttgtaggcaagaacagcaagtgttctagctttattcatagaatgaattcataattatattttataaacagaaacattaggtgtgacttctgtgcaattaacaattatagttacatgtgcattagttcttcctaatttgacatatattcttctcctagactgtttttcatgatggtactactagtttgttgattttagttgtaatttgaaataattatagtatcagcagtgctttacttaaatggtgtacatctcttgttttcacctctgctataatgctagcaatacaagttatttctatttacttaaaattgagttctgcatccagctaactctatacatacttcaattgaagggtctaaagaccatagcttctccttggattcagttgggtccaaagaccatagctactcctttgtttcagttgttgaggacactatgggtgatgctgtcgaggacaagatgtaccaagttgtaaaggaagatgaaccaaaggaattacttaaagactccaaggttaattttatggcaaacgttgttgaagacaccatgaaagagaaagagattaatgaagatgaccatatgggttggtactccttagcttcagttgttgaggacaccatggatcagcaagtgggagcagacatcatggaccagcaggttgtagaagactccttggtaacagacaccatggaagagagtgatgaagatgaatacttgaaggcagaatatgaaaagggtgcattaatcttcgctagagatgaggcaaatgccttggaaagaaaagaagctgaagctcgttatgaaaaatcacttcaagagattagagatgaatttttgaaaatttatgtccctttgtattttactctaagaaaaaagtaaatttagttagatagataatatataaattcgatcagcatccagttcatggccagttatttgttagcaaagaataactcatgcatctgtaactctgctatcactttagtatcttcaatgaagactatatattgtcttattgtggggtctgacttgattgatctatgttcactgtgtgcattcttgtttcagtttatagtatcattctctgcagcagtaagatagtactttgctggacaatatacagtctgaaagtttcacttcaactggaactttaagttatgctagacaccacagggactgggactctgccaatgatttgtttgttctatcccttttaaactttgtatccattgtacagtgcaatatgatttgttcaacaaagttgtaaagtattcaactacaggtctagatgaagggtgctcgatttgttcaaggaagttgtacatgatttaagtgcagccggtacactgctatgtgtatttcaagggtatgctaatgctgtaagcctgtaaatctgtaagcataacatcgaaatatttttgtacatgagctatgctttacagctcagaaaatgcatcttaccttttttttctgctctaaacatgatgtgttcgattttctggtcgtccttttatttcagttagtatatgtataaagtagcaatacaataaaataaacatcaaactagcttttcccagttggatattgtgttgtaccttaagttagaaaggtgctggtgctgggttcgagtcccctgaacaaaagtttttctaatgattttactttcttttccatacgtttttctttaaaaaaaatacatctactatatgttccaaaatcatgctatgtgaacaagatattttttattaattacaatgttaacaccaaatttagtatagtttatggatttgtcgctatcctacgtatctttgttcttgggttaagaggtttagacaaccaatccaacacagtcgtctagttataaaagtgtactctttcgtataaggtcataaccgatccaacaccatcgggtgtatattcggcatagttcatcaaggcattaggcattagaggatcgaccgttcaaactagttattatagtagaagaaaacaaccattatatttctttcaaaaaagacaataaaatatatgccgtgaaatatattgtactaaaatagtgtatattgtaaatgaattttaaggtaaaaaagaacagagaaaatgtattgtccgattatgacaaaaatgagtatagttacaaagtttactccttcgtacaaggtcataaccgatccaacgccatcgggtatatcggcatagttcaagaagccattaggtgttagaggattgactgttccaacaagattattacaatagaagaagacaaccattatatatagtgcataaaactttgaataaacacaataaaatatattgtactaaaataatatatattgtaaatgaattttgagttaaaaagaacagagaaaatgtgttgtgagattatgaaaaaaatgagtctaaaaaaattattagtacagtttcacatcagggacattaaagaaaataagttgttgctttttaaaaaaatttcagatgcatggaaaaaattatggcgggtgattacataccttttttattttttttggcgctcaaaggaggagttttaggcatatgtccatgtacatatctcctcctccattcataatagacccaatatcttctcccctctcacatcccctccctcaccagattgagagaaccacggatggagcgctaatcattggtgccgatcggctgatcctctacttctccagcgcggcaccgtgccgcgcagcctcatcgcgctactgatccggtggttcccgtccgagtgcttcttcaatcaaaccctagaaagttctactacaggtcactacttctccctttgcattgaaatcatgtcgtttctgatctggtgcctgtcctctatccttaatcaatccatgatgtttggattctatccttaatcaatctgttgcatgtccgcatttgttagacatttctgaattgttgttttttgaatcaaacatattttatagcgctgggctgtcacttttttttgtgtatgaattatttcatctatagtcaactaaaaacagaatgcagtgcaattaatcatattgccaaataataatttatatgatatctatctagtcttgacattttacctaacagtgtattgtaactcttctttgacattaattatatatacagggttatataaaacttaatatcaactagcaattagaggggatggctccaagcaaggcatggatgggccttgtggatgattggctaaatcacgagtacttagagggtgtagagaagttcatagattatgcattcagtaaattagatggtgtccaggttatacgttgcccatgcatcaagtgctgcaatacatattctttgcctcgtcacatagtgtcttctcacctgaaagcgtatgaaatactgaggagctacacattttggtatcatcatggtgaagtcttagcagaacaagagaatgacatagaagttgatgagtatgattcacaggaatttaatggggaaggatataatggaatgcaagacctgatggaagatttatttcctcagtgcaacacccctggtggagacgaagcgacacatgaatctactgatcagggacctgaagaggagccaaacactgatgcggccaagttctatgctttgcttgacaaatacaaccaaccactgtatgaagggtccagaacctctaaattatctgccttagttaatttgcttcatgttaagaatttggggaaatggagtaataagtccttcaccgcattgttggaattgctgcgcaaggactttctacctcatgactctacactgccaaattcttattatgaagcaaaaaaaactattcgtgaactaggactaagttacataaaaattgatgcttgcaagaatgattgcatgctgtactggaaagaagatatagatgctgaatcctgcaaggtatgtggatcatctaggtggaaagaagaaaaacacacaggggaaattaagcactcttcagctgggaagaagattccacataaaactatgcggtactttcctacaaaacctagattgcagaggttatttatgtgtaggaaaacggccgcatatgctaagtggcacaaagagtgtagggttgatgatggagttatgcgacatcctgctgattcaaaagcatggaaggagtttgataaaatccattcatcatttgcatctgaacctcggaatgtgaggctttgtcttgctagcgatgggtttcagccgtttgctaacatgtgaacctcctattccatctggcctgtattccttgttcctcttaatttgcctccttggatgtgcgtgaagcaacaaaatgtaatgttgtcaatgctactaccaggacctgatggtcctggggatgcaatcgatgtttatctgcaaccattgatagaggaactgatagaactttgggaagatggagttgacacaatgattcatcaaccaagacaaatttcaagctacatgcagctcttctttggacagtgcatgacttccctgcttatggaaatatatcaggccatagcacaaagggaaagttggcatgtccagtttgtcataaagaaacaaattcaatgtggcttaagaaaggtcggaagttttgctacatgggtcatcggcgctttcttcgcaaaagtcacagatggagaaatgacagaacttcttttgatggtacaaaagagagccgaggaccatcaaaggagttatccggagatgatgtgctcaagcaagtgcaggatttacagggaattatattgtcaaaggatatgagtaagaagacaaaagtatcacgcagtgataggggagataactggaagaaaaggagcattttttttgagttaccatattttaaaactctattgctacgtcataatcttgatgtgatgcatataggaaaaaatatatgtgatagcattattggaacactaatgaatgtcaaagggaagaccaaggacaatattaatacccgtagtgacttaaaactcatgaacctgaggccagacttgcatccagtagatgatggaggaaaggtggttttgccacctgcgccttacacgttatttccagaccaaaaaaaagcactgcttagtttttttaaagaattgaaagttcttgatggattttcttcaaatataagtcgttgcgttaatatgaaagagcggaaaatgtcaggattgaa

SEQ ID NO: 20530 - DNA, 1567 bp, Oryza sativa
tttgatcgctatcagataacaattgttaattattttaacactagtgtagccttgtaggttgttgtgatgatttctggaaggtaggaagaaatagagtgtctgcactgcagaacaacaactcgaagttcattagtcctggactgcttcagcaacaagttgcaagatggacagcaccttcaacagctgatgatttatttgggtcaccagagaacatggtgtcagctacagctattgtgcaagaaggaaagagcaagcctgtctatgtaaggcagagcaatctaaagtaccagaaacacactgctatgccacaacctggtaattatccttcatgaatgtatattcaaaattaaataatatttaccaagtaacaatagaattaatatgcttcttttctgataatattgaacaaatagctagctagtatgcttattaaaactaatttcttgttttcttagagaggaggatgattcagacgaagagtcaatagacacatggcttcggagatccaggaatataacaattccaaaagttagaatattcccctctcaatatctactctacttatgccatatatatttttatatcaacagcattaacatgtattgtagacatgggcgatgcaaatgatgataccaccgaagaggatggcgtacataatagtaatcaagctgctaaaagaagacttcgtccgcaaactaattcacatgctccaagtgatggtacgacaagaatttattttattttctacataaagtacttagtataatttgtttttcaattgttttaggttctcaatcagttaagcgcagtagctgtggcaaaaacaaatgtgaggactgcatcatctcaaggagtaaactagtaacaaaatgaaatattgttaagttacttattttgtcctcgtatcaatttgttgtgtcatgtagatattagtaatagcaataatggatcccatgctttggatgatgcacataacagtatccttgctgcaaagagaagacgttctactcaacctaatttgcaagatacagaacaagatatattaaaacattcaatacaagtttttccattcaataaataaatttactataatagttgttttcttgacatatctgttagatactgagcaagatgtaattgaacgagtccaggtgcagagtttgaatggtaccttacaaaatggtatgcacgataattcaactatcatttgtttaattcatatctagagttcatatttttatgtttatctaatttgctaggtactaaaatggttcagcacaagggccgtggcaagaacaaatgtaaggaagttgccaaactcaaggagaaccaaaaaattaaagttgagttttacaacaattgtgctctttcgaatagtttttcacgtcatctgggtagaattgttcgtgatcggaacattactccgatcaaagtgaagaaatggtcagacattagtaacacagagcaggaacacatatttgcctcgattacggtacgcatctgtcttcctatgaaatgttctctcttgttttcaataaaactatgcttgcactgaatcatttgtttt

SEQ ID NO: 20531 - DNA, 20243 bp, Oryza sativa
tccttacctctccataaataaagatactgaaactaaggttacaagttggaataggattggaatctgaattgtttataagttctttgttttttcaacattttgaagaggtatagataattgtgttaatatagagctatatacccctagggaggtatatatataccttctcactaggactatgggctatatattcctttctacacattccaataactataaaagtctcaccattgccaatcataaacttatcttctaattggtttaaccaatttaatctgtttataaacctccccaaggaaggaataaaatctcacttcagtagtatgtaaaaactccaactacataattgatgaccagattatagtatatgtaataactagatgatgccacgtgtgttgcggcggactattcgttcgtgtaatgcagctataaaatttcaatgtatagacatgagaaatattataaacctataaagcacgttacatatgaaaatcgaatacttcttgtagtggtttttttatagcatactacactaagtggtgaatgaatattgggataccttataatcaatgaaaaatgttaattgtcaacatttaatgtctattggatggttgtcatgaagcatggaaattatctaatggctgttgttttgtgggtgatgtggctcaaagaatgtttagtttttggtgccaactatataggatatatagtttaccaattctgctcctaacagaaaatatcaatgcaacacacaaatattgcgccatcacaagagtaggtagtaaataactgggctggcatcaagcaattgaaaactctactttaatatatcaattcagaagatatttgaaacccttctccagcatctgatgtgcttgttggagtccctgcaccacatgcacgtttatcacagtactatggtatcagtagaacggataccatcatctcaatcgggcggtaacccccatctcaatcgagcatggcgttcgtcacagcttagaagtcactgatgtgaaaagttatctcaatcgggcaaacggccgtcacagatgaacctatctcaatcgggccataattaaagctcgtcaccgatagttttaacccagacgatcagtcaaactatagcccgtcacggatgacctatctcaatcgggccaaaaactatagcccgtcacaaatgacccttatctgtgacaggcattaactatagcccgtcacagatgagtcatctcaatcgggcctaagttaatgcccgtcacagatgagtcatcacaatcgggcctaaattaatgcctgtcacagatgagtataatcccaaaaaaataaattttatttttaggcatgccatctagcctctctgagatcggcttccagaagagtagttataacttgttggtatgagtattctattaatcctattaagccctaggccaggatgtcacaccccaacatccttcattcttatacattcattcacatacacaaccatcaaaaatcctaaacaacaaaattgtataactcaccgagatctacaactattgtatcggtcctttgtacaaataagttcatttgaacaattcaaatttttaattttcaaaatttgacaacttcgaacaaaagttagggttaataaatgatttcaaatggaaaagtcaccaaaaccaaagttgtagagctcatcgaggtgcaaattttttattttggtcatttctccatccaactctacttaaacaatttaaaatttgaaattcaaagtttgagaaattcaaacagaattttttgttagtgaacgacttcaactgaaaatgtcatcaacaacaaagttgtataactcatcaagatctataacttttattttagtcatttttctatataacattttttgaaccgtttgaatttgaatttaaaaatatgacaacttcaaacaacattttcaaatactaaatgatttcaactgaaaaagttatcaacaacaaagttgaataactcatcaagatctaaaacttttattttggtcattttttcatctgataaagtaatagtaacattgttcagaaaattgacatatctctgatctggctttataaactataacacatatatgtaaaatttgtgaacaatgttactaacattttatcagatgaagaaacgaccaaaataaaagttttagatcttgatgagttatttaactttgttgttgataactttttcagttgaaatcatttaatgtttgaaaatattgtttgaagttgtcatattttaaaattcaaattcaaactgttcaaaaattgttatatagaaaaatgaccaaaataaaagttatagatcttgatgagttatacaactttattgttgatgacttttccatttgatatcatttactacgcgtaaaattattttgactcataaattgaattattatactatagttcaacttataaatataaacatttcatatgaaaaatggaaaaatactcatcggtgacgggctttagttaatgcctgatagagattaagtcatgtcaactagggattagtatatagcccatcactgatgagtcttgtgtgatgggcctcaagttggtgcacgtcacggataatggtcatctgtgacgggccccaacttaaggcccgtttgagatatggaatattatctcaatcgggcctaaagttggggcccgtcacggatgatggtcatctgtgacgggccccaactttagccccgtttgagatatagaatgttatctctatcgggcctaaactacggcccgtcactgataggtgtcatccgtgacgggcttaagttttatgcccttctaatatgtctgtgcgaccatatctcaatcgggcactttttcggcccgattgagatgacttccttgtgacggcccgctatttccaggcatgttagaggccatcacagatagaaggatctgtactagtgtatttctcattacaaatatataccacataccatttttatgtttacacgctaagtaaaattatagtcagtggtacttaaatttcaaaagttctagactggatacatgttatttgaaaggatagtatttgataagaggtaatatatatgcagtgctaggggcataccgagtttcagctgaacgttatatatgtgtgcacaactaagcctgccaatgggttggcatccaccccgaatccaacccaacccaaagtgactatagcaaaattgtcactctaatccagaccaagaattccttgagctaaccccacccaacccaacccacaaagttgctcagtccaaattcaacacaatccatgggtggaatccattttccaacccatacccaatccacggcaggaagcagagcagagcagagcagccggcgaacactaacactgcatacagctactagcatacttacaaataacataagcaagatgcaaaaataatcaatcaacgctactagcatacttagaacttttgatgctttaagtagtgccatccaacaagttttggcaactaaatattacaattatcactagagattctactagagcaacaggctcaagagaaaatctccaacaaaaaaagctatcaagcattacaagcctcagaaccatgtataactgaacatcaacaatttcttcatgtctcaatctttagattaccttctaagataaccaaaaccaaaaacccttccaattctcagccacacattcttgcagatgacagtaacctgaaagaagtagatgtcatcaaaaatttatatccaggaataactagaaaattgtgacttcgttgcttaagaaagcaaatatacaaaattacaataacaatttaaataatgtgacctttgcagtgttatcaaaacaatgtgccaaattgattcaattggtaaataatgaatagtaacattttatatacaaacagaataggcaacaaagtggtaaactcaattttggaaaaatgcaggttcaagagaagtattccattccaaatttccaatacgccaaaggaaaagttgaatttaaagttgcatatatgtatatggaaagtcacctttccatcttcttcacttcaccacctgaataaatcaggacaaatttccacctgtaaatgatatatgatcactacttcatgattgaaatacacagaacatttatggaggaatcatttatcactattataccttcagcacctggaatattgatcaaaggatcgttggctttaattaaccaatctttcgcacaaatgagagcatcaagcatttcaggtgttaacgaacttcgtgtgtcaccaagtatcctgcccctacaactgaatgctgattcggaagatacagtgctgaggggtattgctaggaaatctttggccatagctgacaataccgggaatttttgagcttgtctcttccaccagtccaaaacatcgaaactctcactatcctcctcaacatcttcttctaaatatatggcaaattctgatttcatttgccatgcagtcctccttcgagacttgtataaagcaaactcttcctcgagttttcttttcccaagaacaggtgatccaacactgttgctgccttcatgagaatgtgaaagcatgtgttcatcatttcttcttataaacccttcatatttttcataataatccttcaaccaatcttcagcagaacccactttttcgacaatctctgtcacactgttagatgttttctcataaaagaaattcaaataatctccttttcttcttggatctaacattgtggcaatgacaagtgcagagttaaacccactgtcccaatatttgacaaactttgagagcatagctgcagccaatacctttaaaatatcactagtctaccaatcagggtcattcaatgcatgacgaatttgtagcaccaagggcaagaacctatgtgctgttggtttcctatctgctgacaccgataatgtggcttcttcaaaagctttaagaaaagcacaaattgattcaactttctgtcattctagttcagtaggtgcaacttcaccatgttgatttgcatagctatccaggatagatctgtacattaatccttctacaatcattttataggtggaattccatctagtcggtgtatcaaaagaaaaactcaacttcgaaggaagatttttcgagtttgccatagaattgaaatcttgcattcttgatactgaagaatctaaatgcttcaacaactcacgtagcttgtgtattgtaggtttaattatcttcataccatcctgaaccaaaatatttaggatatgggcacaacatctaacatgcaaatgctgactctcaaacatcaatgcattcttgtgattctttatcaactcttgacatgcagaattgttattactggcattatctaaagatatagtaaacagtttgcttctaatgccccaatatgtcaagcaactcattatagcttcttcaatggcgaatcccatgtggggatacttcaattccttaaagcttataattttcttcttaatgttaaactctctatcaatatagtgtgctgtgacaaccatgtagcctatattttgaattgaagtccacatatcggatgttagacatatgtgcaaatcaagattatgtaattcagcatgcaagtcttccctcattcgctcatacaagttaaaggcatcatcacgaagtgtttgacgccccacaactttgaaagttggctgcatggactccacccactccaaaaaataaggatcctcaattttcttgaatggcacctctgcatgaatgaagaatctgaccattagctcccggcttctcttgggaacaaacacgaaatcttccccagtctgtttcttaattgttgcaaggaagttgattctagcatcaccatcaataactggacatgattcggctatgtgattaataaggtgacttgttcctgactttttggtggctgtcaatcttaagctacaatatttgcattgagtcttggggacaccatctatcattacaacctcttgctgaaagtgttcccatactttagctctcttaagtgttcttgaagattgattattatttggactattagtacctgaactctctaacatttgtatgaacgtatttattattgagtttgttcaattgtctacatagaggaagaaatctaaaatcaagatagttgaaagaacatggtctataattatttttttcacacattgtacacgtgctacaatctaaaaattacacactaaaattcgattgaccatagaattaatttgcatctcaaaatcatatcatgactcaatctgtaatgatatgttaaataatttgcattgggagatgaagggaacctgcattcactatacctccttatcttcttcttgaaatcttagaactcctgcacataaacccatcgaagattgtaatcttgagcaagttaactcctcagtaaaaccaacaaaaaaaacaaaatcttatagaaactatcacaccaatcacactgttcacatacgtcatggtacatgggcttctcagggagattggcgacgcggccggaccgccggaggaggacatcctcgccagcgcccggcggcgcacgcaccttcctcttcttctgcttcacctgcacccgcaaccaccaagatcaggaagagacccaaaaaaaaaacacaaacaaaacaaccaggatatatcaaagaccgagaaaaaccagggaaaaagaaaagcaatggtggtgggggagggaatctgaccggtgacggcttggcggcggattcgcggacggtggcggagaggtggaggaggcgaagcaaggggagggagcggcggcggcggaaggagtggagccgtggacgactgatgacgctaggtttggagagtactggactgtctagtgcatccaaagaaatccatggactgaatccaatttggatccaaaaatcagaaaccaaaaaccaatccaatccaaaccgtttccacctccaccctaaccagtccagcccattaaactcctcaatccatttccatccatccaaactacacccaaagctgaaaccaatccattgggcccatttcaatccagcccattggcaggcttatgcacaaccataaacaattaaaaattaaatggagagcaaaccaaagtagaacaaatgcttcgtgctttcaatgaaccagtgaggaagatatgtgaaggtgtgcattttttcctcgggttagtgattggacggtgaacaatctacaagagagagactacaatcgcatcgttatcaaccagagcccgactccttgggatagatggcagagcacatatacagtttgacctacaacccgagatgataacacaatagaattcgcttgacttccttagactgatggtaatagctcataggaatggaaggcatccgggatgatagtcacgcagcgcctactgcttgttctataacttgttgtatggatggcagctgttccagagcattatgggtggaacactgcatagacaaatattagaagggtgttgatgtagttagatccattgtggtctacaattggcccgagcagtgtagcgatagtaatttttccactatcgtggagcatgagaaggctactgaaccagtacaggtccaggagcattttgactacacctcaaaaactggctgttggaaagtttgatccagggccatactgttggtgtcccatcctactagttggaacagagtcggcccaatgcccaaccatgccactcatcatcatcaccttctaactaggtccttactccttagggtagccaagaggcagagatgtcattgatgtcactaagatttctttacaccattggaacaggaaaaacgaccttgacctggccattggaacaagctattgaaatacgagtgtactatttttcaagtttcgtgtaacagaggacaatcgttaaaaaaaatatctaagttaaaatgttgaaaggactgtctcagaaataatgtatcacttccatgattattctcagacctagccatcccatctcacgacaacaaaaacgatattcctggccggagccctcgtttgattgcaggacggaccataactgattgcgtcttcaaaaatcgacctctattttcacatatggctccttaacaagcacgcaaaaatcaattttcacaggcgggcctcttaaaaaggcacatatgtgaaactatattttagcatgcgggcctcttaagcaacccacctgcaagtctaatactattcctctttccctctcaccttattaaaaatttgttaacttatctctttgtcgcatctctctcccttatctttttcttactacctctcctctcatcctcactttgactgcgggggccatggtggctgtgtgatagcgggtggcgacgacgatgacgatggcgacgcgctcggggagcagcggcaacgagcgggagctgcgggctagggagaggccggtcccggccgtgagctgcgtggcggcaagggtcgggagaagcggcggcggccagccacgggggcagcggtcttcggagctgctaggagcaacgacgggctcgcgtggaaggcggcgagggggaacggcagccagcccccgccaggatccggcagcagcaaccatacccaccccggccggtccggcgttggtggctgggcaggctcggcggcaagttggcacggaggccggtgggtggtcttccttttttgtgatttctagtttttccggatttttagttttgcgtgtggaccacataagcaccacacaagcgaaaatccgattttcgcgtgcaggtgcgccgcccacatataaaaatagcgattttcgcagatcatttagtgtgtgagggctatcctaccacacgagaaaacctcttttgggccatctgcaaaattcacttttgtagtagtgtctctccgcttggaataaccccgtttcacctaacattactgatctaattagtccctccgtttcagaatataataagttttggcattcaaaatttcttagcccaatgttacaacctaatacaacttttatcaccaacctaccgattctactcgtcatcattgttttcagcaaaaaaaaaaaaaagtactaggtcccacctccaacctgggggcccaccccaggaacgcacgttcccatccacccacggtaaagagccctccatcggcatccaccacgaagttgtcgtctccactttgatggcagcaaacaaactaccagtactgagttagtacaggaataatcataaaggtagtatggtctttttctactttccttaatactctcgttcatatggtccttgaacttagtacaggaacttagtacattctggtacagagaaagtactctcgttcatatggtccttgaaagtccagtattctctctggtttcatatttctaggcgttttggataaatgtatcgtcaaacttttataacttttactgtcaatacctttaaaaatatttactttaaagatactaaaaccacgtgaatagatttgtcttacaaagtagtacaataaaagtaaaaaatgtatttatttattatatatattataattgaaattaatagttggagacatatttttgagatcatatctttgtaaaaaatgttaataattatggaaccggagtgagtagatcttttgtataccatttattgccgacttaatttgacactagcatgcagcactcttctcccagactaacgggaataagaagggcacatatatagcacatgttttgttctcaagaaggagaacaaaccttgtacaaaatagcaaattaaatgaggcaagctgaacaagtcagttatacatgacatatatatatatatattgcaggttttattattgtaccctgtaacgtttatgggaaacaggaggaatcaagagtttgagctgttcattgtacatatatactgtttagttcgtcacctccagttttgcctacaatttgaccatttgagtattactcagaaagatagagccgacacccggcattgtaaaggatttagagactcactatggtgctctctaataggagtataaaacaatctgaaccattgatctcatttgatcgatgggtttgtatctatttataccaccaccttagttagtgatagtagaaacatgaagggtcattattgtcaaaataaaagcgttgaggggtataatcgtcatttagcaatttactagactttttttctttttttttgacatttcgatgaaatacgatctatactagcgcaatagatgatcatagatggatttagctaggaaaaacataaatgacaaaataactccaaatcatcatagttgtaaattactaatttgcctctaataatgctggtaatataataccagtagagagcaccgaagcatccctcaaggatttaggggtaggggtggggttgggggatcaggctcctctaccttcaaagacatgtgcctttgtcactaatatgtgggtccaataaaccatgggcccacctgccagtgacaaagacatggtgtgcctttaaaggtagaggatcttaattcagggtggggagcccggagtatcaatgcctaagtttacaaatgttggtctactggtctataaatacgaggcaacacaaatacagcagagcacgcagcaagacagcacgagccactgcacaatttagctttagaaagtgaaagctacaagcaagtataagcaaggccactgcaatgtgagatggttgcacaatgacacgagggaaattgcttcagcctcagtatatatgcaatattatccaatatatatgcagactagcacttgcctagcttctcggaatggaaggcattaggaacaggagatgcagcatgcgtgtctttacgctgtggatatcaaacataggcagctcagcacggtggcacacaagtgtgtcatggtactgctgaccatggagcacaaaaccgagaacttcgaacatggtaatcagtcgaccatcaagacatctgtgtactgattcatgctaatgacaatattgccggatgatatgctcctgtttgctgttcctgaccatgacgtccagacgtgagaaaacagttgcatgtaaggattgatataatcatcttatttccatcatctccagtaccatgcaacaactcagttgttgtaaattattcaagtagtaatacacactactacaatagacatttttccgtgcggtcagaaacaggttttcgcgtgcagttagccctaccgcaagcgccgaagggtctacaacaatcgccatgcatgcgggtgcgccacccgcacgtgaaaaatatgggtgcttatgttacccgcacgtaaacataaaaaatcaaaaaaaaaataaattcgaacgaatccaaaaccctaaccctaaccctagaagttgctgccaccgtcgtcgcccgcctcctctgccaaaccggccataaccgccaccggatccgagcaggggacagccaccgccgctgctacatccgggcagggggcagccgcctccgccggatatgggtggggggcggtcgctgtccccctcgtcgccttccacacgcggccgactccgcgcgcacgccagccgcctccgtccgccaagacgcccgctgccgctcccgaccgctttcctcgaaccctacgcagccgctcccgagcccgttgctcgccgccccggccgccgctgcttctcccgatcccgccggcgccattaccgcgcagccgttgccgtcgccgttgcactaccgtgaggataagagagcggataagtgagaatgagaggaggagaggataagcggtcagttatggtttactgtaacctaacgagggtctcgtacatgtgctatctgtgtaacagcccaatatgcagaagtcgagagtgttagtatcctctccataacagaatataagaagttttgaggttggacacgattattaacaaattgagtagagaattaaatgtagggaggttgtaattggttgataggtgaaggtaggtggggaaattgcatggtgcagagttaaaattagttgagaaaagaatgttggtggagaagttggtatattctgaggtaaattctgagtattagaagttgttatgttttgaaatggaggacttgtaaataacaaaccaggctgttcctaaacacctaaaccgttgcatagagtgataaacaacacttttaatacatcagttattgaagtttttgaaacccatctcctgcatccacttgcatgttaaaactcttgatagctgatacactactaaaaaatcgattttcgcagtcgaaaccccctccaaactctagacaggcataattacatccgcatgaaaaagtatttggatggggttcggttaaggtcacctgtgtggagattatggataccccatacctacacggcatgtatagtccgactgggtatggggtgccatgtatagatagaatatctttaagaggactcggattaaaatctaaacttgtatgtcaaggaaatatccgagatcctagtcggttacgattgtattttatctgtaactacatattccgttagggatatggactatattttgtaatacgaaccccttcccatatataaggaggcgtctgggtgcctctaggagcacgactttctcccagatcatatgatcaataatacactcggcagatcaatccccggacaggagtagggtattacttcttaattaagaaggcctgaacctgtataaaattccttgtctctaaactcatccacttttcctgcttgatagccaccccttttaatattgccgaaatcttgtttcaacagttggcgcgccaggtaggggtagcgtcaagttcttcgccgactagtgcgatgggtttcgtttccggcatcgatgacttcgtcttccctcccgggcaggtgtttcgtttcggcagcctcgacttcatcatcaatgacttcggcaagatttctctcctcgactcggattcgaaccagtcaggaagagagcagatctccgctctgttcggtatcctgaactcggccgaggtctaccccaagatcatctctgccgagttggcttcaaaccactcggatgagatccaatctacttcaacacgacccaaacaagacgatggggcctatccgccaatcctgatgaaactccccgatgatttggctgctgtcttcaccacaaggccgtcttctccccgtaggcctaggccagatccggcttcagccccggtccggcctagctctacggaagtcggcgtcatactccagacactcgtcacggtttcgacggaacaactggacggctacctcagctcccccggggtcgactcgcggccaacagagatcgtggagtacgatgacttcggctaccgctacgactaccgcaacctcgacgacttcgacgaaggctttgaagacaactacacgcctctctacttcggcatcttcagggctgacaatgagacagaagaacagcgcaaagcctgagaagcagaagagctacgcatacaacaagaagccgaacgatgccgactggaagaggagcgccaagtacaagagcgagaacggatgcagcatgagcaacaggaacgcgaacgggccgcaaaggaggctgaggaccggcgacaacaggccttggacgccgggcgacgagcacgagagttcatcgggcagcaagacgtcgacggaactgcggtttttcgcacccctcaacagaacgcggttgcagcgatcaccctcctcgacaccctcctcaaggaagacacactcaatcaagttaatcacgttgtcaacatcttgaaccagaccaagaccatgatcgccgcctcggtcccggttaactctgcaagcgtccgcatgccgactggcagccgagttccccatcttcgatctcaagactatcaccaaccgagcctcagcgtcgccggcgcgggatcctgtcgcaggaacaggggtcacgacgagcgatctgtgcattcgcctcccgaacgacacagggagcaccgagttgaacggccatgctccccacctcgtaggcgccccgtcgatctttgtgatacaatcaaccagcgtcgcgcggcacgaggctacgctccccaccattcaccagattgccacgaagacgacgtggatgaagtcgcttcctttacaagcgacctgcgtcgagtggattggccagctggcttcaagccgactggaatcgagaagtatgacgacaccactaacccggagtcttagctcaccgtctacggtctcgcaattcacacagcaggaggagatagcaaagccatggcaaactatttgcctgtggccctagcggattctacccggtcctggcttcatgggttaccccgcggcacaatcggatcatgggcgaaacttcgcgaccacttcatcgccaacttccagggtacctttgaacgccctggtacatattttgatctctacaacgtcattcagaagtctggagaatcccttcgagattacatctgaccattttccgagcaacgcaacaagatctccgacattaccgacgatgtcctcatcgtcgccttcactaagggaattcgtcacgaagacctagtcggcaagttcgggcggaagcctcccaagacggtcaagcagatgtttgaaaaagccaatgagtatgccaaagctgaagatgccattatcgcgtccaagcagtcgggcaccacttggaagccaaagaaagatacgccgactacaggaggaagtggaagtaccaatcacaaggatcgcaagtgtaagcccaaggaacttgtggcaactacaacaccatcctcccgacaacgttcgcgcgtcaacacttttgacaagatcatgaattcccaatgtccgcatcatcccaattctaatcacgcggcgaaagattgcttcgtctacaaacagtttgcagaacaatacgccaagaacgcacgtaaggcctctgatggagatcaaagcacgtaaaagaagaaggatgatgacgatcatgccccgactggttttcaagaccatcgcaaggaactcagccacatctttggtggacccctggcttatgaatctaagaaagcaaaagctgagcgaacgagagctcaacgctgttcagcccgatacgccccaatttcttcggtggtcggagacgacaattaagtttgaccgctcggatcatcctgaccgagtggtccacccggggcggtacccctaggtactagacccagtggttcgcaacgtcaagcttcgtagatccctcatcgatagtggcagtgcactcaacatccttttcgccaaaaccctagacgacatgcagatccctcgcgcggaattaaggccgagtaatgcgccctttcacggagtcatcccagggctatctgccacaccactcggccagatcactcttccgattacttttggtactcgggagaacttccgcatagaaaacgtttgcttcgaagttgctgatttcgagacagcgtatcatgccatactcggatgcccgacgttagccaagtttatggttgtcccacactatacctacatgatgatgaagatgtctggtcctcgaggagtcatatccctgcggagtgacatcaagcaagccgtcacatacgacaaggaaagctgcgagatggcccagacccgcgagatcacgctcgcccaagaagaaatccgactagctgcgtccacagcaagcgaaggagaagtgcttgcaaccaagatgccaaagagcgaagaaagcgacgccaagaccaagaaaattcctctagatccttctgatcctactaagactgctgtaataggcgctgagttagattgtaaataggaaagcacgctcatcacctttcttcaaaataataaagatatctttgcgtggaaaccatctgatatgcctggtattcctagagaggtgattgaacactttttacatgttaaggaagacactaaaccaatcaagcaacgactccgccgtttcgcacaggataggaaggacgcgatcaaggaggaattgaccaagctgttagcagcaggcttcatcaaggaagtccttcatcccgattggctggctaacccagtcctggttcggaagaagacgggacaatggcgcatgtgtgttgattacaccgacctcaacaagtcttgccccaaagatccctttgggttgcctcgcattgaccaggtagttgactcaacggccagctacgaactactcagttttttggattgctacttagaatatcatctgatccgactaaaggaatccgactgcttaaagacttcattcatcacgcctttcggggcctactgctacatcaccatgccctttggattaaagaacgcaggagcaacttatcaacgcatgatccagagatgtttttcaacccagatcggccgcaacgttgaagcttacgtggatgacgtagtcgtcaagaccaagcagaaggatgatttgatcacgaatctagaagaaacctttgcgagcatctgcactttcaggatgaaactaaaccctgaaaagtgcatcttcggagtatcgtcagggaagctgcttggatttatggtgtcccatagaggcatacaagccaacctagagaaaatcaatgctatcctcaacatgaaactgccaagctcccagaaagatgttcaaaagctgactggttgcatggcggcgcccagccggtttgtttcacgactcggtgagcgggggatgccctttttcaagctgttgaagaaaacagacaatttccagtggggacccgaagcacaaaaggcctttgaagacttcaaaaaacttctcactactccacaagagcttcaccacatccgcaagagcctctgttgttatatgtgccggcgacttcccaggttgtaagcacagtcctagttgttgagcgtgaagaagaaggccatgttgaaaaagtccaacgaccaatctatttcgttagcgaggttttggctgattccaagacaagatatcctcaggttcaaaagctattatatggtgttttaattaccgtcaggaaactatctcactacttctaaggtcactcggtcacggtggtcacatagtttccactcggggacatacttcataatcgtgaagcaaatgggcagatcgcaaagtaggccttagaaaatatgtccttggatatatccttcaagctgcgaacttcgatcaagtcccaagctttagccgactttgtcgtcgagtggactgagtgccaagaagacatgcccgaggagaagatggagtattggaccatgcattttgatgggtcgaagaggctttcaggcaatggagccagggttgttttaatttctccgactggagaaagattgagctatgtattatggatacgtttttctgcgtcccataacgtggcggaatatgaggtgctgcttcatggattaaggatcgcgatctccttgggaattcggcgtctgatagttcgtggagattctcagttggttgttaatcaagtcatgaaagagtggtcctgcctcgatgataacatgaccgcctaccgacaggaggtacgcaagttggaagacagattcgatggacttgaactcacccatgttcttcggcacaataacgaggtagccgacagactggctaatttcggttcaaagcgagaagcagccccttctgacatattcgttgagcatctctatgagccaaccataccaaggaaagaaataattcaggctatgaacactcaagacgtaagcatgattgaagccgactggagagagcccctcataagatttttgaccaaacaagaacttcctcaagataaagatgaagccgagcggatctccaggcacagcaggctctatgtcatccatgagactgaactgtacaagaaaagtccatcgggaatcctgcaacgctgtgtgtctttagaggaggggaggcaattgctaaaggtctcaggggctactgtggagattatggatacattcaggcatctgtggtaatcacactgctgcacgaaccattattggcaaggcttatcggcagggttttttctggcctatagctgtgaccgacgccgacaaaattgtgcgaacatgtgaaggttgtcaatttttcgcccgacaaactcatctgccagctcaggagttgcaaaccatcctgttgtcttggccgttcgcggtttgggggctcgacatggtcggcccgtttaagaaggttgtcggtggttatactcatctctttgtagccgttgacaaattttccaagtggatcgaagccaaaccagtcattacaatcaaggcagacaaggctagagattttttcatcaacattgtgcaccggtttggggtacctaatcagatcatcaatgataacggaactcaattcaccggcggaatatttaaagacttttgtgaagacttcggcattaaaatttgttatgcctccgtagcgcaccccatgagcaatggacaagttgaacgtgccaatggtatggtactctaaggaataaaagcacgagttttcgaccggctgcatccctatgccggcaagtgggtagaatagctaccgtctgtactcttgtccctgcgcaccactcccagtcgggctacgggccagtcgccgtttttcctggtctatggagcggaagcaatgttgccaagtgaggtggaatttgaatctctacgatttcgtaacttcagcgaggagcgctacggagaagaccgagtagatgacctcaaccgactggaagatgcccgtgaagcagccttaattcagtcggctcggtatttgcaagggatgagccgttatcacaatcgcaatgttcgatcacgagcctttttagtcggcgacctggttctgagaagaattcagactacacgggatcgccacaagttatctcccttatgggaaggaccattcataatttctgaagtcactcggccaggttcttaccgactcaagcgtgaagacggtactcctatcgacaactcttggaatatcgaacatcttcgtcgattttatggttaggcattacttttatatttccctctttgactgccaacatcaagttattccttgagttaccaatcgggggctactataataataatggagtgtgatttttatcaattcaatttgcttacttgatttatcattgccttgcttgattttttggcttagtcaacgaggactgaaagttttttaataacttttgcaggttttaggctcaataaggtttgaaaaaagctattaagaaatcaggagctaagtttgaaatatcaggcacagcataaattcatcagtactgtacaaattgtgcctccatcatcatcatcatcatcatcataatcattgttatcaatcagtatcagttttttcatcatcggaattatcagatccagtcggccgaaggtcgttatcctggaatctctcaactgtatcaatggctatcttatcggcggctttctacgcatcgttgatgaggtcaagggcggcctcttcgctcgtcccgtctacaaagccatcaatggcgtcaatgtcaatcttcgggtataaagacttggtcattgccaatgccaggcttgctcccatacttccagcttccttgatattcttaaagtatgtatccggagcaattctcagctagtcgaagatttcggaagcatcaaatgttctcggaccattgttattgaagaacatggcttggacgagtggggtagcagcgttggcgacttcatccctagcccttcaagcctcttgattttattgaccaagacatcaaattgagccttagatttaatcttgcaatctacacaaatagatttacattaacgagtgggcataaagaaaggaatgatttttgcaatatgggttacccgtaccttcaacatcttttagagccgaatccctttgtcttgccaattcggtcttgtcattctccagagcttggatccacttttccagctcggatatcttggcagcttgcactgcattgcttcttgttggttgatatcacatgcatggcagcataagtaagttagacggagattgtattaccttttgacgaaccgctcagttcgaagttggagtcttgaagctcggcgatccgatccctcagatcatgctcagttttccttgcaagctccttagcttcgtgcagctggtttctggtggcctcaagggttccaagatggggaactaacctctcaagagtcgcagtcttcgcctcgttcctgaaatggattctctgcaatgcgaatttatcggcatttgagcaaagtggcaaacaa

SEQ ID NO: 20532 - DNA, 9300 bp, Oryza sativa
aattccctgaggttgcatgtcatcatcccaccacttgactagaatgggtgggcgagaatcctcagctgattgtatccgaagaacctcttcctcatcaccggtcatcggaccttacatggttatggataatgagtgaggtagttgaagaaagtttgttggatcaagatgggtttggaggatgtttttacctgtgataatttccggtcgggaacaagtacgtccttgtactttaacaggagagctggaccctggatcggcactggcatcctttttaggagggctggcggcttgagcttctacttcaggaatatccttatttggttctgtacccgactggtttctagtcgggggcttctgatcagcattggctccagcttcggcaagttattgatttctacattgtcggttgccggctagttgtcactcgggcgattttctacagtcggcccggttccttttgaagaatccgtctccacatttgtcaattcagcgtcctttcctacgagtttgagttatgctatcaacgctatttcaatagtgggtgagtagcaatacaaagaagatggccatatgatttgtacctggaagattttctgatttttggcataggacgactggaagttttcttcttcggattagtttgccttggtagttttccagtcgcttctttgttgctagtcttctcagcatcgtcgccctcatcatcactcagaaccaatttcctcttacgagagtctgactggctagttgatttcgaggtgtttggttgagtatcagaccgaatttttggtcctccactcgcctgaccagcttgccggcggggtgatcggcgttaagcggttggaggatccgacttcatcaaagcaaattcctgggcatgatatttcaaactttcaattagcttaacagaagataaaggcatacttttgagaaaggatgaaatgtttgaatacataccggtggaggaggattgaaggcgttatatggcaccactggcagcaaatgcgaataactgaccacgatagcgtttgagaagattttgtacattctctcctttatgaccttaaaatcaagagggtatggatcttcacggtttgggtcatgcttgccgtcaaattcaaaggctgtacgggatctctctttaattagagctagccggctcttgataaaatgccgggtgatctgttctccttgcagaccttgctctttcagcttcagcatgcgatccatcaggacaagtgcctgggctgcttcctctcccattggaagtgagttccaagtgtcgtgataaaccggagaagacaggagtattcggggagcgcaggctcggggttttgtagatagaaccaatttgcatgccagcctttgtttgaggttttgaagggcatggaaaaatacttttggccatggaaaaacacttgctcacgacagtttagcctaatgctgttaaaatcctttttgacgcagttagataattctttggaattactacgatgcaaataaaaaggtgcccaacagaaaagtgttatactagttttgtaagtctttttaggctgcaaaagctgttcgggttttattgagatgactggtttttgaatagttattctctcggcatgttatatgcttattttgattatggcgtgagttatagtctaggctatttagactcgtcaattttcatgatatcacatttataccacatttgatggatctttttgagtttttactcggatttttgtcttatgtgttgatctatggaccgttagagtattttctactcgggcctctttatatcttcatttttggtatattacggctaaagcagttggatggatgttattgacaccttgactatatgtttagtttttaactaataacatagtcgggggctacacctaattaggtgcatcttgtcgatgcacccgattttttctattttcagcccttcacagtctttaattttggtactcgggagatcaatacagaagaaattgaagcactcggattatcattttacgttctgagagaaggttatctcgtcgactttaaaggtttcaggggctactgtggagattatggataccccatacctacacggcatgtatagtccaactgggtatggggtgccatgtatagatagaatatcttaaagaggacttgggttaaaatctaaacttgtatgtcaaggaaatatctgagatcctagtcggttacgattgtattttatctgtaactacatattccattagggatatagactgtattttgtaatacggaccacttccgctatacaaggaggggtctgggtgcctctaggggcacgattttctcccagatcatacgatcaataatacactcggcggacaatctccgaacaggagtagggtattacttcttaatttagaaggcctgaacctgtataaaaattccttgtctctaaacccatccacttttccagcttgatagccatcccttttagtattgccgaaatcttgtttcgacaacctgccaaaatgattttttgtcagtggagcgtaacggccgtccacccttcattattttccccccaaaaccgtgtgcccacacttccacaactcaccatttcaatcacactccctcctttctctctctgccactcatcactccgccaacatgctctctcccacggtcccctcaatacccccaccctactctctccccccatccccgtgccccatatcttccccaccctctactctctcccacactctctctatgtggcggtgcggcggtgtcaatggcctcagacggcaatggcaaccgtatcagcggcggatccacagccgaagagcttaggaagggcggatccgcctccagtggccttgggagcggtggatccacccttgcacgccatagagagaggaggtggaaaggtggtgcggcaatcacggcaatggtggcggctggctcataggctacggtggcggcacccaacaactgcgtgcgacctagggtattagacttattctatttttttctaaaaaaaatgttgcaagcggcttccttaggatgcctgtctacaaaaatggtttttcacatgcagttgtgatgcccccactcaaaaaataccaatttttgcagacatctggctctagacgtgtgctcctcctgcctgcggaaacaggttggccgcatgcaaagatcattttcgtagtagtgatattacatttcgttcaaataggacttcaaaatctactatgtcttccgtttaccattatttatacccggtttcattcaccattccgcaacgagcaacaatggaacgtacgctcttgcatataccttcttggaatggtaggcatgtgtgacttgagatgcactctggaggtctctggtctcgagccatcacccagtgtgggcagctcctgcatctggagattgagacgttggaacttcatgatctgtccagtatcaatctgtcattaccataagaacctaaccacgggatattctaatactctaataaggatagctcggactgctgctgacctggtgctgtagacctgcctcgaattgcagaaaaactggtttacattgaacatgggtgcaaggattaaattataaagtttgcattatctcggccaactccaatacgatgttaaaaaaagtttgttcatcattaatgattggacagtatatatattatctttgcaatgacgaaatattgagcaatcacgtgacaaagttgtcaaatgaatagttttatttttgtcatcttagaaacaagtactgattgtatagagtagtagtatttagttgaagagcgttgctatggtccggcagaaagtaccgctcggtactggtaccgcacggtaccagagcgaattcaatcggtgggcaagatgggaaatgtgttgcgcgcgtggttggaggacgaaaatcgagcggcgccgcaagggtttatcctctccgttccttccccgcagctcatcctcatctcgtctctttcgaattgccttgcatggcgccagcgtcctctccgtcttcgcatcgccttgcacggcgccggcgtctctctatcttcgttgcgccgcgccacggcaccgtcgtctctcccttcgccgtgccaccggcgtcgccctggacttcgccggagaagctccgccaagcacaccgcccttggctttgccggacaacctgcgccaagaacaaaacgaatcgctgctgcaacgctcggcttcagatcggatcagaaagagagccctaggatttctcctgcctcaaaccgaatcgatctctcatgatatgcgaagttacgcatttgcccttccacgtctccaccaactcgtggtacggctcacaatcaaccacggtacctcgcggtaccctcatttacagaccattcgatcctctcgaatggacggcccagatttcgtaccacaaggtaccgtgcctccctgcaggaccgtaaaaaagctcttagttgaaagtttctaatttgtgagaacagggaacgttaatgaaatatcgaaattaacaagttcagtggcacatttcattatttctagttatgaatctcctgaaagcgctttcccatatctccttgtggcatatcctccttagagcaaatactgctagctcttatccaagagtcctttgtacatgctcaagagaaatacattaaattgataagcgaaaaaaagtagagatgacattataactaatccactatacatgtttattgtgctaatcctatatatttataaagtttgtctctactaaatgtaattaatgttaattttcttttctctcgtgaagccacaccatctcaattatttttagcctttgcattattcatcaagggtacaaattatatcttttatccctcaaaagctacactatacaactaatcatttgaataatgatcaagttactaaatatataagcatataaagaaaaatcgtatagtacgatataaaactttacaactcatatctgttattttgtcacatacttctgcagcgatccacgcggtactcttctagtattagatgagcttatagccgatagttagctcaactattaaacttgcgcatataacatgacagtgcttctagtatagatgtattattatgaaaatatttaaagcagagcccacatggacgttaaagtctttaatagctgacattatatttcattcacatagtcctcgaaaatctggtttacttttcttgtgtcatttatggccgatcgattttatttaccattttaatttcatgccagttttacatttaagccgtccagattcagcagcttgattgcagattacaaagccacagcggatgcaccattacacaatctactagcttttaaatgtggaggccagctgaaggaaccggataaattaatttgcacaacaagttttactcctatccggcaacagctactggcttaagatcgagtaagctagaagtgcaaggtgcagagcaaaaaaactgaaacatccattttacacttgcacgtctgtctagcttctgggaatggaaggcatgatggatttgggatgcactacgcaaagagtccaatctccagccttcatccatggacacctcgtccattgattcctggacttcctcctctactcgcacgctgagaattcagaacatggctgatagtgatcagtccactgtcggcgcactggtgtgcgtatcaccggaagctggcctgaggattccacacaaaatgtggtgattcctcttcatgctcgttatgatggcctccttcggacaggctgcggtcaggttgatctggagaaatagcatgcgcgcgacactgctctctcagactactaactggatgaaggatgcatggcacatacgatacacgtctcattgccgagcagcagaactaaccttgagattacaagaaaggaagtgaggcaagctgaacaagccagttttaaatggcgtataatacagtgcttctaggtaccttagaatagttatgaggaacatgagacatctaggtaccttagaacacccttgtcgtgaacaaactaaaggatttgggggcaggagcagcttgcagcacgtgtgccacagtttagaatcaacatggttggcgattgacagcagcgctctgtcaggcttcactaaaaattgtggaaaagtaaataaagtgtattaatcttcaaaattacggatccccttggggtctacttatagtttttacagtgcaagtttatacagccctatgtctcccatgtattaggcaatttacatgaccgcgcttacgatagagacgtttacaagggtaattatagacaatcaacccatctaaccaccgtcaggtctctatagatcggtccagctaggcatcgacttgcttcgcctaatggcagaggttcttcgctgcgccccctcagcggggagtctgagcttcgccctcagcttgatgctttgcttcttcggtgcttcgcctcaaggctgggtaagctgtttcggcggggttggccgaaggccctcttgacatgcctccaagaaaaatcatgacggaagatcacacatccatgttgctttcctggtaggaaacgttggcgaagttgacgggaatggtagacctgtgtgagcttcatagatcatccatggtacactcgcacctacctatatttgattctcatactgccacatatacaggcttgcaacgaaaatgtggtaagcagagaacaaggtcgagctatcccgctggcatagaacattttttttgaagggatgaattcttagcactggatattcttcatgtacttgacatgcaaattagtcaaggtatcatgattcttttgccaaactcatctttaaaacctgatttctgatggttcagctgagaaaagttaaggagaacaaaatgtgcctgcaactattatatatcagtgtgctagaaattgaggaacaactacatcggtcggtgtgttcatcttctagtttccttctaagttgggctgtcgcagtgtaatacattttttttaatacatgcccctgtataatctaagtacttctaatacaacatcaatatttgaactatttgaatagcttctacttcagactcaacatgtttgttgaagtccttcagagctgacaatgtttttcattcatatagttctcgaaaatcaaatagatttttttttgctggttgcctattttactatcattgtaattctttgatagctgaccatacatttcttttgctgaatatgtagcacccacctatttgattctgagcagatcaaactccgctttgcagagcacacagccacacaaaccatcattcgttatgcaattttaggtggttgtgtacaactactttggatgtagaggctgagttttaatccactttctaaaaaataaaagcaatttagcatttaaaaggcggagcccaggagcaagtgcaactacatacctgttgttatatatgtggaaggctctacacttgcagataagagtaagctatgaatacacggcacagacaaaggaatctgcagttctttagtcagagtcatgagatggatgcacgacaataggaggccacaacaaagcactgtacatccagttcatatggatgcctagcttatcggaatggaaggcacgagggatttgagatgcactacacaagactccagtctccggccttcttccataagcagcacgcacctggcatgaagaactgagtcatggtcgtccccctcaacggtgatatcaagagcccatcctctcaataattctatcactattaagccactaagtagactagcagtccattaaggctgacatagcatgcattcgccataccatgcttcctttctttttcgtttttaatgattttctgagttaatgtttcctagcctcgcagagggagaaccatctcttagggtaatcccatcccatagtgtccgtaggtagtgtctagagaagaaagagggcaataaatatccatttaggcataatcttctccaatgtatagtgcccatggctgtgtttgtggagaaaacaaattaaatgcctttattatgcatgtgcaaggatcagctacggcaaaaatcctaaagatcagatatggaaaaggggtggacgacacaaaggtcaagatatctagaaaaatatctagggtaagaaacaactaatcacctccaacgctactttggctagtattcagggccttgatgcacacgccgatctagtttcctgcatgtgacattgtttcatcttttttcttgctctccgttctttaattaccatgccacatatgcatccgaattttgatcgggtggcatcccgataaattctatacacaccagcttacgtggtgggttgggactgccattaatggtacatttgaatctgctctttaaactgctttgtaatctttcttgcctagaacaagttctggtcaataagtggaaggcaaccatttgggtctatcagactgcagcaacagttttgcaatttagctcaaaaagtagagtcaaattcttcagggtgcagacttgttatttgcatgaatggctgtagtcgctaaccttagagtgtgtaatgtacataataagcaaaacgatcgcaatacacccgatgcatgtgtggagattataggcactaggtatctacatgatcaatatatctggctgctattaggagatggaccatgactgtgatatttgtaattgtacacattttaattgctagagtttccttgcctgtttggacatgaccctaggttctaactaggttatcttttgtaatactaaagaaagtttatgccgagttcggtcgggtttcctacttgtacccttaccttcttttttttagataatgatgtacccttacctcctaacctatataagggtggggagcccttgaagagtatatagcgaaacgcaccgagatcgtcaaatcaatacaataccaagcgaatataatcactaaacatgaatagggtattatctctcattgagagggtctaaatatgtctaaacctttgtctttgtatccatccggttttacaactcgtacactaccctttttattattgcccgtataaaacatcaataacatgattgcaccacaacgtcggtgaactccttcatccccccatcatataagatagtgtgcatatactgcttcatgccaagctcgttggaatgggaggcatgtgggacttgcgatccactatgcaactcttcgtgatccatccatcgtcctcatttggctctgttcgtgcgtgaaggactggagacaatccccgatgctgcacagtgcacacggagaatgg

SEQ ID NO: 20533 - DNA, 19679 bp, Oryza sativa
ttcctgcagcccttcaatgtatagtgtccatagctgtgtctacagatgaaacaaattaaatatctttactgtgtatatgcaaggatcagctatagcaaaaatcctaaagatcagatatggcataggggaggacgacacaaagaatcaggatatctagaaaaatatcgagggtaagaaacaactaatcacccccaatgctgctttggttagtattcagggccttgatgcacacaccgatctagtttcgtgcatgtgatattgtttcctcttttttcttgctctcccttctttaattaccatgccacatccaaattttgatcaagtggcatcataagaaattctatacacatcagcttacgtggtgggttgtgactgccgttaatggtatatttgaatctgctctttaaactgctttgtaatctttcttccctagagcaagtgctggtcaataagtggcaggcaactcatttgggtgtatcataatgcaggaacagttttgcaatttagctcaaaagtagagtcaacttcttcagggttcagacttgttctttgcatgaatggctgtactcgctaaccttagagtgagtacattacatattaagcggaataattaattatttgtcactcttagagtggtgataaaagatttgccactgaatccacatatcatagacagaagagagtccacgtgtcatagacagtgagtggtaaataaacaattaccacatcttaaaagtggtaaaatttaaatgtcccataataagcaaaacgaccgcaatacacccgatgcatgtgtggagattatagacaccagatgtctacaaggtcaatatatatgactgctattagaagatggaccatggctgtggtatttgtatttatatacattttagttgctagagtttccttgccggttaggatatgaccctaggttctaaccaggtaatattttgtaatactaaagaaagtttatgccgagttcggtcgggttttctacttgtacccttagcttctttttttagataatgatgtacccttacctcctaacctatataagggtggggagcccttcaagaggatatagtgaaacacaccaagattgtcatatcaatacaacaccaagcaaatataatcactaaacagaagtagggtattatcgctactgagagggtctgaatatgtctaaagctttgtctttgtatccatccggttttacaccttgtgcactacccattttgttattgccggtataaaacatcgcgataacttgattgcaccacaacatcggtgaactgcttcattccccttcacataagacagtgtgcatatactgctacatgccaagctcgttggaatgggaggcatgtgggacatgcgatccactatgcaactctacgggatccatccatcgtccttgtttggctctgttcgttagtgaaggactggagacaatccccgacgctgcactcggagagtggaaacttggaacctggtggtgtgtgcgccctttgggtaccttcgaaacaccataagttagccaaggaaatgcacctgataaatccctctcgcatgcaggtcattgttgacagacccagggacgaccaaggggagaaccagatatgttgatgtgctcagcccatttcaaccagcttcagtgacaagctaaaattctcttaacattagtaaatgacaatatttttccagacaaatataaatatgccattatgatgttttcaaacttataataaacaacatggcagcgcacacagcgagacaactcagaccattgtgtaatttggctttaataagtggaggacccaagcaactgaaatacggagtaaatggcatcccctaaaaaaaactgaaataaaatttagacattgttgtttaggtggatagctctgctcagtatgcgaggagtgcacggagcagagagtaatcagtaagcaaggattataaagagcagagtaagcaacacgactgcaatgttagatgattgacaacataacatgcctagctgttcggaatgggaggtatgacgaacttcaggatttgagaaagttcgcaagtttgtagcatccagccttcacctatgggcagtttgaccaagttgtgaagaacagagtcgatcatggcccgtgtttagttctttggctaaattttttttacgtatacggacacacatttgaagtattaaatagactaataacaaaacaaattacagatttcgtctgtaaattgtgagacgaaactattaaacctaattaatccgtcattagcaaatatttactgtagcaccacatttgtcaaatcattgcgtaattaggctcaaaagatttgtctcgtaattgacatgcaaactctgtaattggtttttttttcgtccacatttaatgctacatacatatatccaaacatttgatgtgatggaattttcggaagtttgaagctaactaaacatggccatgatacccctcctggaggttaaactgaaaaatctcggaggtagtgagtccattctgtctgtgtcagcatagcagtacaagctggctgcaacataacagggtcaagttatttcgcccaagtccaatgacacgacgaaatcccctgtctaatgtttgtagtatttgtattaatattgagcaatcacgagggtaagcagaaaatgcggagtaactagcttggttggttgcaatccactggatagtgtgatgaacacactgatgtaaggcactaatccgaagttaccattttatttaaagaaaaattttaccatccaacattgataccttgaggtagtataaatttttggtaactcgagatactttttagtatacctcgaggtatcaatgtttgttgttaaaattgctcttatttaaaagtagttaatgtactccctccttacctaaatgtttgacgccgttgacttttttaaacatgtttgaccgttgtcttattcaaaaacttttgtgaaatgtgtaaagtatatctatacataaaagtatatttaacaatgaatcaaatgataggaaaagaattaataattacttaaattttttgaataagacgaacggtcaaacatttttaaaaaagtcaacggcgataaatattttgggatggaagcagtattaaagttactaggggtgcaagttacagagcaagcgagaaaactgcagatctctgcaacccaaagttgtgagacgattgcactaagacaggaggtaaattacttgaggctgcatacatccaacttatacaaattcacttgtctatctacttggaatggaaggcatcaaggatttcaactccaccagattagtctctccaagctgcacacttcacccaaagagtgggttgtcccggcagtggagaactgagtcatagacatcctcctgaaccatgttggctagaacttggactgtgtgatcagtccaacctctaagtatctccctacctgtaggaaggcatggatgaagtcggagggtaggaaagttaactaggagaaaacctgcatcagagtatggcaaaaaatttgtttgcattaaatttgtttgcaaggaatgatacattcagctttactgcgacaaactgcaagtgttttaagtaccacgtcagaaactgcttgaccgttgttattaaacataggaacagaacatgcagtattattcgtgcaacattcttcttgtttcgcataacaaatgacagtagttcaaaaagaataagaaaagtgattttttacggtccagcgctcggtaccaaaaattgaaccattgaatccaggatgggtaggatcgggacagaaaatgagcaagggtgaatgtgctcgtaaatcccggcactgcaggcagcggcatcatcgatccatgcggcggtgacattgaagtgttcaatcccagtggtgaggactcgtcgattccagcaatctaggcaaccgccgattgaagacgtcattcccggtggtggcggagttgaagtccaggcgttgaagttgtcgatctaggcggcggcgaggactcgtcgatcctggcggagtagaatcccagcgccgactggctgaagagtaggaatcccgacgccgatgggtggcaggagcaggagtcattctcggcgcatacgggcggagaaggaggctagatgcaaggcaggcggcggtggatcgcggtacattgttgcacacaaagttacatttttgccattccacctctgtcctccgagaggtaccgcattagggacacaattggtacctcaggataccaaactctaccagccgttggaattttggtacctctcaatattttacactcgaaaatgtggtaactcatagtatcttctcaacgatcataaaataaatccaagtacatacatgtggcagagcagaaggtgtaccagactgttaatgatgtaacacaatatgtacacaagtattttctttacaataagatagatggggaaatgacaagctatgttgaaggtagaaaaatacatcatgcaacaatttaacagcatgacaatcatagtttaccgtggaagacttccggataacataaattcttcctgcaggctatagcaacctggagatgctaaattagccatactgttgattccaatccccgtagcttgatgataatctacatgtccttctgattgtggagtttgcagctcatcgctatcttctggagaaactgtgcctgatctgaaacctttatttcttatagattgtaatgacatctctacttgcttcatagttggccgttcttcacctctaagcctcaagcatgcccgggcaattgaggcgacaatgttaatttcatcctcagttgcttcttcaagaacttcaggagcagctatctctgcaactggccttccttttagctcagaaaggaagtaaatagataaatttttctttgaaccagattcactgtcaaaaataggttgcttcctgagaagcagctctaaaagaacaacaccaaaactgtagacatcactcttctcatttagatgcccggtatggtagtactcaggatctaagtacccaaatgtgccttggatatttgtaaaaacatgggtttgatcattaggaatcagtcttgataccccaaaatctgataccttagcggtgtagttggcatccaaaagtatattcgaagatttcacgtcacgatgtaaaacagatactgatgctgcagagtggaggtaatataaagctcccgcagcttcggtggcaattctcaagcactgatcccaggacaatgtgaattctctcatacttggatcagcgtgaataatgcaatttagtgagccatttgggacaaagtcatacaccagtagagggacttcggtttcaagacaacatccaaatagttttacaatgttccgatgatttatctgcgatagtattgcaacttcgttgatgaactgactaatctcttcttccctaatgatgtttggtttttttatagctaccacacgctggtcggacaatatgcccttgtaaaccataccatgccctccactaccaagaacacgtgctggatcaaagttatttgttgcctctttcagctcttctagggtgaaaatttttgtgctatcagtagcgcattcatcagatgatataagttgctctagaagaaggccttgattttttcgaaaatatttcttccttaattgcttttggatatcattctttcttttacggacaaggaatgctacggttaagacaagaagaagaattccgaaaccaactcctaggccaattgcaatacctagaaaaacatatacacatgttagtttatttattttttcaattagatgtaacgacaagtaaaagtttcatgaggtaatttaaatgaaaccatacatctaagattagtttaatattcagtgaatattattttgtctacttgtttaatgctgtgaaagagaccggcattacaaaacccaagttattttaatttttttgaaatatttgtagaatgcaaaatacattgtgctacttcctttttaaatgattttaaggggcccaaatgcatttcatgtgaactttaaagcaaatattggctataaaaaatcttgcagtattctgaggatatgtgtttaccgaatgctagtggaaactcttttcggcatggtccaacagaagcatctcctcgagtacccgcagggcaaaaacaatcgaatcctccaagtttgttgatgcacttcccatagcaagggtacttattagaatcctcacactcgttaatatctacaatcatatttcacattgatgtcaaaatttatgatgttactcccaagaaaacaaatattgcttgatggcatgcagtaagctaaaaaaaagttgtatataacactattaacaagctttgtttcgattatggctaaagagtacagtttgaggtttagccacccagaatgttacagacatggatcaaaacatgggtgagttgctaacaccaaagtttacatgcatttaattattaataacacattcaaaattttgtgtctccatgatatgtgctggttctagaaccgacaccaagaaggaacaccgatgagagatggtcactagtgccagttctaaaacaaaaccaacacttacagtgctgtctgcgattttgattttgcttacatgtcatgttgaagatccattaaactgagcaattaatcttagcatgtggcagctatgataaattcattcttgcgccaagaagcatgcataccataactggaagttattaaaccatggtaaaattggaaagacgccatttcgaattagctatttagtcaaaaaaaaagcaagttacattaactctacttcttttaggattacattaactcttttttttgacctaagtcgctgtattttgaaaattattaacgaagatatgcaccgaatggttaaatttatagtattaatgattagtaaacataactcatgcaacgcacgggttggtgattagtaaacgcaatatctgtaaatcataggcgtagtgaaatattcaccttggcaaccatcatgaccctgaaggtaaggattcccctcaaatccttgagaacatttgcagaagtatcctggtccattgctcgagtcaatacacacgctgttgctgctagcacatgcatatgaatctaaatgttttcttgcttcggcgcaggtattgtttgctacaacccagtccaccacaaatggaggctcaccaccgaaagggttgctgaaattcgatgacgtggcataaatcgtggagaatttgaagctggcctcctccactaacgctccataactgcaacgggaccaattgtggatgactgatgtgttgaagtgtgtgtcaaaccaaaccttgtagtgcttgatccctttggggatggccgtctgacagcagcctatcccagagcatccttcaccattgatgcttaaaagatcatcaccctggccacaactggtggcacagccaattgttaggttactgcctacggcgctctgcccaccaggaccgaggtaaccaagcattcgacatccaaagaccgtgaacttgttggcactgttagagaatgtgaaaggacttcccgtcaagctcagatttgccttgtcgacgcagtccatgtcatgtttcgtcatgttgtagcattcgtatgacataggcatcctcatgcgagcctaaccttctggcaacgagatgttgagcagctccacattccggagaagcagcttgggtatgctgttaccggtactgttgcagatcagctcaaaaccaggcatggcgcagccagcctgacctttgatgccgaatggaaaagggatatctatgctaccacaacttctctggcaggtggatgctgcaactacagcaagaccacctgaagttgctatggtgagacatagtagagtagggaagatcaatgcctgaatcatctttgttgctggaaaaaataagattgctagctagatgttgtccacctttgtgtccaaggtctggtatatatagctccatatgagtgatataagtttattagctagcaattttagctttctcagttttttatgcaattttagctttcgctttttccatatttttcccagctaaaatgaaattactctcataaagtacaagtcctcacacccattaatatcagcaatcgtattctccgattttcatatctcgtatttccgatgtacttaaatgaaagacaccagaattatctgatatagatttataattgtcatacatttattgaaaaaaaaagatggagtattatctattagcttcatcagaatgcaccgctcgaaataccttgacttggactttttctaggtcttcctcacttattgctttaccaggaatttccatgactagttgttttcacaacaccaactctatttatgaatccaattaaataattcatttgcctgcatatccatggacatacatcacaccagcttgtcataacccgattcaatcgtatacagaagaaatgcatgggtatgaataattgtctagctttgcatccaatgaattctagctctaccagggagattcttttctattgcagtataatattttagataatggagagtctgatgtctgcacatcgcgcatccagctacctaaagttcgcaatgacaaaaatccaagactatgcacctgccaaattgggacaagagatcgttctctacccactccaactctgtagatccattgagcacattatccggacacggaaacgagccgatcggaaatataatctacaaagattataaatacagcaacaccgcacatggccaacatacagtgcaccagtcccatcaatattttgtaatggcatatatatatgcatcctccttaattaaatggcagatcggtttgtaattttcgattcaagccaatgcatcgagccagctttttgtttttttcattcctagaaccttaaaggtgcaggttcctaaacatcaccattgagtcctcctcaaaggcgccgcctgctagttgctggttcagaaatccaacacctatgaccagttcctaaccggcaccgatctccttctctgtagtagtgataattattccgtttataggaaaaaatggttataatgtcttgttaacttaacatctttcatttttttttctaaaagaaaggttttattttacatacttttaaaaaatataatctggacatttggaattcaatacgatgcatacttttctcgtatataatatccataaaaagaagtgattggccccacgtgatgttcccctgcctcttttttctcctatgaaatgatatcacttatgttagatatttactcactctgttgcaaaatactatgactttttgaaatttgacacaggtatcaaggagaaatgtaaactaaaattatggatgatttttgattggttaagatgaaaaagtaggcagataaatcaaattgaagatggttgtgatttgttgagaggaagaaaaggttgctatatttttaggaaaacatggaatgttaaaggtaactacatttgggatggaaggagtatttagcaaggggatgagggaggactaccttaagctgcatctcttttaaggagaattgaaagacactttcccactgaaacttatatttgcatgtacttcttatactcacttacctattcacctttcataatccttgcggtacaactctttctatactttttaacatcaggagcatttgaagaatttctaatgctccatcaatccaaaagtcattatattttattttatggttgtttcatttaccccccttaactatcacggtcattcgatttaccccccttaactacaaaaccaaacatttgacaccctcaattatttataccgaacaaattacccccctcaatagtattttgagcagttttaagttgagcgtgcacatgtcgggccaacgtggaaatccaatcagtaaaaaaaatgcttccccggcgcccacctgtcatacccctccctcaacccaatacttccccatcactctctctctcacacacacatacacacactcctctcacacacacacacacacacacacacacacacacacacacccgggcggctggctgtggaggaggaggcggactgggtggccggcgttgagaggctaacgaggagcttgcccgggcgactggcggcggaggcggagctcctctaggaggtccgacggtagagatggagatcgcccacgcggcggaggaggtggaccgggttgctggcggcagaggcggagaacacacgagcggctggtgactgaggcagagctcacacgggagacaagcggctgaggcggggatcgcccgggcggtgggcggcaggcagcggaggcggggctggtgccgcacgcggcagagagcttgctctcccatgacggccctccctgccgcgcccgccacccgcccttccccgccgtgacctccatttggaccaccgccgctgccttctctgcctggaccaccgccgccgcgctgcactgcaggaaaggggtgggcggcatgctaggagacggcggcaggctcgtcgccgccttcatgagagctacggctccaccgccgcagatcccaactggcggcgccgcgacggtaggtccaagcggcaccgtatcgacggcagtatccggatgcagaggcccgaggcagagaggttgaccctcgaggactcgcgtcgttgcttggccttcccgctcgtcaagatcgatgggtgagacacggccgagggagaggatgtggcggggacgctgccttccaccgcgtatgttactgccactgctgccgccgcctaatgcacgctgtcttcatccgctgtctcatggtggtcgtcgctgccttcctctacctccaaccgcttcgggttgattcgggggggtgattcatccaatatgtaatgctcgagatgtaaaatatctggttttgtagttaaggggataaatcaaatgaccgtggtagttcagggggaaaatccatactttttccttttcaaaaatgagatggtcgtaatggtagtctcgatgcatctaacacataattgaagatcttgcctttttgctagattatattgttgaccggaacctgagcagccatcttaagactcgttacagacctggatgcatgcatacaaaagaaacttctatgggataggttaatactcactgcatgcaggcaaaagtttagttacatgctgatgagttaatttgctgttggtcttcacaacaaaagatatacgccagggacttttgcatgccgtctgtatcccgttgattcatcttaattttagttgtaagaggaaataaccaaagtgtctcacattaataggaaaatagtattttcaacggtatatttgtttttaggggttgggaacccttcctgcctagccggcaaaacaaacactacagcatgacacaaaatccccaacggaaaatcggttagcaaagaccacattcaaagacaaactgtccgtcggcaaaagtatagatgaattatttccatatgattttggatgggaatgtttggacatggtgtagtgaagagatggaacagcatatgattatttattagctaaaaaactgaaaaagttgattaatatggtttttaaaaggaaattttaaatagaccctttatattaaagacacactatttagcagtctagcaagcgtgcacgtaaaaaacggtaaaaaacgaggtgatagaagtttggaaagaggagaaaagaacacacaccaatacctcttccatcccaaaatatgtagagatacctcttaccatttgtgccaaaattagtggatttatatctcctttcctacctcaatcgaggagttgatatatatatttaaaatctcttacatactatgctagtgagttgatatatggaacgaggtgatttttttccctacatacagatttgtatcccagtctctacaaactaacttcttttgagggatgaatgttaccgtgctctctaccagtagaaatgatgtgtggaccgttcattcctaaggtcatcttagtactcgactaactcaatgattagggtaagtttgccattagcttttttgttctcttgatcgctggcagattgctcacattcgataaaattaaaaaaaaaaaagttgctcacctcgctcgtgaaatcctctcgccgacggctccttcggtccttccgccggccactctcgttgttgattacatcattgccaacacgagcgccgcttgttccattccggccattgctgacagtgtcaatcatcaagcatgcaggagtctcctgtaatattattgttgatccatcccgcgatgcataagcagttgtttgcctgactcatattcttcttgacaataccaatgtgtgtgtgtgtatatatatatatatagacacacactgttgggatgcaaatacgcgtgcgagacaaaaatatatttggttgccatgggtgtgaaactactggggatgtctctgttcatcggcggcggccgtcagttcgtccaacggtggcagccgactgaggggaagactgtttcactcgatcggctagggttagtcagtgctaaatgatgatttcatcccaccgcacctatttttctttttttttgacaattatatccttttatgtttcttctgccgtctactgaggtggtaatagaaataaatctagctagacccttggatcaaaatagatacacggttccaatacttctcaacttttggacctagggtaacttcgaagctagaaataattaatcctagctttgtgaaaaaattttaacactcgatagtcattaaaacttttttacacattttaaacagtggaaatgtcttggtgagatgaagtaacgtgtatgcatctaaagtggtagtactttcctgcaaatgactaatcatatcgcactattgaagaattgatctttactgggtcatgcaaaattcacattagtcccggttcgagtaggaactaggactaaatacggtttaaaaacccacgggtacttttttgatatttagtcccagttggtaacaccaacggggactaaatatcaattagagaaagatggggggtccattagactaaatatcggagccttgtgtccttggattcaaaaacatgtcagacaccccattatctttagtcccggttggtgttatgaaccgggacgaaagatccacctttaatccttgttgtttttactaaccgagaccaaaattaaaaaatcgcgaacagctgccctgagaggggcgcagagccacgcgccttgtcctacccgcctccttatctcctcacacctcatcctccccgcctccctatctcctcatcctctcctcctcccctctcatgttctcaccctctcctcctccccttcccctctcctcctcctcctcccctgacgatggtgatgatggtgatagcgggcggcgccctggtggaagcggccatggcagcgcatgaggcggcaggcggacggtggcctcccctccactatatccggcgggaggagaggctgggcggtggaagcggtcgccgcggcgggctgccgagaggcagcggcagcggccgggaggcggcgcacggccgggtggcctcccctctgctagatccggcgttgaggggaggccaggcgtcaaaagcggccgcgacggcgtccgggaggcagtgtactgctgggcggctggcggcgccgaggctttcgtggtttttttttattttttgaatgatttgcaaattttgttgtagatttttttagatttgaggatgaatttgtgaatgactcgtggattgtagatgattttttggatgggcatgtgaattgtggatgatttgttgtggatttgggcgtgacaatataattgctagtagcaaaaaaataatggagaaaaaagatccatcttttgtcccggttattttatccgaggataaagatgtgtatctttagtcccggattagacgtcccagtttgcaacctggcactaaaaggggttgcaaaccgagactaaagagcccttccctagcagtgtcagaggtctgcgaaggagagtagttgcaattattgctggatcctctggagttgtaggttacagcacataaatataatgaattttggagggtgtgacgcatcttaatactacgaatttacataggtgtatatatcacatctcttcaaaatccaatatattgtgggacagagggagtgcatggtatgtagcttcatggggtcaattttccagattaaatgcatagaaaaggaacagtcaattcaggtcagttcaaatgcttggtggaatgattattaagcaagactcatttcaactggagtagttaacttgtctccttcgcccccattactacttcttcattgattatctggtgtaaccaccgtccattttttctttgatatttcacagcgaaaggtccactgaacttgaaaattttatttcggacaatctttcactcatggactttttttttatttactttatccattagttaaataggctactgtaggatttggaaaaatattgcatagagtaagtatcactaacaataggcgttgttttccatacatactcacaggttatgccaagcattatggtgtttgctaatttcaatggagtgtgtattattcaggatatgagctgaaaaacaggacagggggtggccattgtccagaaagcacatcagacacaaaggggctgttttaattttttttttgggtaaaacttggcttagtttaatttttttatctctcaactctttgagcaagctaacaaataaatggtagtatggataaatgcttatattgactattttacaaaactactgtcgtgggggcggatgttatctaacttcagaagataaagtgatgggctttattgtgttttgttgttgaggggaaaaaagggtctgagatgtggtaatagaaatttttttttcccttgagatcaatacttgtataaaaaaaatatagtaaaagtactatatcctccctccattccaaatataagcatttgtagaattcaaaattttatactaaaaattccaatacaggggaatttaagaatttttttcgccaatcatattgttaggagaggaatcgaagcaagtcaagatttataatttgagtactagaggggtgactaagactagaatggaatctttctctttttctcaatagttgagaaaaaacaagaaatgttatatttagtaatagaggattactatttaaggactatgaacgataaagacgccgtggtcagtttccacgtaatattgatgagatgtcataatcctcaagtcagtcaatcttagattcctaaggagcaacgaattgaccttaggaatccaagtgaaaatatcaaaaactggattaaggcacacacatgtccatgacatattaacagcttcttcaagtctcatgcatgactcagtcacaccatgtgacctacgctgatcacgcattgacagggagtgctgacactctgagtctaaatcacattgaattcgatgaaaatcctagtagatatttgtggttacctagtcagctaatctacaggttttgcgtacaatgccttggactactcatatctgtacgtgcttcataatttgttgaactgcataaaatggccgatgtaaaacacacagcttgaatttcttgaaattttatactatttatagcatagtatttttacggtatctccagcagcggagctagctcccgggcaggttgggcgtttgtccatgctttctccactacgaccgatagctatgggttactgtcgacgaaaaacgctatcagtcgctcgggttaacggcgtcgctgagtacctgttaagctatcaggaggtatggaacttcatattatagaatttgacgcctcttacaactcaggtatcgcaataactgtaaaatttgtttatttaaatatatttaatccatttggctggactagcataatagatttcagataaattacataaaattgttcctggtgttaaatttagcagttgaaccgtagaataaattacaccatctcgcctgtacctaaccaacggacattcaagagacaaaccggagtagacaacagcaatctttaacaaaaaggaaaagaaaaaaacgttgatagttacaacagggcgctgcaatatatgtgcacaaacgcccagtaactaattaggaatcaaccgcaataaaggaatgcatccttgttctaggtatttactcccaatacatagtttgctccagagagtgagaggcagagagttgcatagcagcataagtagcagccatcggcagacattggcagctcgatggcagagaacacaaaccatacccccacataagccatgtgttttggctagacaggttggacgatatctcaaagaacaaactcaccgagttgctcgcatagatgttggtggctaatcggaatggaaggcctttgggatatcgctcgtgcatcggtggattctcagattacaccgtaccttttctcgcatggatggtgcacctgcttctgcattcagggatcaaaacttcacggacaaacatacttgaaagtagctgctggagctgtgatgtgcgacgacagaggaagatacaagacagcggcagcccaattttgtacgcaaggcgagatgatggtggaagttatggcattgctgtagagcagctgaatttacagatccggatcctccctgcggtaattcataggaacactgtgtcaacagttcatcgtgtataccgctacaatgaagtgatgtaacactgtagcaaattagcttctctatagtttattcctcaatgcagaggatctcgatcctgaactgatagttaagctaggaggaacgaaagtcatcatcgaaacatatgctatggaattggcgaggatggtgtattttgaaacagtaggagctaaaccggtctatcattggaccatgatctaagaactaaagtcgaggctaagagttttctaggaattaaagataatctaggtttgaccctcgtccctcagtgaatatggtcgcgcataagttttctcatttcctccggtttttatttcatacttccttgatgatgattgtaagaaaccttaatgtggcttcaatagagtgctactactatcgtcccaaaataagttcatttctccaatacaaaacaaaaaaacaaaaaggattggaatgcatctactttatcaaatctcaaatctcagtacaattattcattgctttatcttttcccaatacatttattctctactttcacaaactctgatgcaatttggtggaaccgagttagtgatctcgcgggtattgtcatcaaaacaacggtctttaccaacatgatggaactcgacatctttgactcgatgccatatgaaaactgcagtgtcaccaatcctgtcatgtgacatgtggtcgatttagtgacatatcggtcgactctccaactctccagattttggaccctcacaattagttagcgtttcctccgaatttatgtttagacgcttctaagtgtactcctaccagacatacttgtacaaattaaggaaatagtgaatttaccattctacccttcatcccctcccatctctaccttatccatgccaagcttttgtacggggagatggcaaggagtgtcaaataaaaaaaagatgattcccgaatgacttgcgatgtcatgcaagaaaggatggagggagtagctttttcttctgcaattatatttgcacataaatatttgccccaattgtagattctatgcctatcacctactcgcggccaacataatactttagtattactattcatcaacattgtacatcaatttggtaggcattcacagaataccaagtttgaatcatattataattttgttacaacttttagtttactttatggatttccaaatatttataaagatatattgccagtaccattaagtgggaggggggggagaaacgatatgataacaagatttatgttgtgcacatattcttttcactgcaatatattcgtgtctaattcttgagtatatacattacttaaattcgtgttctgtcttagaccaagttctacgtgggacctaaatttcagttaatgatatctttgtgtgagacagtggctcactgaaatctcggttaactaggtgaaataccgcgcattgctgcgagagtttagtatgacaataataagtaaaaataatgcgtaagatagctaaataatattaacttacttaagttgatgtggtttatcataatttaaatttaaacactaaatagaatgatggttcaaatgtaaaaagtaaggtgacgtggctctctgagagaagaaaagtaatgagatagtttgaactttgaaccatagattaatcgtttaagacgacttgatgagagaagagagaaataacactacgtaaggataaactaaataggtatatatgataatataaaaaataacgatttaacatacttgtattttcaaactataaaatttaataaattataaaattatagataatatagcatgcttacatgatgtttaattaaatgtagtaattgctagtggctgatgattttgcatcttgttagtgtatgatgatacgacatctttgtctgttaagttttagaatttagtgtgttacaactttatactaagataggatatgactatgttggatctttgtcacgccccgaactaatcccgaccggaactagcccgtgacgctccaaattaacctgttgatcgataccagtcccaggaaacagtgctggtatcacagggagacagaatatcacagcaacagcggtctctttattatagagtagagatacagtcatgttgggctatggacagatcccgagctcacaactgcattacaaaagggaaacggaagccaggactaggaccaaccaacacaggcgtgacttgggaactaggccgaaaccctaaaactcatcgtagccggcttgctcctggaagaactcctcatcagcaggatccgttttatcttcttcagtaattggggggtatatttatatagagcaagggtgagtacgggagtactcagcaagccaagggaaataagtgtttaatgcaggcttcaaggaaaggctgttgtttttgcagttgattttatttgaactcttttctaaaaacaactaagtgagtgcttctcaaatgacacggttgagacagtgcgtcacgtccgctcggagtatgtgcaatgtatcagtctttagacttgaattaaggttggcacccggccaacagcttttcaaacggccacccgggccaacaactttcaaacggccacccgggcctagctgatcccatcagctgcagatttttcaaacagcgaacccctttccacaacagcaatttcacaagcagtagtcaaacaaaactacgctaggaatcacctcacatccgcccataaccgtgggcacggctgttcgaacagtttgttaacctctgcagagggggtacactttacccacacgacattactaacccggatcacccagcccgtggggatcagccacgtcgggagacctccaagctttcatgacaaggcatttccaaagccgacacaggtttaccatatgccaacgagaggggtcccagaccaacaacaggttaggtcccagaccatactgtgccaggaagcccaggggtcctccccg

SEQ ID NO: 20534 - DNA, 1338 bp, Oryza sativa
attaaatcctttttgacaaaagaatagagaagaaaagaaaagagggagggaaattagacttttcctcgggcggctagggcgcggcccgagagagatggggcggtccggccgagctaaatgggccggcctgcccaagacggcccaaggcggcccagggcgcgcgcgcgcgggagggaggagggagagaaccggtggaccgggctcaccacgcgtggtcccgggtgggacccgcttgtcggtgactcggtttaccatgcggagcgagcacgcggcgcacgcgcgcgagcgggggagggacgcggtgcacgcgcgcggttcgcggtggaacggatgcggcgggcccacgcgcagcctcacggctcgtggtggaacgcgcgcacgggtggggctgaccggggtcggcccaggccgatctcggccgagctggggccgacgtggcgcctacgtggctgccacgcgggctggcgggaggtagacgacgacgccggccgtaacggacggcggacgacagcggtgagcggcggagcgaaccatggcgttacaggcgaaagcgagtacaccgggtggttgctcaggatgaggggagacgagccaacggctcggattcgctggagggagtgcgtcgacggcggattgcggcggcggcaaccggcggggagggaagagggaaaaggcgacgaggtcacgaggggccaatccccggcggtgagagcatctacacggctacgggaatccgtccctagcgtcggattgggcggagctacgcctagcgaggctggcgacgagcgggtgctacggagcacgggcggcaacggcggcgagcacatggcgagcggcggcaacggtcggggtggcgccggctagctacggggaggctacacatgctactaccgaaaactaagggggagagatggagcgaggaggaagaacggagggaggcactaccgtgcggacggggcgcagtgacgagaggccgacagcgcgggagtaatctctccggcctcgggccggggaagaggaaggagagggcgcgcccggagtccccttccgcgtccacgaacgcaccggctctcccagtgctgggcgatgaacggcggaggcgagacagagcacggaaggcggcggcaatggcgcggtggcggcgagcgaaacgggagggggaaatcgatgggagggcgccttggcttataggacgacgatgtcggtttggaaaccgaccttgggcggtcaaggcgcgagctggcgctcggcgctcgcggccaaaacggtgacagaggcagatgacgccggcggggaggggaaaaggaaaagagggagagaaaagggggcttgccccct

SEQ ID NO: 20535 - DNA, 8981 bp, Oryza sativa
cgtgcagcggctccatcgaccgccgttgctgaccctcctcaagctcttggacctctcccaacggatagtccaacattggttagaaaaactggattggagattcggaaattttctcagtggattctacatgaaccaaaagagaaatgggccaaggcgtatgacacaggtggtgctagatatggaataatgacaacaaatttggcagaagtttacaactgggtgatgcgcggtgtccgtggactgccactagttggcatagtggagttcattttacatgggacatgcaggtattttagggatcggttccaggcagttcttccctctatgccgaacaacagcattttgtttggagctttcatgcagaaaaagctagaggagttgcgtaaaaaggccatgaaacattgagctgtagtgcaaggtacccaacagcacaggtttgagatactatgtcaagataaggcaagcaggggtatctaccacaagagagtgaagcaggagtgtgttctcaaagctgacggcacatgtcattgctcttgtgcaaagccgaagctgctccacaggccatgcacccatgtcattgctgccgcagcggagtgtggcataccagatgcagtatatgtgtcacagtacttcagtaagcaagcaatatatcatacatggagcggcgagatttatgggttcggcatagctggggagttcacagagactaacgatgaagtactcaatattcctgacccatcgaagctccgaggcaaggctggaaggaggaggactcgtcgcatccacaacgatatggacgagtcggaggctggcagggtgaagcgttgcagcaaatgcgatgaacatgggcacacctacaagcattgtcctaaagacaaggagaaaccaagtgcggcggaggcaggactattaggattagcagcagatggagctcgccctacgggtgaaggcactatcttcactcgaccacgtcctaggcgtcgtcgtgccacgtctggctacgtggtgtagttcttatgttctatgtcggcatgtggatttgcttgtaattcgtttcgaacttatcgatgtgtttatgtttcgtcgtgtaatgtcagacttcggcatgtcatgtctttaggtctcgtgatgtaacgtcggactaaggcgcctaacgtctttaggtatgctgatgtatgtcggacttcgacacgtaatgttatgttatattattgaactctacatgtcacgaccggaaataacccaacgggcgttccttacgtgcgtgtattattccttgtcccaggaggcaaggtacaccaaaagttgatacaattcagagttcacaagcggaagcgtaattaattaatttattacatgggcggcgaaggccccgcacaaaagaagacaaacgaaaaacagcggaagactagggcgacgaccacaggcacttgacggcaggcacgagctagacaccaaagccttcatcttccaggaactccttttctgagtttgggaaaaattgagcaatactgagtacaaccaccgtactcaacaagacacatccacaagtgcagaataaatgcaagggagtacaagggagccataatatagggggttaggatttgcagtaaacagcattaaaagacacttaattgctcaaagctattttgtaaacacggtcctagagctatacaatattattaatcaaggccgtgaacccacacgaacctgccttaacccaaggcctatgatgatccagaccgaactggcaacccgaccctgggtcccagctcgacccaagccaacccaggccaaccattccatattttagttgttaagcaggttttaagaattaaaaacactaacttgggtacattgctcggcttgcccataaccgagggcgcggctattcgaataggttatactctgatcagaggtgtacatctttacccacaagacacatcttcctcacgtgtaaccacgtgccacataccaccacggtatacggacggaagacgtgacatagtttccaacccatcctagccatagacaagagtaccgacccaaccccacctacggccggaacccctgggacaggtaggcaggactgagcccctagcagcaggacaccggccctgtgccatgacatctcgactaccgggccgcagctcgtgtagcctttatttgtcctagagatgtccatcgacccctgacttcgtccatctccatccgtgtacttttgtttataaccagactgagccacaaactaagccttacccactagacatgtggaagtacggtagtgctttgcaacagaggcccaaagaccggtccttatatggccgaggtgctactatcaaaaccatgcaccccgagcccagcctaaaaccattttgagggttttgaatagagggggaggtgtgaatccaattccacaataatccaaccattccatagtgtccaggtgatatgaatatcccaaagtctagagttgtaaaaccacctaatgttacctaattaagcagcgaagcatctacctaaattcatactagtggtaccatgagtagagtgtccactagttggggttttgtttattctagggtgaacaaggaaataatagcaataacaataataaggtcataacaaaggtaaataggcatggctaggtaaaacagtgataacgcgggaatttaaataaagcgataatgcaataatttaaatcgaaataattttataaacggggattcaatatgttcaaggatgatgtgacttgccttgctcgctttcccaaacgtcggcttcaacctccacgaagagcggttcttccgaacctgcagcgtctacacgaccaatggaaaaataaaagggcttttactctaataaactccatataacaagcaggaaaaaagcacaaagatgggttcttgacttcttaaggaaaaattagagacttgaatggtccaattccgagttcaaatggccaagttatggccatttgaagtttatatgttctttaaatgaaatatttgcgaatttcttcatttaaattttaatttaaaaagggtttattgcgtcagccgagggggagcgggcgcgcggaccgggtccacgggagtggggcccacgcggcagcctcacggtccacggtggaccgggcgcacccgggctcgcaccggccggcgccgtgggccccacgcgtcagccgcacccgagggcgcgggcggctgacggccgggccccacgcggcagccactcggcgcgcccgagggcggccaagccggcgcagccggcgggaggcggcgcccgcgcccctatggtcgccggcggcggccataggcacggcggagcggtggccgagagaggggaagggaaggggaaaagaggcggcggtccacggctcaccctaggtcgtcggcgacgacgagaaaggcggccggagcggaggaaggcggcggcgtggctcggctcgacggggtcgacgacgttccggcggtcggcgagcgaaacggaggggtggacgaggtcggcgaggatgcggcggagccgaaggaggcgacgccgaggtcggaggtggtccggggcgacgaggcggcggaccggagctcggcggcgacggcggagagagagggcgacggcgcgagctcgaatccggcgaggaggatgggcggcgagaggcggaaacagacggaggaggtgcggggagggtttaaatagggttggaaggggagagagcggccggaggggaagaaaaccggcgcgggaggtccggccgccatcaatggcgccggcgagatttgcgggggcaaatccgcccgtttgaacgcgagagagagagggaaaaatggggggaaagggagaggggatcatagggagtaattctccccactttattgcacgcggggacggcgggatgcggcggattcggcggcgcttggcgcgggcgaggcggcgggagcggcgggaggaaggggatgacgggtgggccccacccgtcagcgagggtggcgggcgggcccgcccgtcagcggcgcgcgcgcagggattagccgagtgggccgcggggagaggagagagagggggagggggatgggccgggccggcccaagggagtgaagggggactttttagggtttttctgtttattatttgtgctctgaaaattccactaaaatttatttacgcattttaggcttttaggaaatatacaaaaatcctctaagccttatttgacttttaactttgcacattttaattgttggaggctttcacacggattttaattattctaggcatcatttagaggatatattttagggttgctttgggacgtgacgctacatatatgttaaattgcacgtcatcgttatgtaccattagtaacgtttgctatatttaaatagcctgtactcttgttgtacataattaatctcatgatttgattactatgtcataattttgcaagttatattttgttttacattactattttttgaattgttctaacacgaaacactatatttttcagagatggcacgtcaggatacacctcagttgttggacccggcgatagatcaccgacaccggtctcaccttactgtggtgcagggggctcagcttgggacgttccgggcacggacgtgcggtgagctactcacggttcacgactcctttgtcgagaggtacgaacagtgttttactataagttagttgcactgtaatattttttataatgacatattaatttgttattgcaggctacgtgaggccggcctcctaccgatgtgtcgactggtggaggctgcggccggcgacgcggacccggccagacgatagactgtggacaggtccctcctagcagctttggtcgatcgatggaggccagagacgcgcacttttcacttgccgtgcggtgaggtagcccctaccctacaggacgctgttgggccagtgaccacggctgtggactggcaggacgatctgacggcacgtttcgcactagtacagcgcgcaccgcacctcccgctcgagccgttggcacaccaccgcaacaccggacctacgaagaggtggctgcttcagttcaccgtgagtgtttttgtaccgaaatgacaatcgtattacatatttagtccgcagttaaggtgcctaacattttatcgacggcttgcaggttgagcagctacaggcggaggccgacgagtactcctacagccgatgtttggaggcgtacttgctctggctttttggctgggtgatgttctgtggcggtcacgggcacgcggtcgacaagggactcgtgcactacgccaggagcatcgccgacgccgcggtaggcgaggtgcctcagtggagttggggttccgcgttgttggcggctctgtaccgtgcactttgtgagtcttgcacgaagacggatcccagcgcgacctttggtgggtgccctctctttctttctatctgggcagctgagaggattccgatcggccgccctgaggtggaccagcacgcgtaggaggagtcactgtacgaggagcgaccagaggtcgactaccctacgatgggtactctgtggtgccgtcgtcaggtacgttgcatcgatcttatcgtattgttaagttaattgctaagttcgttgtacatcacatcgatcgtctcgtattgcagcgccgatgggctcacgtccaggttaggcggtcgtatcctgagtttgttatggagttcgaccgccttctgccgactgacgtcgtgtgggagccctatagtgccgcggctacctaggctcgtgcgccgttgggtctgtccacactctgcaccagggaccaggcgtgctggatgactatggttccgatggtcttcgacatctgcgttgagcctcacgcccctttccgcgtgatgcggcagttcggcttccgtcagccctttccagtaccgtttccgaccaccgtcccagctgctgttcaccggtaagatcttgcactacactttccgttgttgcattaaaatctgcctgttcataataatttgtaacatctgtcgtttcacactaatattacacattaattcgcaggtactcgcgcaagggtcagcagtcagctggcgactggcccgccaagttggcaacttttgttgaggactggttgctcgcaaccgaggaggtcgtggaccacgagggagagccacacactgaggagtcatactacgtctacctacgctggtaccagccacgcacccgtactagggtcaccttcgctcccttggagcagcagccccacgttgcgagcactagaatcctctatgccaggcaccgcgaccaggacttcgctcgtgctgtgagtaccctgcatcgcaccattcctttatgttttcatgtctttctcttcgtcaaattttacgaatttttacgaacaaattaaccatgtaggtcgacgacatcaaccgggtcgtcgttgacggttcaacgacgatacaacgtttaggcgcggggattccggtacccgtagaggagcacctgaccacgtacacgcggatggtggagtcgatgcgctcgattctccgagtgctcacctgtcgtgcagacgacgttgctcgggcagacgcagctgtacagcggccacccgtaccgactagtccccgtccagctgcgcacgttcctaggccgactcccccactgcacggaggtaagtatttttattactatttatgtacatgcctcgcacatataagtgagccgtttcacttgccgattgcttcagggtttcgtgcaccgttcagcaccccgccttcctcggctaggccttctgttgtgccccccacaggtacttaaaaaaacaacattacttcgacaatcaatttacatacattttatgtcttagcttagaagggtcccgttgtcgatgtgtaggttttgcccagttcgctatgacgcaggccgcccacttctcccaggctgcagggtcagcgtctcaggcagctgtgtcgacctcgcactcagcgcagttctggcagtacactgggacttcgtcacaagcagccggcacgtcgagtcagggtccaccactggaccatgctgggacctcgtcggaccgcttgctgccttccaccttgctcttcgacatcactgacttcgacttcgcttcaggctcgacagaggacgtctttggcccctcacagctgggaggcgcaccgccgttgcagacacaggaccagacgcaggccactcctccgcgggacactcatgctacccgtgctgtgccaccggatcgtttcacctactcccaggaccacgtgcgagcacaggcccggaggaccaagcgtggtcgcagcgcggggcagggccagtagagcagtcttctgtttgtttacttgcttcactttccagtactgtatgcttgtgtaatgactacgttgttgttatatgtgcacgatacctttcggcgcatgcacgactactttctgccgcaccgatgcagcctcctttattcgcgtgtgatacgagtatttgcccgccatttggcgcatacgaccaatgtaactttcggcgccgatcatgcatgtatctttcggcgccaatcaggcgtacccaccataccccaccacgttcgcatgtcaggggtatcactcgattttttgcgcctatataagtcgccttaacgagtgaggcctcacaatctttcagaactcagtcacattcagtactctcttccccacttgcttcattacaaatccgaccggctttcgtcaatggctagacgccggggtgttgaggatccaaactggtgtagcgatccttgtgtatacctactaccaccttggtgccagcgtcctctctgcctatgcggtgatcgatgccaactaatggcttcgaggaatcctgatattcgaggaaggcgcttttttaggtgccctatctatgaccgtgaggtattttattatctgcatatgcttattcattccgtatgggcaatcgctttattcttcgtaacactactctattcggcagacccgcactacggcttgcgcatacattgagtgggtcaatatagaaaatcccattctcgacctaaccacttgtttacaagaaggtcgctggtatttcgcatccgaaagtactgagcaatacttacagagaaaagcggcttatgaacgacaatgtcgtgaacaacagagcgactggcgggtgctaactacggcactccctccatgggaagcccgtccaagatgcaggtgtggtgatcgttgtcaggttcttcgttccataaatcctacaacattgggtcgaaggttctttgtttgtccaaatattcttgacgacgatttcatggtaagaatattttgattacatgaatccttattttctcacaacatttactaactttgcttgctttacatctattctttcctcccaggaaccaccaaggagatgtcaatacagagaatggatagacaccagaaggattctaactccacctagccgtgttgtgcagcttgaactaccagagcaatacagggttactaaagcgcggtttgagagaggagagggatcctcacgtaggggttagctattatcggacaacttggcatattgaaatttctactgtcatgcttccttgtcccattactacatcgtcgttgtgttcaactattgcactacctccctcctagttcgaatctaatatcatctatgtaaccgcaatgcaaatagtcgtatcaggttcaaattgtactactatttcttcatgttacataattctccttgtttaagtccatataatgtttctacgacccagactgcgataggcctatataaattatccgagtactaatacgtcgaataaggtacaaaataatacctcacttaacatatgaaattgcgcaacaaccaacttcaatacatttttataacaatattaacaagttttaccaataaatacttctttatttattattaacataacatagaaaaatcttttggccgtacttttttcaactgggtcccttgc

SEQ ID NO: 20536 - DNA, 719 bp, Oryza sativa
cctgcacccctcgacggcggtttgcggcggcagcaaccggcggggagggaagagggaaaaggcgacgaggtcacgaggggccaatccccggcggtgagagcatctacgcggctacgggaatccgtccctagcgtcggattgggcggcgctacgccgagcgaggccggcgacgagcgggtgctatggagcacgggcggcgacggcggcgagcacatggcgagcggcggcaacggtcggggcggcgccgactagctacggggaggctacacatgctactaccgaaaactaagggggagagatggagcgaggaggaagaacggagggaggcactaccgtgcggacggggcgcagtgacgagaggccgacggcgcgggagtaatctctccggcctcgggccggggaagaggaaggagagggcgcgcccggagtccccttccgcgtccacgaacgcaccggttctcccggtgcttggtgatgaacggcggaggcgagacagagcacggaaggcggcggcaatggcgcggtggcggcgagcgaaacgggagggggaaatcgatgggagggcgccttggtttataggacgacgatgtcggtttggaaaccgaccttgggcggtcaaggcgcgagctggcgctcggcgctcgcggccaaaacggtgacagaggcggatgacgccggcggggaggggaaaaggaaaagacggagagaaaagggggctt

SEQ ID NO: 20537 - DNA, 706 bp, Oryza sativa
ttcgcccgccgaccgccggagctccgtcgccctcgtgatcccgaaccgcgccgccgtcttcctgcgcttcggtcgccgttgccgtcgccgccgtcgacccggggtgagccgaaggccgtcgcttcgcttccctcttctctcctctctctcgggcgccgctccgccgcgccgggtcgccggcggtgaccatcggggcgcgggtgcgccgcctcccgtcggccgtgccggcgaggccgccttcgggcgcgccccgcggctgccaggtggggcccggccgtcagccgcccgcgcccgcgggtgcggctgacgcgtgggacccacggcgccgaccgccgccaaccgcgtgctcccggtccaccgtggaccgagaggctgacgcgtgggccccgctcccgtggacccggtccgcgcgccctctctctcggctgacgcaataaatgagatttttaattaaaatttaaatgaagaaattcgcaaatatgcatttaaagagcatataaacttcaaatggccatatcttggccatttgaactcggaattggaccgttcaagtctctaatttttccttatgaagtcaagaacccatttttgtgctttatttctgctgttatatggagttatttagtgtttaagccttttactttccgttggtcgtgtagacgctgcagcttcggaagatccgctcttcgtggaagttgaagccgtc

SEQ ID NO: 20538 - DNA, 511 bp, Oryza sativa
cctgacaataggaaagactttgttatatattgtgatgcatcaaggcaaggattgggaggagtactaatgcaagaaggaaaggtcgtggcttatgcatcgcgacaactgcgaccacacgaggaaaactaccctacccatgacctggaactagcagctgtggttcatgcgctaaagatttggagacactatttgattggaaaccattgtgatatctacactgaccacaagagcctgaagtatatcttcacccagtcagatctcaacttaaggcaatggcggtggttagaattaatcaaggattatgatctagaggttcactatcacccaggcaaagcaaatgttgtggccgacgctttgagtcgaaagagctattgcaatcacctgagaatgaaagggatggcccctgagcttagggaggaaatagcctagctgaacctacatatagtacctcgtggacggataaacaccctggacattcaaccccttttgagaacccagatagaggaagccc

SEQ ID NO: 20539 - DNA, 1298 bp, Oryza sativa
ggggatgaccccgacaggtggggcccacctgtcggtggctcgggggaaaggagagaggaggagacggttggggggggacgatgacaggtggggcctcgggtcccacctgtcggagagagagggagggagaggccggctggggaggcaaagtagacttcggggaggagagaaccgagcggcgagctgggccgagggagagagagagcccgagagggggagggggaggaatttgggccgagcccgaaagcaaggaaggggaaaattattttcttttctttttattctaattggttaaatgaactttgtgctattaaatttacttcttgagctccgaaaattcacgggaaaatccggagagtattttagggcacaaagaatattgcaaaatattcccggccaatgatttttaagggaaaattttaattctcccattatttcacttgattaaattgattaactttttattcaatttctaggaaatgcatcattaaatgatttttattcccgaacgaaaatcggggcgttacaacctttaagctgatcaaacaaatcatcaattctgggcagcggatacttattcttgatagtcacatcatttagtgcacgatagtccacacacatcctctgggtatgatctttcttttccacaaaaataaccggagctccccatggagatgaactcggtctgatgtatcctttctgaagcaaatcgtctacttgcctcttgacttctgccaactcattggctgccattctataaggtctcttatggatcggagttgttcctggtaccaaatctattctgaactctatatcccttttaggcggcataccaggtaaatcgtctgggaacacatcaggatactcccgaactataggaatctcttccaaagttatttggttcagtcttgaccttaaagactcagaagacaatgcatgaacagttacaactcgaccaccattactggtgagagttacttttctgttagcacagtctatcacacctttatgtctggctaaccagtccatccctaggatgacatcaaggtctttggattctaacaggataagattggccagaaacggtactcctttaatttctattctgacagaggggctacgttgcaaagagagtgcttgattacttggggtactaaccatcataggacgtctaagatcttctacttccatcccatgatttcccgcaaaactcatagataagaatgaatgtgtagcaccagaatcgaaaagcactgttgcaggaactgagttaacaagaaacgtacccataatcacat

SEQ ID NO: 20540 - DNA, 2311 bp, Oryza sativa
ataaaaccttttcaactttgcttatttcttttcaattattatttgtgctctgaaaattccactaaaatttgagggctccttttagaccaaggagaatttaacaaaaattctccgggccacatttgaatttttcttgtacgtattttagggtttgccaatttcttttcgaattttaattaattctattatttcttttagagaatgatttttatttcgggatgaatttatcaggacgtgacagtcaccaccgtcctcgtccgccccttcgccgtcgttgttgtccgccggagcaccgtcgccgtcgtcaagccgaagagcgccgccgcttcttcctcatcgccgtcgtcgtccgttgttcttccgccgccgttttggtcaccggtgagttcgccgcgtcgtcctctacgtgctggtgccctccgttcgtgctgaagcaccaccgttcgccgtcgagcgtgtgagcccgagccgccgccggtaggtgacgtcatcgccgacgtcatcggggccgttcgctgtgagccggtcgtgcaccaatcgatctcggccgtccgttttggatggattgatctcggccgtccgttcttgtgaaccgccgccgtgcgcccggtccaccgcaaaccctagccgctgacgcaataaatctccttttccttttcaaaaataattcattgttgcgtcataattcaattaaaatccatataagtgttttaatccgatttaatcttcaaaaattcataactaattcatcttagctcggatttagttggttcaagtctctaaatttttctaaaattgagatctacatgttaaaaatatccatactgttcatgtttgtttatgtgctgttttggtgtttttgctcttttctgtttagactccgacgtttccggagagtccgttttcgcaggagaagaatttgaagagttccaaggccagcaaggcaagtcacacagatcccaaacaaccctttgagcatgttgatcctatttaaagctattgtttctattcaactattgcatctattttcgaatgtcattgggtggaattaacctattctttgttatggcccttttgtacttgattactttattccttgataccttgggtgattataattggactaattgagctttatatatattggttcagctagatattagatataattgcttagtcatgcttagaaacattagcacactattgggataacttatgactcactattatttaatgatggcttaatgatagttcacgatggtcaatcgtgattggttaattaattacttgccaactaaaacttgataatggtgggttgtgggcacatggttttgagagttgtgctcatgacaattaagtaccggttcacgagtttcggttgtgaaacattaatcgtgccaaccacaagccagcgtgggcaacggctttaccttttgtatagcatggtttattgcgggacaccagactgagaagtgacggagataagcccacgggggtcgctggggagtccatgccttgtttataagggggtgattatgatccaggaatggtgcgctgtggtggattgtgttatgcaaggggtattgtcatagctcctttccgaggtaccgtggtggtattgcgacacatggtgacatgatgtggggctgtgtcttgtgggtacagtggtacacctctaatcagagtaaaactattcgaatagccgtgcccgcggttatgggcgagtcgaacaatgtttttcgtgattagtctcacacctctcatcataattatggatgctataactggtaataatttgcttagctcctggtttggaatggataattcctggtttggagattagatctgtacagccgggtatggttgttcaggatggtcgggcttgtgcagcatgggtgtgctgttcagtgttgattaaaatttctgattaactactctactgttttatttcacttaaatatttggctaaacgttgcttttgcaaatgagcctatattatgccattctttggtatccttgtgcacttgcatatttgctgtgtggcttgttgagtatgtcatatgctcattcttgcaataatcaatcaacctcagttgaagaaaaaggatccagaaggagaagacgtttggcttataccccagttgagctgcctgtgggagtggagccggagcttcgctagattttattttccgctgcagttttcttcttggtgaggacttaatgcctcttaagtaagtatttatcgttttagtaaatttgatgaatctgtatattaaattgtcaatttgtgtacctcgactgattggggtgc

SEQ ID NO: 20541 - DNA, 554 bp, Oryza sativa
tttaatacacaaaatagtctggaaatttgggctaaatttctgggcgtgacaaaggtgccaccgttttctccaggatagatcttcgatcagggtatcaccagttgagaatcaaagaggaagatatacctaagacagcttttaccactaggtatggattgttcgaatgtactgttatgtcttttggacttaccaatgcctccgctttcttcatgaacttgatgaataaggtgtttatggaatacctagacaagttcgtggtggtctttattgatgacattcttatctactcccgaaccaaagaagagcatgaagaacatcttcgccttgcactagagaagctacgagagcatcaattttatgccaagtttagcaagtgtgaattttggttgtctgaagtaaagttccttggtcacatcatctcagcaggaggagttgccgttgatcctagtaatgtggaatccgtaaccaattggaaacaaccaaagacagtttcagagattctcagtttcctaggcttcacaggatattatccgacggttatagataattttttc

SEQ ID NO: 20542 - DNA, 4666 bp, Oryza sativa
tgtcctaacaaattaattaacaaatagtgtatatgttttgtaggtgctcgagcatgcattgctggaggattcttttgaggcaaatgtccgtgactacaccaaattgatccacatatatggcaaacaaaagctattgcagaaagctgaggatgcattccatgccatgaaaagcagaggtttgccttgcgatcaagttatgttgactgcactgatggacatgtacagtaaagccggagatctcactcgtgcaaaagaaattttcaacgagatcggattgcttggcctaccgatggataagcgtgtatacggttcaatgatcatggcttacatcagggctgacatgttagacaaagcagaagacatgatcagtgaaatgggggatcagcagattgttgcaggaaaggaagtttacaaggcattgctgagagcctattcatacaaaggcgattcagaaggggcacagcgagttttcgatgccatacaattcgcagggatagtacctgacacaaagctttgcgcacttctggtgaatgcttactgcctcgcggatcgaatcaacgaagcgatgatagtaacacggaatatgagaagcgcgagaatcacaccgtgcaacaaatgcattgctttgatattgggggcttatgagaaggtgaacaggctagaaggagcactggcatttttgacagagctcgaggagaacggcgttattattggccaagaaccttctcagctgcttgcaggatggctcagaagacttggtgttgttcaagaagtcgaacaggtactgaaggacctcgctgtagacaggaagaacacccttgaagtagacaggaagaagaacctcgcatcagacaggaagatcaagaggaggaggagcaagagcaaacgcagttttgcatcatctctgcaacgcaagtgattagctagctgcaacacaaacctgcaacattcttgactggcaacaaggacatgtgctgccccatgagtcagattacaatgcaaacttgtatacatgtttgggatttcacaggcgatactacgataagatggtaattaagctatctgaaaagaaaaggctccatccaaggtgatatgcatcacatgtaactcttagaggaacccctaggccctaactagaattttgatacccagaacagcagcaatgttacaaggaagctctaaccagagcagcaatgttatccttgacacttaagttgatcatgactcattatcaacaatgttttggactttttcttctttctcttctttccttcagtggctgtcctaggctcaacatcttctgaagcctccggcttcttctttttcttcttcttgggagtttcatcttgttcgagattgccattgactgccatctcctgatcctgtggctcctctagcttgtgcttctttttcttcttattctcattttctggatcagtctcttctgcagcaaccttggcaggcttatcaaggtccatttcttcaccatcagcttcagctttagacttctttttcttatttttcttagcagatgtgtcgttcttctctttttctgaaagaatttttttggccagcgtgtaaattaaaaattaatatgcttacatgaaatacaagttgtaccaatctgacagatatgaatgaacaaagagcccttaccaccaccatcctctgagacggcatttgtcatatcattaatagcagctttcatcacatcaaggttcttacgcggtgcaatacccttgtcatagaagtctagtctctcctcaacttgttcgcgcagcttctgaccgaaaactgaggtattcaactctggaatccacaatcaaatgagaaaaacatagatcagataataaccatgtgtaaagcatgctaacaaagttctcaactaacctgaataacagtcgatgcgtgaggcaatggaacatttatttgccaggtatcgagctattctgcccttgttcctagttgacgcacggccaataaaagatgagtggaatatgaggccatacttgggtgtgttaccacgagttttcagagctctgcagttaaatggagagagcaatcgtaagatttcacagatcataaaggtaaaaagatttgaaatatttcactttaaaagactttgaaaggaactgacaataaccaatgagggattgaaagaagataagaagatcataagtattaagtacctgaaaagtgccttttcagcgccaagaatttgaagagtggaagcagcgcacttcgcaagatttgaaagactgccagcatgagagattaaccgagctccaagcctccaacaatttcaccaatcaatgatgtcagatttggtgcaatgtcattcatctttgttactagatactcataaagattttttctgtattcagatagattcatgaccctttgagcgaactgttggacattgatcaaatcaactggtgaaagatcctggcctgaaaacaccatggagaacataagtgaactgcaaagaagccactactgcgactattagggacatactcaattatggagcaaattgtattatagttacccatggatgcctttgctgcttcaacaatttcttttgccttgtcctcatctccaattatatctgctaaagctgggatgtctttttctgctaaatcagatttgttcaccacaaactttgcaatcttagaataaacgtagttatcattcacgattttgaccagctcaggaaaatgccaagaataccattccctgcattgtggttaagcaccaatttattacatcgataccaatatcgcacagagtattttaaacgtattgcgtcaacagaattggtaaaaataagtttgttaccacgcccatcacaagcataacaaaacatgagataatgccatgtggacggtttgatatctcgatggcatatagctttacattttttttttttgactaactcaccggggggggagagattccccacctgaatttatcattgcataaaagagaggaaagaagaggcttgacaaagaaccaaattgtaatcacaactaatacagatatacatgagagtgttccagtcataaacgtcgcatgcacttgcagcatgttataggaatcctccacatggtataccactacaccagaagtacccatacttgagaatttaacatttagatacatggaaaaatattaaattgcattagaactcactcgaacattcagcagagatacaaagaggatgaatgtgatcagaggaatcgagcaaattcaatttaaccataaaggataaatagagaggccatgctggtggtccagtctttctcagctggaccatgtgaatgtaaagatggtataactgcatgcccacggcatagcatttctaggagtaagataccaaaatataaccaaagacaatctgggataccatggagcaaatgaaatcaagaacaaacaactagaatattttcaggacacatcagcatcaaaacataattgaggtgattaaattccagtcacaacatctaaaaatctaaataaaaatcactaaacaatgaacatgtaaattaagcaaaagatggcaacaaacctcactctcatggagaaggaattgatatccttatcaagtgtatccaacaaaaaaatcgcttgaattaccatgttatccacacggttcacattgaacttaacctttgccctgctatagctatgccccaggcctagctgagccttttccaagtcagttggctgcaatcgaaaacaaaggagcaagtaaacaaacaataacaggaaaaaaaccattttatgcaaggaacatatgaaagcatcaaagcattgcagtccaacaaacatggtagcaataacagagggttataatgcagaacctctctgtatggagttccaggcaaatcacttcatagtctagtaaagttgcattggataacaaagatgctatgtcaagcagcaagtagtaaaatcctatagtcagtaactctacagaccaaattcacgcaaaataaaatttaagctaggagcattagaatttgtaatttgatcaggacttcaagttttccgagtgcagtataagcatcaaaacatcgatcagcgacacaatactattgcagtaactgagattgcaccagtgcagaactgcagaaggcatagtgctaccatccacccccacatggccacatgcccctattcagatcagttacaatacgatgtcatcaaacatacagtagaaacaagcgcaaatgtgaaatcaacaaccttgagttgatcaatgaaatgatcgaagtgtagccgcactccgcggagcagttcctggacgaactcattgcactggcaggggatcccggtggcctcggagatatgggacccgaccttgggctccatgaccccgacgctgtacttagccttcttcccctccttcaccttgggcaaattgagctccaggaagctcctcagctcatcagtcataatccctgcacacgaccactcaaccatcgcatcacctatcaatcattcaggagagcgagcaggggatcggcggaggcgagaaggcgccgtaccttcggagatggcgttgcactggttgagcgcgtcgacggcggaggagaaggggagaagccggcgagcttgacggccttgctgacccgctggagctcgagcacggaggcgcgggcgg

SEQ ID NO: 20543 - DNA, 8333 bp, Oryza sativa
agtaaaattttgggtattcaactaattttattagatatatgtgtttttcttttattactaaaagctctttattttggccaaaatccattgctatttgggctgttaaaatctgaaccgttctaatacatttttacagttttggtatttgttatttgtcatacgtctctgaggtaataatgtcagtaaggacaaaggaagcaatatgcatagacaatatcgttaatttactccatcgatttgagtgaattttactttaagccaccttttgtcgtataagtttcacttttgaacacccttaatccaagctttttattttggactagctaacttcacgtttgttgcattttaaatcacgtcaattctcttatatggacatgtttattctctactatgacaaatgtatggcacgcttgtaggcacataattttgcaagcgtaacagagccaaacatgcttgaggttgttgatgtgctaaagaagcggtcagaggtacttgtaggggttaatatgtgtttgtgcgtgtgtttatagtggtgagtgtacagtttatatgagtgcttgcctctatattgtgcttcgcaagcttgagctcgttgacgaccgtactcctagaaaggagcttgtgctcgttgcatccacgagggtggcggcgtttggatgaggcttcgcccgtctctcttcgccaaatctggaagtgttgacaaagatgagaaggtctacactgtggtgatgtagtcgaggtaggtttgtcactgtcagactcgggtgctgaggcgatagacacgttgctaaagctccgatgccaactcacacgcactagctgtctgactcagcgagaaactcgcagcgacccaaactatggggcttgtagcatgggaggaatcacaacgataagacatgactctagatgaaactaggtgatatgtctcttgctgtgaaatttacggatgaataagtgctagtaaaacattatagaaatgatgatttaaaatgttgtgaaaattatggaggaagatgattcgacgtaattgtatgttgaactttacaatattatattttagatgacgtgttatgtttgtatgatatttaaaatgctctagaatagtaattgttaggtggagctccgacgaacgtcgatggagaaaatgcacctatgaaaaaaaaaacctcgtccacacgcaaagagacacacaataaaactgcttttgataactgagggaactgtgtataactggttccggggttgagtgatggtaattaaaccgagggagaccaaaataaacttttcacctttattttatggactttttttttatgctacaccgcctgaaggcctcacagactcacagttttaccgggccgtatccgagcccatcgtttagcttcgattcgaccattccccaaatcccaattaactgaaaaaaaaaaaagaaaaagaaaaaagtctcctcccagtagtgagtccaaggagagggtattcgaggggttcagtcgaccggcggcgagcatggcggcggcggcggcggcggcgggtctggaggaggccctcaggcccttccacgatagggcctccgatgccgaggttcgcgctctcgtatccttgagttcctgaccgtcgtctatccgcgcttcgtttcgctgtggtcagagttgttattaggttattaagttgttaaattcgttcgttgttgctaagagcggaagtaaatggaactagtaagaatttttacttttccagaaactagaacatagatggtcagttcgtatggtgggcttgatttggagcaaagtcaaatcggttgagcgatgaactagtagctagtgctagcatattttagattccctttgctcttatattatccttttatgacttggtggtgttacctgatttcagtggataatccatatgatcaccaattgaaagttttggcatgaaagaacctgaggaaacttcgaaaaaacgtacaatttttgcgttatctagagtatggtggtaatgatgttttagggcgaggtctgcgtgatatgtactacataaagacaagttctcacctccggtctgctttaatagagacaacctaattccatatgttaataaattctaatgtatgcctcagacttacaaatcgcgatccttttcagtataggactagctttcccccatgccacggcaagtgcctaaattagattgagaatttggcttgttgctgtattacctaatacctaccaacgtctactggataactcagtggttttagactgatagttgtcctgggaggtatgccgcatggctatgtttctttattgtcagtcagcatgaattgatgtgtttgaccagccacgcatcgaaagcaatggcattctcatctggcttggttgctgtggttacacgaatgcgaaataggtacaggtggtcttctcaatgttttgttcccatatcttacgctgtttctttcatcttgtagacacgtttagcaaagctggaagccttgctgctgaacaaaggtaagttaaatatgggtgtagcatttcacaggtgcttgttggtaagagaaatgcctcattgttcgtttacatggttgatttatcagatggcctgacgagtggttcagagacaaattcatcagccgtgaaagatcttcagtcaaagcttgatgcagttaacacagaatgtcttgctgaaaaggaaaaggtattcatctagcttgaaaatgtcaccaattgtcaccatcatacagctgtttgatatataaccatatctatgaacgatctctgtagaacaagaagctaatcatagagaacgagaagctccagtaccgtatcacccatctcatccgcgcattgaaagaggcagattcaagatagagagccctaccaagctggacctaaagctaaatttgtttaaattgaagcactgtgtatgatcttgtggttttgtggactgcgtgttcttagcaccatccatgaatttagccaaaactattctagcgatcttgatgggtatggttaaagcaaggtattgatttcgaatttttgaaacataattaaactgcttgtatttgactattacacaaaattgggtgcgactccctgtcatctcccatttcgcaagatgatttcagtgctgaaaagtgaaaaaaaattgctgcaattcaactcaatgtacagttgatatgacatgaaatcttttggagaactcaagagtaatgtgattaagcaaagatattttgatcttttttgatgaaggtgggtgtgtgattgctccgacaactttcatgccagaagacaaaaaaggtcatcactttacttgtaactcacattgcctctcacattcatgcaccattgcatcctttttttcaccaaggaaaaatatcctcctaccacttgttcagactaaaagcatcctccaatcatgccatccatttgcattagtggttgatactgctaattttactgttctcaatgctcctcaatttcccaaactactcatgtaaccataaccatccactcgatccctgggaaaccagcattagcctcgtgacaagggaaacatagaactaatgaacacaatcccatccgcgtgcaagcaggttaatcacacaaaatggcaccaaattcgacagcgaaaggagctgggtaaggggagcctcactcgtttccttgttagtttatcatccacggtttaaaaacctttttttttaagaaacactgcaaacacagacactcaaaaatgctcacacattcacctttatgaacacatatatacatcctaaacctgtaaaactgtgaacaccttcaaaaaaaaaattggaccaacgtatcttgagattgactaaatcatcacggacgtctcgctattgacgggtaacgcctaccactgaagggataattaggtttaaatgcaagcatccatgtcaaatttaaaacttaaacccgggttaaaagttttttctcacatagtctatttatcagcatcggcttgaaaattgttaataagtcagttttgaaagtttgcaccacaatcatcttagcttgtcatccaaagtcaaattttaaaatgtgaaactcaattttagagtttaatttgtatttttttccatggcagtcactttcccagttccggtttttgaattgctgctattaacgcagttatgaaagtttgcaccataatcatcttggattttagaacttgcagcctcgtatttttatttatgcttatgcttatcaactaaaatttaaatttttcaaccttaaatttagagttgattttgagggttttttcatcgtagcttattttttagctttgcttctaaaccgttaagaacacacatataaaagttttatttataaattattttttatttataaatatactgtttcgattttttttcttcaatatgacaaacgtttttttttgagaggacaatatgacaaacattgaggctgttggtaaacactggaatttcccctgtgattacatacgtgtgctcgtaatgtttcttatcacggactgttgaatcggatggggagagaaaagtttagaagaaaaacaaaaaaaacggacatggggttagctagcgagctcatcgcaccttccagaagcgaacgtggcaaccttccctgggccccacccctcccctcccaccgggccatgtctcatcgccaccctacccacactcactgacgtccggccccacgcggctgtccccaccgcccccgccgtcaccgacgcgtgggcccggggtggctgtccccacatgtcatcgactccgtagtacggcctccctcccgtgcacgcaaggcacccatcccccgctttaaattgcctcgccccactgaccgccgccgcttgagctgacctgaccccgagccgagccgtacaccaccggaggaggaggaggaagccggcgaggtgacgctgcgagatcgggaggtagggttcggggggaggttttgggtttggtggatggtcacggcggcggcggagttcgtcgatgggcaggtcgttcagggactcgctgaaggtgctcgaggccgacatccagcacgccaactcgctgtgagttcagctcgcccgtttcatcttcctcttcctcctcctgcttgtgttcttcctgtgtccagtgctgagggtagaggctgctgctcctgctgtgagatagtattgatgtgtgctttctgaaattcgttgagcttgttgtgtgttgatttgggggctggcttggatgggggtacattaggattactctatggggacgttgctggcggcgcaaatgtgatctcactggtggtgatgtttgatgttcactgctcagtatggtcagtctagttggagactgtttagaaggtatcaagctgacattttcttagtcacctcgatttgtggttagacattttaataggcatatatgttaggacttgcgataccttggatgtgttccctgtttatattgcttcagtagtactgaaagtttctgctggtaatggcctttcatggctgcagtgacacctgtcaccagatatactgcttaagtggccaaagctatctcctttggccttgcaggtctgtttgtactactttggttttgtcatcatgaggttttcttttttgttgttgtcggtgtgctatgcagttgtgctgctggttcatcacaattcgctatcatcgtgtgttctgaaagccgtatttggaaattgttgtccacaacatgcgctacacactaagagctaatatcatttggcccaactaactactgatcatgaattttattatgttgctgttacatcttttggttggagctgtgtaaaaaaaatatggctctcatgttactatgttggccatggtaatttagtatttcacttgacccctatagagttgttgcttactgtcctatgtggagataaagaagcaatatattaatgtatttttttatgaaataactaagtgacaggcagagagcatattttacattcctgacaactactatgtttggtatgatagacctgttttgatgtttttacaatgtgtcaagagacttgttgaaacttgagacattcatcagtctatgaaccagggtccatgttggttaatgattgagatgtccagttagtaaatggtgatttctatgatccatgttgctgttacatcttttggttggagctgcatatacaaaatatgactctatggagttgttttctattcattgtggagataatgtgcatgtttaatttgttttttttttcagaaataaccaagtgacaggttgaaaacaagtgttttacattcctgacaactaatttatttgctttaatagatctattccaaggtttttacaatgtatcacagatgagttgaaatattgagtctatgtaccaggtgccttaattgtttctgaaatttcaactttcaataaacatgtgcacggagtagccatgagagtacatttatttatttagttttcaaattttatatgtagagaatgatgacaaatggtttgttgatttgagtacacctattgcaaactgttagcataggtctgcaaccatatttttagccattcacgtataacatcgaccatattgttaatacccccatactgtgatacaagtccttttattgaagattcagaagtcctaccgtaccatgtatatcaaacttgcagaaagtcacctgagtctcatgagacattcagctctactccaaacatcaaactttgaatagttatttttggataaagctctacagccgtctagctactgagctgcctaagatcattgttttacaatagttagactaaattattttgtttgtaaaaatgcagtgctgctgaatttagaagggaatatgatggcgcctgtcttcagatgagaatgtcatactgtccagctgcacacttcttcctttttcttgtgcagtggacagattgcaaccttgctggtgcacttgggctgttgaggattctcatttataaggttgagaacagtcctgtttagccaagttcctttctaatgctctttctgctttattaggagccatggttaatcttaactatacaggtttatgctgatgggactaccaccatgtctgctcatgaaaggaaagcaagcattagggaattctatggtatagtgcgtactttggatatcctattgttttacacatatttcttgaactgttctttttttcattagtgttggggttttttctgcagctgtcatatttccttctttgatgcaactacatgaagggatcaatgaagtggaagacaagaaacaaaaggcaatctgtatagaaagatatagaagacgagatgaagatcagaaaatggtgatttcagagattgatgataacatcgaggaggaatgtggcatatgtatggagataaatggcaaagtagttcttccaacttgtagccatgctatgtgcattaaatgctaccgtgactggtacacatcttcactcttctctctgtggcgtttatattgtataagggggttcagttcagaaaatatcttttatgtttctctagctgtatagcaatagcacttctgcatgatgaaaattacatgttggatcttcagtttaattaattaaaacaatgagactgttgctaaccatcatggtgtgccagtaatatttcgattccttcaatttattagaatcaaatgaaagaattaccctgttcctatgtgcttactaataaaaaattggacccttttgtgcttccttgaactctctgcggcttgcgatttaaatcattaattctgttgagcctggacaagtgaaagacttattcaaagaaagctcaagagtttgatgtcccatgcctttctgatggagaacctaccactgcttcttctaatcctgaaacagggcttggcctgttgacttagtcattgaaggtcctccaaccttaccccacccacggatgatattctaaaagatagagggtcacagatgattaaaaaatagatacaaagacatttaaagtaaaggggtgtatatattattcatatcctctatctacggaaaaaataaacagagttcgtttttgggttccctgaaggctgaaggtcccagtggattggtcttagcttgctagctactgtactactagttcatgttctggaaacttgctggtggtagttgttaattggagcctttgaggctatgtggttaacaatctctaatggaatggagcaacctcatttcagttcttattaaatggctggttgctttcagtgacatatttatctttcaggtttattaatttctggttcaaatgttcaaaattttggatctttgatacaggaagtaaagaatagtgattgaaa

SEQ ID NO: 20544 - DNA, 1389 bp, Oryza sativa
tagttctcaataatcctaacatgaactatctgcaaatatggcacctttctaactcttactacctccgtcccataaaaattgaatttctatggaattaagaacatattaggaggatagacaaatgactataataaccctatttaatgaacgtagtacatgcataaattccatatataaatgtgattaaaaggaatgttgagataataggttagagatgggatggaaggaaagaagattacaaggaaatgtaatcagtttaattggtcccacatcagtagaaatacaatttttatgagataaaggttcaaaggtaaaaattcaatttttatggtacggaggaagtatactttatcatgtattcttcattgcaggagatcaagatcccagtcttgtccattctgccgcgatagtctcaagagagtgaactcggccgacctatggatatatacagataacagggacatagtggacatagcgacggtccgaaaggaaaatcttaggcggctcttcatgtacatagacaagttgcccacggtcatccctgaaactgtttttgacgtttacgattcccacgtaaaatgaccttgcactcatgcacaaattctttactggtgtgttactactagtgctgtagaaattgtggagcccttggtgttcatgctgccccgcttgtagaagctgtaagcagctaagctcgccgaggaggctcgctatacaaaggtatatatgtaaattgtcttggctgtatggtgtgtacctttgtgaggagttaggagaatctgatgccagtcagtctgtaagtaaggaagaaccagcaaccattgactttgtttcttttaattgtaagcatttcactttcacccatgaaacagtgaagaatgccatcctgacagcttgattgctcctgtacgatgctgttgctcgttgtgaatggggagttttcagttcctggaagaagaatcaagaaatggagggccactgatttgatcgtgcacagaagtgagacaagagtctgaactggtacagtatccccaataataatttcctgatctgctgcacgtgcatcctctatctctgtaatgtcttgcacgttctgaaaatggagaaactccactgcatttggagctctgcagttggatacttctgagcctgtttggcacaactttaccttttttgtaactggagtccagccaaacagtgtaaatagtttcagccccatctggagttaggtgaagcattctcacaaaatgaactagagaggtggagctgggtttatgctgctacacaactcaactctagatttaacccctggagcttaatttaaaagttggagcatgtcctctgtcaggatgaaaactcatcaagtttatcttcgttcttgtccaaata

SEQ ID NO: 20545 - DNA, 19087 bp, Oryza sativa
taaatgtgttatggtctcagcggtgtattcacgggtacctaaatatagggcatatgtgtcttccatataatctgaaaagaagctacatgctagctcatctcgcttgctgttaaattgtgtttacagatattattatgtacacgcagctgagcttttaataaaaatttagtgagaccaggatttgtcgttggtttttatcttcatgagtatgtgttacagtatatatatatgtggatcagtggatgtgtgagggtagtagtgtttgtgtgtacgtgtcttctgtgtaatcgagaaagaaaagatatacgctagttcagtgcacctgctgattacacttagctgtaccgcagattcccttgttcttggacgactttaaaagcctcgaagatctttcaggccacgagctgttgatacgtttgctcaagattctttcgtgtataacaaggtcagatgtggtatagtttagtccatgtccgagttgtgttcttggcgttaagtctacttaggccctgtttagatgggactaaacactacgccggaccaggtcatctctgacgggcccaaaccctcacctttgacgggtttggtcttggtcagtgattagtggtcactgatgacaaaatcacctgtgacggatgaaacacccgtcacagataacccatctctgaccggtatataagtcatctctgacgggttaaaacttgtcacccgtcacagatgagtcatcagtgtcgtgtagtaaacacctgtccgtcgtagatgactcatctctgacgggttgtaacttacgacccgtcactgatgacaaagcaagaaatacaatttttgaattttaaacgcaacaaaaaacctcaaaaaaatattttgaattttactagccatcctatacatggttacacatcactacctacaaattcacaatttttcacgcaatataacttgtatgctacaagtgagattcaaactcaagacctcaacctccatatagagctcccttaccaactcacctactcaacacatattgactactaacccaatgttattattttgtctatgcttatctgaatcatttaacatatatttaacaccctaaatgacttcaaatgaaaatattatcaactaaatagttatagatctcatcgtgttttataacttttacatagaaaatatcttcatccgatgttgtttgaagaattcaaaatttcatttttcaaaatatatctcactttataacatgtaaattttgtgaaatgaaaatattttcaattataatgttgtagatctgattgagttctatgactttgatacggggcatgtatccatccatgtcatttgaaaaaaaactcaaaattttgtttttaaaagtagatctgatcacttgtaatgtatgttcggggatgtaaacgatctctaatagaaatgttgttagttataaagttgtggatatcattgagagctacaacttttatataggacatgtttcaatccgaggttttttgcaaaatttaaaaatttgaattttcactcatcactgacgggtcaaaatttaaaaagcccgtcaaaggtattgctcatacctttgacgggcttctattcaacggcccgtcactggtatccgctcacctgtgacgggccagaaatgaaagccatcacaggtggcggcccatcacctctgacggcttctaatgtatcggcccgtcacaggtgaggggataccagtgacgggttggaagcaaaactcgtcactggtatacctctgacgggttttcctttcggcccgtcacaggtgaggggatacctgtgacggtccgcggccggatggctcaccggtgacgttatcccgtctgacccgtcagaggtaatggtcactagtgaccaaatcgtttgcccgtcacaggtatcccgtcagaggtgtgaggatctggcgtagtgaaaacttttaagtccctatcacatcggatgtttaaaaattaattataaatattaaacgtagactattaataaaacccatccataatcttggactaatttgcgagacgaatctaatgagcctaattaatccatgattagcctatgtgatgctacagtaaacattctctaattatagattaattaggcttaaaaaatttgtctcgtgaattagcttttatttatgtaattagttttgtaagtagtctatatttaatactctaaattagtgtctaaagacagggactaaagttaagtccctagatctaaacaccaccttaacctgactagcactgaacaagacaatgcgttttgttctgtcagggtttgatttttagtgaaaactctggtccccagatcgaacagacaaattaagctgttagattagtcttgaaaattgtagatgacaaccatgacaaatctgtggagatatttcatgagttatttactaggacaaagtgtgctatatatcagcaataatgcaacctaagcttgatcagatcatctgatgagtggatttgtctgtctgcatttcctttcttgttttcgtttactcagtggaagctggaagctggtcaatgatagattattagtatgctagctgctgctgctatactatcagtactggcaaattacttacacctggtcaagaacagattcttagtacgctacctggaactatcagatttgagaataaaataacttctgaatttattaagcccatcatatgatcatatccagatgcagattttatgcactatttccagattggcaccaacaacatgctttaaagtatgtatcatgtcagacgtgattaggcatattaattatccagattttgtttccattcgtgacagatacacattggcaccattttcaccacaaatcttcatcagatatttcctggcacatgatccgatgatgagagtggagaggtatcaataaccacgcgttatcgtcagcataagcaaatcaatcaagtgttagattttcgcggcgaaattaaagtcacagatgtaatctgatggctatctaatcaccaactgttccttcaacaattgcgttgtgaccttgttaatatagcgttggaagattgcacaattaagctagtgacgacaaaaaagcttgggagatgcgtgcacgcgaccagcgagtggatctgtggatgtcaaacttttctgtcgtctaaaagtccccttttgcgtgattgtcaaacagtaaatcttctgttcttactttacccttttccttatttttctcaataacaacagagatgtacttgcacaggatatatcttaacggagtagggcatgttaggttactgtagtagacgttactcctatatgttaggatagagagaattgttaaatcttttctagtttcattgtggtttgtgccgcgctgcacacttgcaccggtgtgatcaacttgatttagatggaggctaactttgccacacaaatgtgactaacaattttttgaccataactatagtaaacattggttaaaaaataagagtatgaggtatagaccaatgtattaataaagtatggatttgctcaacaccatgccactcaaccaaatactagcataagaaaatgtggcaaacctaagatttagtgtggcgaactcgccaaccaaacaaccccaacattttccggtatctaaggaggatggactgagcttctactcactactagaattaatccctagaaccaaaaacccaagggaatggcgcaaaaactctagagtgaaccctagggaatgccctctagggaagcctagtcgatttggatagcaactagaacaaagagggattttgggggagattggagaacgaaacaacaacaaatttggggaggagaaacccttgtgctgttgtttaggggagttgggggggggggggggagaagatatttttgtctactatattgcccttcccgcaaaaaaaaatcgttgctgggagttttgcctccaaaattttatatgggatctactttggttgtcactgtggcgccaagaatttcactatagagcttatgtggtataagttctctaggttgcatattgttactctagagaacataaatcttccctttagttctccatagtcaccctagggattcttattatcccttgagttctaatttagactctagggaagttattgaattctagtagtgagtggcagattggtagctcggagattacagttcgcgatggacaaccaattcaataaacatgtttaggttgctttgagcagagaaatctaattagatttttttttacattttggcgtggtttatagaaaaccgaagcttttaaaaactaagttgatgagaatatggagaagctctagttccttgcgtcaatgaaagtataaccaccattttcacacttttccatatttaaaatattataaccactgaatcttagaatcacgacatctttttcagataatccaccaaattattacagtagattatttgctccacgtctttaaaactacgttttctgaaaaatatttcctccactataagctacttgtttgattatttattaggtttgtttatcaaagatatttattttttttctatattttagcagactagcaaaagtgcccgtgcgttgcaccgggtgattacagagtgtgtatattgaccaaaagtgttgtttggtttagcaaaagtgcccgtgcgttgcaccgggaagtttacagatcagaaaaatatgcaattaattaaaatacaaattcgctgaaatatttggtatttttaagtaggtatgtgtataattaaataaatttacaagtaaaattcttcattctccatggttaaataaaatgacatggttaaatttaattttattaaattctccataattagttacgctctttggaattttattggaattttcagagcttaattgctaattttattaatacaaacatcatttaacaattatttaattggaaaaagaaagaaaatacttttttataggtttgcttcgaaataaacatactcaatagaactataattgtaatgcttctgaaaaaatgagcactaaaaatgtacttattctctttttttcggctcgagggaccaacaatagacttatttccgacctatgccggtcggcccacggccttttgcgcatgagcgggcgcacttttcctcccccaggccgcaacctgggcttgggtcggaaaagaggcctcactctcgatccctcttgggccgatttcggcccggacgacaccggccgtccgatctctagggttttgatcggacggccgagcgtcaatagcggggaaacaaaacccactccctctcagccgcggaaccctagcccatttccctccctcccatctcacttcgccgccctctcctccgcgcccccgagcggcggcggcgacgacggcgcccctcccccaccaccgatggcggcggcggcggcacccccaccacccacggcagcgtcggcggcatcctcccccaccaccggtggcggatctagcgggaggggaggtgccccgcgagcggcggcgacggcgacggcgcccctcctcccgcgagcggcggcggcagcaccctcccccaccaccggcggcggatctagcgggtggggaggcgccccgcgagcggcggcgacggcgcccctcctccctcgagcggcggcggcggtggagtcctcccccaccaccgacggtggcggcggcgctctcccccaccaccggagagtgccctctgccgccgccgccggcggatctagcgggaggggaggcggcggcggcggtgctctcccctccaccggatccacagcgacagcgacggcggcggttcggcaacgacggcgacggcaacggcggcagcggcggcgacccccttcgatctaattttttgtttttatttggatatatgtgtgctggcggcgacccccttggatctaattttttgtttttttgcaaagtgctataaggctgcatgtgattctttgttatgtgctatgatttttttatatgtatgtaaatatgcacttgttctcctagtgatgctaaccgaataggacttggtataattcaaaccaagtcctattcgcccaaacagaaacaaagtcctaatcagctcaaacgaaaacagatgggagtttgtttcctatttttgtggaatcggacatattcttttaccgcgttgatgaatcggattcgttccggttttttttcacccggtttttttgacggacgatggaagcacctcttattttttaagtagtagtagagtagatataatccgtgtcaataaggggggtgtttggataaagggactaaactttggtacctgtcacatcggatatttggacactaatttagggtattaaacgtagactacttagaacactaattacataaataagagctaattcgtgtgataaattttttaagcctaattaatccataattagcacatgtttactgtagcatcacataggctaatcatggattaagtatgcttaataaattcgtctcgcgaattagtccaggattatgaaatatgttttatcaatagtctacgtttaatacttataattagtgttaaacatccgatgtgacgggtacttaaaaaaatttaaccccatccaaacattgcctaattcgagtgatgacttcactaacagtttgtcatcccaacagcacgaatctcaaagcaaagctggatatatatagcgcgcccatcacgcgcactcttccgccgaaccgagcaaacgcacaaaccaaaggcggaagctaagcaagcaagcagcagcagccgcagccatggaggcggagaaggagatgtcgatgagggagtggtgcgtcgcgctccccaaggtggagctccacgcccacctcaatggctccgtccgcgactccaccctcctgtcagtaccgccactccctctcctcccttcctcgctgccttcgcctgcctccctccccagtttttagatttcttgaatttgatagctagtcacttggttcttgatctgattctagaataggtcctcatggcagtatatttcttccaaattttagcccctatgcatcatttcatctgatccaagatcgtttggattaatggatttggtcgaacgattcttgatttctaggaggggagtttagcattttttttcttgagatggggaattcagcacttaaagacctaattgtgcacgcgaaattcgaactttggtaggagactaggagtgtgccattgtgaaatttgggttttgacaaagtgtatattcattcatacatggtcaggaagcatgaagaacaaatacagcagtctgcactctgcagacatcgggatcctggcactataaatttataatattggaagtgctcatgtgggacagaatctttgcctaccttttacatttttataatgctacttttgattaacataccacaaatgacttggcctccacgaaaatgacctcagttaggagttactggaagacaggcctgatagttacttcagtattactagtgtatgaatatggataattttgtttcccacttcagccaaaatattatacagttgtaaattttaactagctgtttaaacaactaataggtctgtattgttaccattaagtagtaccaaattgactaccttgattttaaaatgcaataagccaataactactttgtcttcaacaataaagaataccagacaaaacatatgtgattttttctgcagtagcattttgtttctatctttcaaaatgctaatgctttgttgtcttcttgaatagagaacttgcaaagcaactaggtgataaaggagacattgtattcgaagatgttaaggatgtaatcatgaagagtaagtggaagatttttatttttatttttttgttagtgttgttcagcagagttaccaagtctaagccatatcaaaagacattatgaactaagggtgtaaaagaacctctgaaatattaatcattaatcacatggttagaaaaaaaatgtctgatggatacctgtgttgcaattctttgtgagccataagtaattagggtgctcattaactctggcttctgaacatcttaaacagatggaagatctctccctgagtgtttccgactttttgaactgtatcatatacttacaactgatcatgatacagtgactaggatcaccaaggaggtattgtgatatttatagttttgtgatttgtatactgtacttgccggattcatcatcgagacaaaattggcaggttgtggaagattttgccatggagaatgtagtatatctggaaataagaacaacacctaaggtaatatttttatttgtctgttccgtattcctctggtacatttttttagtctctgtggaaatagtgtgatttattattttactttattttgtttcactgccatccagaataatgaagccaaagggatgaccaagaggtcttacatgaatgctgttattaaaggtcttaaaactgttgaagctgttgaagtcgtgttattcgattctaactcaagagcagataaaactcctatgagtgagctgggtggcgacacaaggaaaaagaagatatatgttaggcttcttctgagcattgaccgccgtgaaactactttggctgcattggatactgtatgttaagattttacaaactgtctaacattctaagcaaatttagcaatatgacagctaatgacaatatctataaatcgttcacctttgtttgtcaggttaatttagcaatggagatgaaggatcaaggtgtcattggcattgatctttctggcaatccagttgtgggggagtggtaaaatattctgtgcctgtgttgaactaagtggatacatcctacataatttttgtgctgacattcctgggatttttaaacatttatgaagggagacatacttgcctgccctggaacatgctaaagagcttggaatccccattacaattcactgtggcgaggtctgcaaatatattagaacaacttctgaaccactctctccttcttgatcattatttccctgcagaactagttgatcaatgaagtgaaaaacttggtgacaacaggtagcaaacaggaatgagatccgagcagtgctggacttctgcccacagaggctgggtcatgtctgctgcctcaacgacgaggaatggaagaagttgaagtcgttaatgattccagtgagcttttctctcattgtccctaaccaattccatgtcacactcacacacgcttaatccaaaactgaaattctgcaggtcgagatatgcttgacttccaatgttatgaccggtggtgcgccttcactggagcttcatcacttcggtttgtccctggcaatagtagtacttaaaaaaatcttgacaagaacttttaagttactgaatgttgacaagaatttttaagttactgaatgttgagaggattttaagtttctgaatcttgacaagaattgaagttactgaatgtttgacaagaatttaagttggcttcccagctgattaacatttttgagttactgaatatgtgcagccgatctgtacaacgcgaagcaccctctgtccctgtgcaccgatgattccggcctcttttcaacgagcctctcaaatgagtactacctcgttgcatctaccttcggtatgcgctctccttgaaaaaagatctgcaaatagtctgacaattgttgttgttgtgtgtgtgtacagtactctgaactctgaatgcaaaatccaaaatgtggcaggtctcagcaaggctgagctgtttcaactagctcaggacgcggtggagttcgtgttcgccggcgacgagttgaagaggtctctgagagagttgttcgagcgcgtcgggaaggagctgacgacgtagggtaatccaagatgcgttcctgtcgatcggcgtcggaacaaataaatgtatttattatccatgtggtctcgattgtgattttagattttccatcgtttctgcgtttatgttcccacgggcgtgtccagtttaagagtacaagcggccgacccgagaatccacctatatggtgggtttggataatgggaaataagggtgggattggaattagaaaataaatgaagggttaggattaaatggaagagggagaatgaatggttaggatttaaaatgggtgggaaatcatttccctttcccatttgccaaacactaccataatgtaacggaaataagtgggtaatctaaaaaaatggattacccatttattcgtactatgggtggattcgtgggccggcccttgcacccagtccagtcccttctcccgcttgcaaatcccggcgccggggatgcgagcacggtggagatctccggggagagtcgccaccgcgcgcctcgccggcgaggacagagaaaaggcgtgggccttcagttgggccggaatgggatgggattgcggccttcaagcggcctgttatgtatataggccggaacgggattgcagctacgtgcggcccgtttaagtcggccgggggagaatgaattcgaccggaaatgagtggaagttgacattgatttgaagtttgtatttgattgaattgaaacattgagctggaattttaaaactacacaaaacaaaggatggagtctttaaacgcttccgctactaatgtcgcacaaggcggtaatgatttttcagaagagtagcgcaagcaagttccttgaagaaactgtttgcaaaaatacaagtcttgtttcgatcaaaagcttcaggaactctatcgtagcaacctcataaggccacacctcagatctcatgtagttgttttgtacaaaaaaaaaaggtacgaactccaaaaccccgaaggcttgacacaaactagatgcaaatgctaagtcatgagaaaatttaaaaaattgtggacagtaagtaaggtgttcttgcatcagctactcctatttggaagatttaggttggttgtttactgctagtctacaaatattgccgagagagaacagctgtcaggtaataacagattttgattgccgcggcatcctgtccaggtgatcatttgtaccatccagtaatcatgtacctcagccaaaagcagaataggcatgacaacgcctgccagacatgaacacatggagttattattaccacagattgaaattcacacagcaagtataatttgtcaaaaaagcgatagtaacggacagcgatatgtttaagtagcatggggctactagagagaggattggatctccaagtaataaggatatcaatgtcaagatatctgaaaagtgattccatttgaaccaccattataccatataataacaaatgtggattagttaccgttatccaaaaaaaataaatttgtggtttaaggaaatctagtgaccacaaaaaagcagataggataaacggatggcttaattcaaagaacttattcctcatttaatgttgttatgcatagcacaaagttttagctgggattttgtttgcagatattccttgtgtactgacatttgcacgaaccctaggacaaggcttagccataaccataatggagtagatttgcaaataccaactactttattcatgataacttccacaatgaaacaaaatgaaatcagtagtttgtagtagtttatagcatcaatgcatttagattttacctgaaatatgagcagccttatgcaaagggtcctctctgtgcatcttccaaatatcctaaggaatatgtttaccaagttaccatctttggtacccgtcaacagtcctgtgtggggatcaaacctgtgggacgcaaacacattttacaatatttatcagaagttcaacccacacctcaataggttttctgaaaatatattctacataccttggcaacctgtgccttgggcagggaacaaacttaaacagctgtagcaaatagaagcacaaattaaagtgtaagcagaccaaatgcctaattaactaaagaagatattgtatcaattgagaggaaaataaaaaaaatgaaatggattcttccatacctgtgggactgagcacagaaagttaagaacctcaggtaaaaagaagagcaataatgtctcgctgcaagtagagaagagttattgatcagctgcagttgctaatcagtattgggtaaagcaaactgtatgcacaacgagcacatgctagaaacatcagacagatgcacatagaaagtattgatggcacaagagaagcctacacagttacgcttccaggatatataattgtatggatggtacacaggaagttcaacaggcaacatacttaacatttcaaaactagatattaaatccaaccaacactctgtgggctgtactagaccaagaggaccatcccaaaagatcaccatttacatgctttacattatatgtggcagaagaggtaagagaacggtgagaaagtgcaaggaggaaagacttaaatgtgcatgaagctagaacaaagattcttgactgtacttcactacagaatgcaggctgttaattgcatatccttccatatcacaaacaaccactccagatgaagctcgctaagtgcttcttgttttctttattgatagataataacggaacatgttttttagactaaaggtcagagacccggcttttaatcgaaagccacataggcagagtcttacaactggggataccagcgaaacagaggagcataacatagtttaaacacaaaactcaggacacaactcagcacgctaattcaggcagacaaagcaaaagcatcattacacaggacagattaagtcacaaccaaaggataataacggaacatgtaagggataactgaggacgtttacctgaaatgacccaaaattcccaccacagccaatgccattccagaaaaataggtgtaggtatcaccaacgaaaacagatgaaggatacctgatacacacacatacaaagtcattctttctgaaacaaagcaaaagaacttttttctttaaataaatgtgcatgcttcccatggtccttaccagttaaatgcgagcaaagctaatgaagtggtcaagaaaggcaggacaagataaatcgagaatgcatgggcttgttgcgcttcaatgtccgtagaagatcctatgcgcattacattatgtatcaaaacctaaaaaatgttatacaacatcagtagacaaatagaatttgggttacaaaattctcatcgacagatattttgttcataccgcagcagatataataactgtctgcccaacttcaagaccattcaggccagcatgtatattgatcgaatttgtacaaaagactgctaataggagcataaagagcttgtacagagaacctgcatatggaagacaatgtcaggtcagtgcattgtatagctatttgctagcaataatagaatgaaggttcatccatagagttaggttgaaacttgcataaagaaagcaaataagcaaaatgaagaagtatatcacagatgcactggctcaaaaatcccttctttcattcattttatcttcaacagatttaggtcacttgtggaagaagcatttaaagtggttcactggaatgagtactgatggtagattatcatctagcacgttagcagtcagcattcacatatgaagcaaaaaaaaatagttgccaacaaggattaatagtgctattacaaaaacgtaggatcaatactataagatccccctgtactaatttgcaagcctcctacgacctacaggattaagtgatatacgagatcataaattgatgaagctaagttcctatgaagtaaaccatcacacaagttgaccagagtccatgttaggcccaatgtttcaccaagtccccctgtccaacagaagtctttatttaaaagtttataagcccactgcctaaagcatctaggccccggtgttaattttggtaattaatgacaagcgctaattgtggactaaccgttgtctttgagctatacattttaagtcaggtccacgtcatatgtgcgcatggatgattatcgatggattaaaattgacggcgcaaagcaaagagaaagaagacggtaaaactagtgctttaatttagaattgatcgaggtgtagggcgatcaaaattgctagtttattttctagtttcgccgtactattaagaggggtaatgacctagcaaagagatgattgaattgccacattaggtcattgcattttcatttgtgctctctttttcatcacacacacattcacttgcaaattcactgggttcggcctgaccagggggcggtcagaccggccacatagtggcggtctgaccggcgtgccctggctggtctgatcagcccccaagcgggcggtctgaccggcgcataaggccggtctgaccggcggcacttgcctggtcagaccggccccctggaggccgagatgatgttgctcgggatggccgatacagagccgacggagccgtagtcgatcagaccgagccgaggccggtctgaccgcccactcaactccggtctgaccggccaggccgatggggccctctgacagcacttcaacggctagttttctagccgttgcagagtagcacggtctgaccagccacatacctccggtcagaccggcagagcacaaagttgggggatttcgcccccaacggctagttttggtgggtgggagtataaatactcccccaccagtagcaaggggactctcttggcacccaattcaattgcatacatcccttgcacctctctcacacccacttgagctttgtgttcatccatctagtgtgttagagggttgattagccaagagtcaagtgcattgcttccatttgtagagctagtgtggcacttgattgatcatctccacgccgggtcattgcttgttactcttggaggttgccgcctcctagacggcttgtggatgagttgcccggtgacctctccgagaagattgtggaggaggcccggcgccggtttgtgagtggtttggagttcaccaccttcggagtgaaagaagaactaccctagtgatcgaggcttgggtagtcctctccgtgggccggctcccgccttgcccaccccttgacgaagggggcgtgcggtggcttcatggttgagcggtggagttggactcgcctcaacggggagtaggaaaccggcgagtttccgaacctcggtgaaaaatctcttgtctccttgtctcatttgattgtcgcatttacatttgtgcaaatttacttttctagaaacaaactagagatcatatcaccctaagattactaaacattgacataggagtgtgatttactttcctagatatatagttgagccacaatcaccctaggtttgcaaaacataacttagttgcttagttagagttgaccctcaccaagcctagcaacttaggttagttttgattaggtgtcatttagttttaaatcgcctattcaccccccccttctagtcgacatctcgatcctacactgccactgacctgagggacatgcctacttatcagttacacggataaatttatttggaccaagaaataacattgagggcttatttagaacattgggtgactggaaaagctaaattcttacagaggaccttggtgaaaggaaaaagtgaaatagctccagcagaccatacttactgattgttccataaattctcataaaaaataatagccagtactgtggtactttcatgtcactgataatcacaattctaaatgatataggtcgtaattaagagatagtgtctagtaactgcatcagtgcatacaaaaaagttagtgaaatttgatgaaatttcaccaattactttaagtaaggaaagtatcaattctcccaccttccaacaaagatcatcagtgctgcaaccagaattaaaatattgcgcaactaatgaatattcatcatcacaacgttagcttattttggacttatcaacatacctagctccagaacagctactccaacataagatgttagaggctttggaatgctgacggaagtaccaccagcatatgccatcagcaaaggaagtgctgcaattgtgggtagtagaagtttcctgttgaacacagaccattccaaaataatgttattatcataaaagggaagataatagtacatcatcggagtaaactggaaggcattatgaaaaacaacatacactctccatggaacatcaagaacatcatcaataaatccaagaagcaccataaagcagactgatgctagtgccgcgttgtattcaacaagccactgcaacaaggaagtcaaaaacagtaattgtaacacatgtttcaggtcacaaagcaacgtttatgaatgccaattatagtaacttctagtcaacataccatagagtctgctgtgaagttgaaatgttgaaatagaatagcaatgaccaagtagacaatcccaacaacaatgccaagtgcctcaggcctgcaaagcaagtaaaatgcttagacaagcaagaatgaaaactatttgatttgtacctccagtgagtcctgctaaactcttaaatatttcgaacaaatagcacataatgggtatttttcatatcttaaaatattctcttacatgctcagtaaaactctagaggtatgctgataatttcctaaaatcctactcctatacttcatgagcaggttaagagtgtctccaactgaatttttaaaaaccttgaagcatatgtatgcactagcatgcattagtaacatggcccaaaggaggtagtcacaactcataaccttccttaaaacaacttttgtgtccttgttttgagtgacacgtatttccgagaatcaagaacttttgccaagaagaaaaaaaaaaagagaaggaactgttggatgaaatttgagtgattgatgaactccaatgtatcagttcagtttacactaaacaagtagttagacaaaaacggtatggtgcatcaactctacctctacgtgtcggcatgcaagacaaaggaaatgcttaacatcccatagaaatgtaaccctatgatgggcccagaagaaaaggaaaattagttagaacacacaaaatctgaactatgttattcttcagtacatcggtgaaacactgaaactagacaacacaatttaagagtttacaactaagatagatctttttttaatagaacaacttactctgcaacccaaatgtgattatcttcccaaagtgcactaaatactgctggcgtgtttcaaattcccaaagcacactaagtcatgctaacactttccagagaccatacctacccaattactagctcccaatcctacaagacaaatttgagtgaacctgataaactattacacgtacggagcatgcatgatgtgtcaggttccacaatcaacatttgtaatgcgaatgtagaatgtaagacaggtcagctaccgcaacaacaattaccaacatacagacgcatcacttgaggaaattcctacttgagctgtcatgcaaaacagtcaggtaggactgaacaaatcaaggtattgtagtagcgtgccctctaattatggcgtataccccaaatgcactgaccccaactgagctaaatcacaactagtatcagtaaccgctacgagctacagtaaccatctgcgtaacaaagatcccaaagtcaaaatcctcgcccctgatgcttccaatagcagatcctcaacaatgacacctaaattctgatgctaaacgctcaaatctggttaaatctaatcctagggaaatcgcatttgcaaacactgcagttaaagccatctttcagaaatgcaatcggtgactaacactctgatctcgcccatgggcaagccgcgcttgttgatgtccttcccccacatcccgcgacggaggaggtagcgtgcggcgacggggacgaggcggagcacgacgacgaagccgccgaagctcatggccccgcagatgaggatggatcgccgcagcgccgcgtccagcgggtagtgcacgaacgcaaggtacgagaagggcgcgaggaaggccaccatcgccgcggcgaccacgcgcaggttcggcgcccggagcaccagctcagcatccgcggcctccgccgccgccaccgcagcagccggcctcgcccgcggctgcgcatcagcgggtgccgccgccgccgccgccgccgtcgccgcgggcctgcggcgggcgtccatgggagactaggaggggagtgctagggtttcggcagagcttctccggcgagtcggctggtgcggcggcggtggcgggggtttggtcgccggcgaggggggccgggccgtcgaggaggtcggggaaaatttatagccgcggccgtgttgtgacgtggcaggctcccattggctggagtcacgtgttcggcggccactggaatggctagcgaagcatgaggaatcttgcgtggaatcgaagtgatcagagaacgagatctggaccgtccagatgttatctaacggtgtaaatcttcctcagttgaaactgcccttggcctgcattggcattggcattgatactgtgctgaggtgatctgagccttagatttaagatccgatggttgtagggactgcagaaacataaccgagtggttgacaaggggtttgatatatttgataagcccttgagaaataaacaaaagtaaccaaaaaatatttttagttaaaactttttatctctattcttagagttttataaactcagagtgtgtttgataaatgggatatgagagatgggactgggaaagggaaatggatgaatggctaggattaaataaagtgtgaataatagatggttaagatgctatgttgctctttggagggtgggatattatttttcaatcccatttgccaaacaaaacctcaaggttaaaaaacaagcttaaataaacatccaattttaaataaaactttgaaaattaattttggttcttatggactcctaatttaactattatactttttcacaaggtttatagcagatttatgttggcctcctatgataagcatgcgtaaaagatttggaatgcacgtttttattggatacataactagttacaaacaaaatcacaatcccacagaagaagcaagtggt

SEQ ID NO: 20546 - DNA, 14015 bp, Oryza sativa
  unsure (1)..(14015): unsure at all n locations
ccttgcaaacagcaagggcatgagcgcatggtattccagtgaggtttggctttaggcattcgcacataggaggagtatcattgtgtattattactttatacttgaaatctcttcgaacatatgcagtatgatttccttgcactactgcaactcgctcacggtcaaccttgacctcatactcaccaccttcatcaccataagaagtcacgtgcatggatccagccttattccctcgctttactaacaaattctcaacccgatgggaccacattttctctgaatctgcaagttcaagagcagattttcttctatcagcaaaccattctaagcatttattaaatgtttcctccactattgctgtcacaggtaatctccttgagtacttgaacacattatttaatgattcagaaccattacttgtcattataccccaacggtaaccaccatccatgcattgaaacacctctcaggtttctcaggctcatctttatcctcctgtcgatattttccaacactttttagataatcaattgcatttggacaactttgtgtaattgcatccatgccttctacaaacctgcgtggtttcttcttctttacagcccacttgaatgtttttatcacatcatcatttttacatcgcttgtacagattctcagcaatatgttgggaacaaaatcgatgcacacactcaccaccaatttcgttccatccgatatgtggctgcttgaatacccactttatagccttgtgacgatcagaacaacacacatgaaattaccaaaaccaatcacctcttttcttagccatctcataaaccaaccccaattgtcactatcctccttttccacgattgcaaaagcaagtggtagtaacctattttcagcatcatatccacatgctatcaacaacctgccccgatacctaccagataaaaaagaagcatccacactaattaccggtcgaaggtatgggacagattcaatgcatggcccaaaagcccaggccaaacatttgaatgattggtgtccttcaggagatgtaggatttgatagaagttgatattttgtacccggattagatgctttcattgcctccaacaacggtgtgacaagtgcatatgattcttcccaactaccaaacaattgaactatggccaactctcgaccacgccacaacttgttgtactttggtttcacatttttatatctttgtcgaaccaactgacgtatgcttaatatactcaactccaaattctcctttagatcatcacgtatcacatcagcaatgaccgctgctgttagctgtgcatgatcaaatcggtcagcaggtgcacgacatgtgtggggaaattggcaagtttgtattttccaactcgaaccaatttttgttgtttttgcatatagcttccacttgcaagtactatctttgcacttgaaatctagtcttgatttgttgcttgtagatacccttacttccatattattactaatgtgaaattcatttactgcaaactgtaggtgttgcttggagtaaaaaattcgacctttggccaatggactctcaaagtgtctctttgaaccaaagaaacaatcatcagctcttgtctgacgcaacacagaaatgtcatgaaaggcacttacggggtgcttaccagacctacccatgagtggctgcgattttgcagaattaaccaatgcaatactatcattcatattctcttcgtcttcgctaccctcctccacatcttcctggtcttcatcctcgtcaatattgccttcattgtctgtctcttctccaacataagcctcctcttcaacatttgtttgcaccacattcctagcattatgaccatcaagggaaggcatcacaattgattcttctccatcttgattagcttcagaagagatgacatgactaggtgattgattaactaatccttgctcaataatttaaatggttggagcagtgttaggttcattatttcctcttgtcatgacaccaatacttgaagtatgacttctcccaatattaattgatgcagtctcaacatacaattctaccatatgccaattggtccgtgctgatgtcatttcaaggatcatttgccaagatctttcctcgtataaagggattaactggaaaaaatgtggaccaggtgccccaacatcatacctcacttttataaccaatgaatatgcaacctcagaaaaatctaggccacggaaaatctcatttttcacatcttctagcgtagtagacttgatagcaggaaaagtgatcttgggaggaatactatatgatgcacctgccttctcttcgtatatgatttcaccacccgcatacacaagaacaattatcatggctcgtgtagttgtgcctaaaaaacaaataacatgttattatcattcacttgatatacatgtgaaagtagcgtgaactatttaccaaacatatataaatgttgaattcaatctaagtttttggcataatataatagacaatttatatataaaaaaacatatgcggaaaacggtgccccatgaaaaaagttatctaacttatcgtatatatgggaaaagcgctatacggtccaatgtagacaacggccaagttgtagtgtgtgtatgtataaaccatttaatataaccttcgacagtgacaatgttagtgtggccatagtgcaactaaaattcatcaattctgagcacatgagactaatcaaactagcgtgcagcaaacaattgatccactaatatgaattgttagtattgaaaatttagtagtataataccacgttgtttgtattctctttgtgatatgaacaatggaaaaaaaaactcgttgtatgcaaccttaaaccctatgattttgatgtactaccggatgaattagatttgaacaatggggaaaactcaccgtctatgcagttccaatatccaaaacggaagccaacatctaaaaccaagaaatattgtttgctgggttagggcggaggaagctgcgatggagaatgaacaaagttcgactctgacgacaacggcaagatggcaaactgccctagttttcttgactccccgtaatgatgcaactaaccaattttagaggtgggttgttgggttaacttaatcaattcagcagcccaatacggcccagtagtttgttgggctactggttagatggaaacatattgctgtatatgagcatcttgttgcctaaataattaaatgtgattgttgcgtgctcacatttgtaattagtggtttgcacgtgcttagataaaaaaaatcagtatctctctagtagactagtgctagtagcaaaacctaccgaatatggaacacaatcggagtcgatttccagggccgtgaaacacaaacgctactggactcctttccgcctaataaaaaagctcaaagctcaccgcgacaagaagaagcccagcccacgacaaaccacacccaccaccacgcacgcacgcacggtatacatacaccttcacattgggggcgatgggcagcagcaaggccaaccacccggcggcttcctcgtccaaggtctcctccgtctcctcctccaaacccaaacccaaacccaccccgattagaaaccctacgcctccgcctcctcctcctcgccgccgcacgcccccgcctccgccgccggggtcgggcccggggccgcagcgaccttcctacctctcggtagcgctccgccgccgcgggcctcccgcgggcagcgcggccgggaccccggcgccgccgcgcgccgccgccgcctttgatgtcgcccccccggtcgccgagcacacggaccccgttgtcttccccgcttcattagccgagatgagcggcggcggcggcagcagcagcagcgacgatcaggtatataccccacccccatctgctccccgcgcatcgacactggctggctcgtggctgctacggggtaattgcgtttttgggtgcgagtgaattaatgttgtgttttttttttttggggggggggcggtattgtgatgcttcaaagtttgtctggatcatggtacatgtggcactagattaacgcaataagtatgctactcacttgttttaggggcttttgtggccgattactgcataagctgttgttgctttgaagttatatggagtaagagtagttcgtttgagttttgaaggtgctacttcaaaattttaagtggaaccaagcattcccttaagccaatgcagctccttctgtgttagcttgatatttagggctacagatatcgacgatatttcgattaatagttgttttggacgctccacaagttattatggtcctgtggttatgattttctcatcatatagttgctcctgttgtgcagatccttctgtttgggagcttcacagaggctgaaaccaagttgtggcagcctaatgcaaataaaacacgggaactctctgagatccagtttgggtcactgaatttctcagctctaaatttatcgaaagaatcaaattctattactcaaggtgctgtctatcctgcaaaattaagtgacggccagaacaaaatcatcattacaaaggatattgcatgcagcaacaaaaaggaaacagtagctcctacattaccaaatggcaagccagtgctattcaatggatctcccactgccaatgccaatgtgtctcccaacaatggcgtcattgagaataatcagaaggctgtagctgcagttctcacgagtgttcctgctaaaaatgtcagcagcccagcaccactttcagttccagaggtggaccatgatgggatcgaacgcaatcaaaacagcagtttagtcccagaaataactgaaaatggagggccagctattgatacaccaactactgcagctccagtggatgagcttgtgacaagcttaaataaaaaggactttcggaacaagcccttgcttcctcatggtttgaagaatacaggaaatatatgcttcctgaattcatccttgcaggcattgctctcatgctggccttttgtccagcttttacagaacttgaggaaccagaatatacctaaggtgctgctatttaaacaattaagcttgatgttctaaccccgcttatttcaggctaatttttctgactacttgttgcattttaggctggttacccaacactgaatgcatttattgagttcatctctcaattcgacgtgctcgatgattcaaatgttaagaaagacgagaagtttgctacaatagcttcaaaatcagttattccctccatgtttgacacagttctgagaaattttactccagatgtgccagctggaacagcttctaggccaaggtaaaagactgttaatgcattttttttaactattagttttacttgtgtgaaagtaactcatctagttgttaatgctgataatctgatgtttggtttgtcggtgcaaattgtggatatcaatgactttttggcattttctttaacatctttagtccaacaagccatggatggcagtttatagtctggtgtttagctgatccttctagtactataatatattttgttcattctttcttaaagagctgtattgagtgtattaagttaaaaccaatggctcaatgcttacaagcatgattgcacgatgcttacgatgcttttgaacccctgactatatcctttttgttttttaaccctctgcttgaggctttgcttgtgtatcactatgatatttaggatatatgccatataaatatgaagttcattcaaacaaagtagtttgctgcatcacatatcgctgggacattgtgcatgctattctctatccatttctttgtgttgttgtagatgtccagttttaagggttcacctcaatttgcagtaagctatccttgtttcagtttatgatgctatgtacttatgcaggcaggaagatgctcaagaattcttaagttttgcgatggatagaatgcatgatgaactagtgaagcttaatggcaatggctcaaattcaaaggagggtatgattgtttcatcaaatgatgatgatgcttgggagactgttggaaagaagaacaagtcagccataatgaggagtcagagttttgttccctccgagttaactgctatttttggaggccagctgcaaagctgtgtgaaagctactggtaaaattttcttgtgcagagaaaaagcgcacactgttttggaaattttaatgtccttgctttccatgtcattactgttatggtatatctaaccaactcaacatttgcttgtgccatgtaactctataaatgatgttcctaagcatgcacgaaagttgtcagggaaatagtgtatatgcttatgcttgacaattgagattaacttaaaaaaagaaactgttatactatttatttctccctaagaagttatttgacattattaccagaatcatgggctattgtccttattttatacctggaaggtttacttcattgtcattcttctagttttactaacaagtcaaatcacacccattagtccttaaggtattactgaataccactcctacatgaatcatgtaactcaatatacctttcgcgaatatgttccccactgatcatgaactcatgactggcaaaccatttttcacagactcaaggtgaaaactgtgtttgagtgggtcaaattgtgcagtcatttgctcagctttgcttggtgagtgcagactgatggattattcttttatctgcaggtaacaaagcatcagtcaccgttcagccttttcgactgatccatcttgacatattccccgatgctgttcagaaacttgatgatgcccttcgtctgtttgctgctcctgaatctttggaaggatacagaacagctgctggaaaggtagcttgttgaaatttactctattatttgacctcttaattatgtcaccactcaaatggtttgttaattgcatgtatgtaaacttggtttttttacatgcaatggaaaatccattttgcatctactgcattttactcagtaaactatttatgaagccttccttttttaatgttaatattctgttaaagctgctatttaataagctatgttgttgaaacttctccttgtggtaccactatatttggtgctttcttcttcatatgaaagatgcaactgttatttcttgcaatgagttaaaattacaatatgtcaaactttgatcttgcaggctgggttggtgacggctagaaaatcagtgaagatacactcactttcaaagataatgatactgcacctgaagaggtttagttatggaagtcatggctgcacgaaactcttcaagccaattcacttccctcttgagctggttcttagtcgtgatctgctgagttcgccatcatcagaggtgatagtttgcccgatatggttttatacatttcctctcaaaattttgagctatctttcatttgtttcatccctccattttcctcttacagaggcaaccatgtcttggttatgcaattattgtgttattgcatatgcagtaggcttaagcttgcactccaagtttatgcacccattatggaatcacgatcatttcttagtttccaacatgctattgaatttgagacaaattgacgcttcttcaaatagttaaaatgggatctaacaacttgatttcagcacatgcagagtagaagatatgagcttgttgcaaccatcacgcatcttggggcaaacccgtccaggggccattacactgccgatgcaaagtctgccagtgggcagtggcttcgcttcgacgatgataacgtcacacctgtcagtctgaacaaggtcttgcatgaccaagcatatgtcctgttctacaaacaattataagtttgggggtattgctacggagttgattagcggttctcttattgcttgaacagctagatatatactaactatatcgcccagttaatgtagctgccgtgtaactgagaatcttgtgtcaagtgcctggtttcctgcgtttatttatatatgcttgatcacatagtgggggatttttgttcaggccattgttgaggttttgtaaaatgcaaatgtcatcttggtaatgaccattaaagtaaccatgagatgatatcactcgttagccctaagaaactatattgatcatgttattgcggtgttgcatttgattatattaaaacgtgattaaaacgtccagcttgtgagcttgacgattgctgaaatatggctctatggctgcctactgcgcttcaggtttcagtggctgtcaatcagtttggaaagctgaagctgtagagatcaacctgaaactgtgaatttgtgaagcagtttatgcctactatatacgagagatcgtggctgatctaaaatgacttctgcagatgccatttcctcgtaatgctggatcatgatccgcaagagatgatatcttgcactacaaaatgaattctgcagatgtcatttcttcacaatggtggatgatctatcaaatgaggtgtcatttcttcacaatggtggatgatctatcaaatgaggatttcaacactctttgtgcagatgtcatttcttcacaatggtggatgatctatcaaatgaggatttcaacaccctttttgcacagttgtacactgatttgtatttttctcctcttgctcttgtgccatccttcatctcctttcagagactcaattctcccgaggctttacactactatccggtacgtatacctaagatccccctccgtcccagaatataggtttttgtattttgggacggagggagtaacaatcactccactgttcgagcatgaattgatgtgcaaattattcgatttctctgtcaatacgtcctaatttgcagcttgtgacaaccatcaaatcgaggaagctgccgattgtgctttgctgatgttatctgttcaaggagccctgaaagtctgaaactgaaaaacaacatgaataacagtgaatgattagaacccagaaacctgctaaattgtttatcagtgaacatcttcataaaccgtagtggaacccttctgaaatcaatctgaactgaagctggcatctgcctgttaatacattatacataataaaattaccggatcatcattttgtgcagatcaacacactgtaactgtagtatgcagaaatcccgatctgcagttgttcctgtgatcctgtctagcattttgtaaagaagaaagcactggagcatgaaaaaaccaatctgaagctgttcctgtcaagcattttagttgtttgtttgcgttgatacgttctttgtttctctgtggtattgtcaaccagtcaaattgcaatataatatcattgagcgttatatttgaccaagttacttctgaattcatgcagaccactatcacttttgaccaattacttctgaattcatgttcctttctctattatcactttgaccaattacttcatttatgttcttcaccctacaatcacttttgagttttgaccaactacttctgaattcatgttcttctccctagcttgttttagagacttgactgctgaatcaacatggccttccataatttgctacctaactgaacctaaaccaagacattctcttgcacgatacattttgctttcatgcttatagtttagaaaccatgtcttatcttgcattgcatactaagttctcaaataatttaatgacagtttgacatggctgagctgtatgcctgtttatgcaaagctggcatgttcatcatacgaactcttcagttcaaagttgagagagccaaccagaaattgaaagccaacgtcaagaataaatcagctacctattgttagaatgtctatggatatctctgcaaccttaacagccagctgcagaaatcaatctgaacttaatgctgtttccgtctagcatttatctgtgacacctcacacgtagatattgctccttgaatggtacttatgttgctttcatttctaaagttactaaatcatgaccaattcgatggcgatttcggtcccagttcgtcacatttccacactgatgtctttcagaggctttaaacttccaccttcttttcagagctcccaattaaatcatctttcttgatcagtcacttccatttttgctactgatgatgccagtaataaaccaccatcatcggcatcgcacatgatgacaattgacaaaccaaccaccaactttcgagatccaacaaattcacagacaacaaaagagcaggtttctaccagattctgaagagagcaaaggaataatcagaagttgaaagattctaaacattagactgcttgccatcttaatatatccaacattaacaagggcggtagtagaatcattagtacacatgattctacatcactctctatttttgcttttttttttctaacacattttagatgatgcacctgaaactgaacagaagctgctttactactacaagggatgcagcaccagaaagctgcaatttttccccctttttttttcagtttttatacacagtgaagaaaagcagagagactaaactctgaaaactccaaggttatacactagacagcagcagcagcagcatcaccactcacccatggcgctctagcgaggctggtggatgacgtggcgggcggcgccgcccttggcggcgacgaactgggccggcttctcggcgtgcctcaccatcccggcgccgcccaacctcggcgagttgaggctgagcgccctgagcacgtcggcgtcgagggtgggagtcgtcgtcggcttgtggtggacgggggggtcgggggtgtagaagaggtcgtcggtgtcgaccatgtcgaggaggtcgagcgagtcgtcgggcaggagcgcggcgaggtcgtcgtcgaacacctggcggtggtggtcctcctccgccgcagcgtcctcgtacatctggtgctgcctgaaccagtggtcgcggaaccacgccgtggtcttgacgagctcccaccactccggcgagaagtcctccaccctcctgaacgccgccgggatgaacggcgccgcgttcgggttcagcgacgacatcgccatagcactcatccctcactccaactgcaacaaacaagaacaagaacaacaacgccatcaataacccaaaaaagaaacaacaagaaattcgctagctagctagctcatggcgatcgatcaagatcgtcgaagattactactaccttttcttgggggaaaatatctcgtggcgcgacgcgaacggcgattgattgattcccgcggttttgagagagaaacggtgggtttcttgtttggcttggctgcgcggtggtggagggggagcgcgtttaataggcgagaggggaggagtacgagcgggtggggtggtggggccgggttgtcagtgggagtggctgacgtgtggggccgggttggcgtgtgggtggggtgggttggggtgggggtggatggtgagttggtgactggtcggtttgggtccctttttcacatggggggtggggccaatggggagtgtggtgatgcttgggcgggattttctgtgggcgagggatataataattcgggtggaagtttcctggcgatagagatattgaagtgctcctatggagagagagagagagagagagagagggtgtgtttaatgtgtaaatcgtgtacggtttgcttgtagttatcggataagatggggctgtttggatgggacttttcagtccaaccagatgtttgacactaattaaaaatattaaacatagactattgataaaacctatttcataaccctgaactaatttgcgagacgaatctattgagactaattaaactataaataatttatgtgatgctacagtaaacatgtgctaattatgaattaattagacttaaaaaatttgtcacgcaaattagctctcatttatgtaattagttttgtaagtagtctatgtttaatactccaaattaatgtccaaacatctgatgtcacagagactaaagtttagtccctgatccaaacaccacctaagttctgttcttcattcattaactacttcaatccaaaaataataaaagaaagagattccaaatacatttttaaaaagaaattgattcattctctctctatcccaaaataataaaagaaagagattccaaatactttttaaaaaagaaattgcaagcgtgttgaggattgaacacgagaccgcaaggttgaaacgatacacccgttaccactactgcatttctattccaaaacataacaaactttgagtttaaaggttgctattacctagcccccgacaaatatataactaccccatccattaaaaaaaaaaaactcaattctagctacgaacctggacatggtttgtcttttttgacaaactagtaggtagcaacatttttaggccgtaagaagtaataaattctctttttattaaattaattaatgtggggattctatgttcattcatttcattatacttctcttggtcataaatatttcttcaaactctataaaatttcaacaactgattttatgttaaaagaagtttttaggatctaataaatttatgatattataatagtactttttgagataaatctatgtagtagtatatcatttgttttgtttcaagtcaaaacatttaaaaaatcatggattgtcggaattgtaagaagtttgatcagatattatcgtaagcatcaaatgtttttgacaagaggaagtacattatgccaagtccttttcggttgcanntaattattnngtacagttngtatattatagtatgacaaagtcaccattgtacagtgggatgactagaaggtacgcattctaaattatttatggacgaatggattatatgcgttattacactttttaaattatgatttctccaaaagtaggcaattcgtctatgctatttttatttttataaaatataatatctaatttcttcgtacttaattgcaaaataacaagtagtgacatcaagaaaagctttttaggattggttgagatttggacatgatctcaatagctttatatatatatatatatatatatatatatatatatatcaagaaaagcttaatttattcctacttagttgaatctgcccaaccataaaaataacaggccctaacattgagaaaaccaaagcaactttttttcagaggaaaaaaatagaagatgtaaaccaaaactaacccccgaattgatcagcaatgttagtatatagccttggcttacggcatcaggaactaaaccacagattaactaaatccaacatggagccctaattatttatcagatagatacaaacacgtcgccatcgaaaaccggcaccgtcttgtaatcatacttaattgcaaaaagaaaaagatttggtgaaacgtttcttttatgcctagttgggtggtgacatcaagaaaagcttattaggattgattgagaatttagacatgatctatcgacgcatgcactgcctttgctttccacgcaacacccatatgagctgaaaaattggattgcagaattatcaagaaagtgaaatgattttgattgctatgctgtggaactatagcaatcagtccgagttgtaaagtttcagttagaagaaaaataattgcagataaaaattcttgtctgttttactcggtcaaaatcgccggtcaactggccggtgtgctgctccactcaaagtctcctgtggtagactttggggttacacagagtcactgttctttgaacgcggtgatagctaggtttactgtatgtgtacatcctgtttggaatgagaaattccgtggaaatttcacagtattttcaagacagacaatgaacaaaaaacatttaatgattttttcaggcatatgaaaaattcctatgcttcaaacgagaattcacgatggatggtctgaatctagaattaagatctttttgacgtaaattcagagaaatatgttcgctgacatgttagacgacggggaaaagttatgtcagagattcttattaatccctaaatttgtagtggg

SEQ ID NO: 20547 - DNA, 12037 bp, Oryza sativa
cagatcagctaatcaaaccggtgatcattccagcgtcgtctcatcatcgaccccatgtggattgcaaccgtgcacgccaaccgacaatcaatcattgggtaacctctgcatcaacacgggtttagaattcagagaagatacgagttcgattagaattcaggcatgatcagcagcagtttaattataatttcagaagataagataccatgagctgtggatgttctgctgttcgtctgttactaaaagatcagttgtactagctatgctatgctcgaatgattgtgtttctccatcttttttaaggttggattaatttaagctgctaattacgtaacttgaggaagataatttagacttatattaaattatgtggctgacgtgattttgatcgatgggcgagatgcacatcggttgaatgttgaattggaccgcacctgctgacccattcgaatcatctaaagtcgcgcatcattttaaatactaataatctgggcacacatcgatcgctaatttgagcactgggtttggagagaataaattaaaagaaccaacacgacaaggaacagacatctcattgatcggtttcgccgtcgcaatcggcgaaactatgatgaacatgttaaaaataaataatttaagttaagccgacatcactccatttgaaaatgaagctagtgggatgggttatattatggttttggttagaattttgccatcgattaatatgacctatagctctaccgtaggttcttcagcttatcgtccgtaacaaaaaaatatatttaggagtaatttttattttagggttgattttaatttttttaattttattttcttgcaaatgatcgttaattaataagagcacatatataaaagtttcacttattatttattcttataagttatatgcgaaatgataggattatttaaggccatgttttttaacacttttccgacttatacgttcgtatttttcacacgcgttttttaaattgttaaacggcgtgccttttataaaaagtttctatagaaaaatctctttaaaaatcatattgattcgatttaaaagtcttttttaactaatatttagctaattatacgttaatctgctcgtcgggtgggaggggatctcaaccctaagtaaatgaacacagccttaatcatcttctcacacttaattgcatacagtatcacttctacttttcttttttttttctttgtggaaaagactatgctattagtagctattagtatttcttttgattccttgacaggtgatctgacgcaatttgtagctattaggccccgttcgaatccacttaaaataggggattaaattttggattaaaatagcacgactttcaaactgctaaacggtgcgtttcatgcaaaaattttctatatgatccatttttcaagtttataataattaaaactcaattaatcacgtatttattaccacatcgttttgcgtgaaatacttaatcttcatctttagaagattcaaacaccacctttttaggtatcagaaagtttgcatagcaccatggctagctaatgatggtatgtgttgaggtatcagaaaggtggcaaaggtgcggtcaataattcagtcgaaacagtccgtacatgtgacattctgttagcaatttcggtgatgtcgcctacacaataataagataaagaggatgccgaatatgactgaaatagaaatacgagtactaaagatcatttttttcgcttctgtgcactagttcgctgagatggagagcatcaagcatgccggccaagtgcccatagtacaggttatgtatagtacatgccctcttttttccctcgttatggaatgaatttctattatgtatatttttttcaaaaagtatattataatactctcaccgctctaaaatatattcagtccgtgccaaaataagtacattttgcatggtttatgtgaaacgtttgatcattcgctttatttgaattttttttatgattagtatttttgttattattagatgataaaacataaatagtactttgtgtgattttttttcataaattttttaaataagacggacatcaaacgctggacgcggattctcatggctacacttattttcggacggaggtaataataacttttagccttcaacatttgtcctaagatatgacaacttattctcttctctactaaccacaaccttgcacctcctaattttctcacctagctaccttatcctttcaatcaatcacaactttcacatactttctccgttttataatgtaaaactttatagcattgcccatattcatataaatgttaatgaatctacatatatatatatatatgaatgtggataataaaatacaataaaatatatgtctagatttattaacattcatatgaacgtgggtaatgctaaaaattcttacattatgaaacggagggagtatttaatttcatctattttattgttacttgtgattaacactaaaatattttgagacagaggtaatagttaagtcatttgttcgaaacattcctctttcgaaggtaatgagcgtccaaaaggacaagccaggtgaagtgaactggatgagctcatcgattggctcacctgccaagtacaccggattgggatcctctaacgtgacgtgaagtcagataaacgtgtcgactgatatgtgggcctcaccgtctacgggtccacttgttagtgaccgcgtcggaggatatgcttccaagtacaccgggtgctagctagcctactactgctagtctctagtgagagtctagtctcctctccacatgttacacgttctgagatgaacgcaaacgcgtgatgctcacaccaaacgacgaacagaaacgccaggcccgtttagtacccaaattttttttcccaaaaacatcacattaaatctttggacacatgtatgaaacattaaatatatattaaaaaaaactaattgcacagttagggggtaaatcgcgagacgaatcttttaaacctaattagtccatgattaaccataagtgctacagtaacccacatatactaatggtagattaattatgctaaaaaaattcgtctcgttttttcaggcaagttataaaattagttttttcattcgtttccaaaaacccctttcgacatccggtcaaacatccgatgtaacactcaaaaatgttcatttcgcaaactaaacaggccgagattgagcactgtacatacataaaatccggtgccggggacaagccccgtacgtctcgccgcgcgcatcgtggcgcctagtagctctctattagagcaagttcagtatagccaactattagctctaatttatctatagtcaatctaatagcttattcatacaatagttacatactacactattaatacctggtcccacgtgtcatacacatattatgtcttggagtccgtgctacagctggctataaatttgtagcccgctatttttctctcttcttatttatcttcttaaaatatgtttacagcgtctgctattgtacctgctctaacctctcgtgggttgcctgccggcgatggcgatggcgatggccgagagacgcgtcgtcctgctccgtgcggcgccccgtacgtccaaaagcgcatgcatgcgcatggttggttctggtcgccgtcgtcgctttcgcccgcgtgggggtgtcgtcgctgtcgcgcggcgagaggccagccagggccaccacagtccacagctgctgccagctgattgcgttgcaccgcgcgcgcgcccgaattattaccgccgcggcgtgcgtgcatggcatggcaacgatgagtacgacctctctccgatggcgtgtgagcgtggatagatcggtccaggttctccgcaaagggcaaacgcattcccggccgctggtcccaacccaactgcagttcgtgttaccaactactcccctctccaacactgtaataaggggcggatcctgaaaaaaaaaattagggtgcttaattacacagtgtttcaacccctgttaatttagaggcttttagtttattatttatagtgaaaaagtcgaagagaatgctgcgaagatatctatagatcttgtgaggtgcagggggacttgacgtgggatccgctcctctgcatgtatcatgcttgctgctgcctgctgccaccggcgattcatcatagccgttgcgtacgtgttgctttcctaacaacactgcatgcaactgatggtcgtggagctatatacaagagtactctatctgttaaaaaaaaactgattatgtaaccagtttttttttacgcagagtacggttgcattctttactcgtgttcttaacttcacccctactcgctttttacatgaacgcttcccaaactatttaaatgtatgtttcttaaaaaaaaagttatatagaaaagttgtactataaaatcacactaatctttttttagaaaataatacttaattaatcatacactaattgataagttattttccaactcagtttgtcaaactcagactacagctggtatgatactaaggctgcattcgttttggagaacaaaggatgtgcttagatggtggaaaagttgggaagttaggagaaagttggtagtttatatgtgtaggaaagttttcgatgtgatgtgatattgggaatttggggggaactaaacacggccaaagggagtttgtttgttccgttttccgcgcataggcttcccacactattaaacggtgtgttttttataaaaattttctatatgaaagttgctttaaaaaatcatattaatccatttttgaagtttaaaatagttaatacttaattaatcatgcgctaatgactcacctagttttacatatctttccaatcttctcgatcccctctcactcgagcattagggcacccataatggttatctataggctctctacaagagatctatgtcagtatatttttctacatggaagatattaaatgaagagagagagagcaaagctatctactaacttagagatagtctataaataaaaacgaggcaatgcatgagagagctatagatacccatgtagatactattgaggtggtttactattaatctagtctattgctgagatgtacatgttttatagagaacaccttactttactattacagatacttttagtgtacggatctagtagtcatcggcatgcagctagctgggatcatcgaacgaccaacgtactccgacatagtacgtacggtttcgaccattgattgatttgggtctcgtttgattgtaaaagcaaagctcatctgactgatcgagtttagctagctactgggcaattggggtctttcttttcatctagatctcccggctagcttgatttgcgaaagagtttcctactttcctttgtttataaagtacgtttagtgatcgatcgatttctttgtttataaaaagctctgaggatggatgcatcatcattcatatcctcgtcactgacgataacatgaggcgcccggtcgattggcacgccactaatattattgccgtgtcgctttcagcactgcgaagatagcggtagcaaaggtgcctttgattgattgattgatttttaagggtgattgatacttagtacattacattcctagctgtagcctgtgtttagttcacactgaagttgaatagcagttgggtactccatccatagctgaggatgaaacacaatatgatatctagattcattctattagattatgtcttatcccttatgttgatttttttttgacggatagagtacttcgtatagtctagctatacagtgtcttcaggtgttgcagaagtctgtgtgctgttgaacgaaccagataggagaaattggtgtaatctgcttgctggggtcatcagaaagcaccaggcccgatgatcaagacccacaagacaccaaattggtggcccctgtgagctaaagtaaggatacctttgatttgtagaaaaaatgtagaaattttggaggatttcaatcctatagaaaaaaaatcatatgaaggcctttgaaacgaagagttgaatcctatccaatcctttaaaatttctatggaatgggtaatcctatgcacatttggggaaaagttagcaagagctctaacctcttggaacatttcctctgagtctatctctctcatctgattcctgcgtttttcctgtggtccaatcaaatggtcattcctgtgtttttcctgtattttgcaattctctgttttacaattgtattcctgtcagaatcctatgtttttcctattcctctgtttgttcattcctatgattcaaaagggccctaagctttgcaacatcggcgatccacttccactccatctgaatgctgtcgtatagctgccgttcaggctcaaaattgcaagttgctgtttctgaaaccgatggaattcagtggagaagatgcacaagttcagtaaaacgcttgatcacttgttctgatagtcagatgattaggaagaacacagaagtacaaaacttggtcaccaaagattagttcccagctgactactctgatggtggtgccacatcataatcacaacagttgagaaacatttgttctgatttattaccttgttcaataatcacacgctcttttttcccctgatttattctaattattaagagttcccaacttctagtgagtgagtatcattcttgtttgcgcttttcagacttcactcgaaggcttgcgaacaagattgaatgatgagctatatatcatcttgcaggttgtgatctttgcagcgatgaacgcaagagtttcagtacaacacttcgaatggaatagcgatggcgtccgacgaggcttctggttgcaaagaatctgaccccacacgtcagagtaacaacaagtagcaacccgagttcatgggccacttgggccgctctactacttgggctctgggaggttattaggtccacgcggtgggaaatcacaaggattcgctcgcagcagccagcagcgaaggttgccgttgccggttgatttggtgcgagagtttagtaccacctcgcctgttcagctgggagaggcggtcgcgctagctataaaaggaggccgggggcctccgtttcaactcatacctttctcggccttttggctaagatcaagtgtagtatctgttcttatcagtttaatatctgatatgtgggccatgtgcccacttcgatattaaatttattttttgtgggggagggtccaccacagtggcttgccactggggccctcgcacgtcgcccaggcgttgcactgctgcccgggcctggcgcaccccaaccaaatcaaatttaaaacttttaactctttagaagttggtttaatcacaattttttctgaagagcatgcttttgtaaggggggactgtaatagaattgtttaaaatctaggttaaaatggttaatttggattagcagtggtccttgcgtttacattttccttcagatccatcttgatgctgtaaaacgcatgcagcaacaatagagcagtttgatgattcaggagctcttgtcttcctctccaccccctgcgccccgagcccccgagcatggcgatcctcgcatcccctgctccctctccagctccgtcccgcccgcagggacgcctagttgtcctgtcacgcaagagcttggcaccccactggtcatttgtttgttcttgcagtcagatatatatataggggatcgagatcacctgcggtaattaaatcaatctggagactggagttgcggcgccggcgctgtggacgaagacgacgtagggttgctgcatggtcgatctctctcaggcgtccagtccagtggcaatggacacggagaccggcaccagcaaggggcaacggcggcggcatcgcatgcgctgatgatggagacacggccgaaaatcgcaaccgcccgacggccggtgtatgtgctctggtgaagggcggtgccggtgcaattgggcgatagtttagcctgggctttaggtatgcgcgcggcaagcaagcgttccgccgccggtggcgagcagtggtggtaacccggcggtcttggatagcctgctcgttaatgttttcgaaaccgatggaattcagcaggagatagcagagggctagagaaaaatagagagcgaccacacatcaacctctcaatacgatgaaaacaagggccagagatgcaataagcagtaaaaccataatcaaatcggtacaaattgaacgagaattgttcaaaacaggcatcatcaccaaataatcaacaaatagatttcaacttcattgcttgaagacaacttcaaccttccatgctttcgaagagcagcaagtagcttccatcccgatagaaaaaggcagaacgttcatgtaggaattaagctaaaaccatccgcatagatagatgcaatggcatgcctgagctcagtaataactaagatgaagaacctaactccagccgcactcaacaatacggacaaatattgctaccctgtaaaaataaagttgcatatacaaaattacaaatattgttaccctgcataggacatcgcaaaccagagcagaacctgcaaattacaggaaaaacgccattgtatacatattcagaaaccggcttgacgacttcaaggcaaatgatgctcgtaacaatggtaagactagggtacaagaaccaaaacttctctcttgatctggaaactggagggtggtgagacagaagacgcacccaccaccaagacctgatcattgatgtacccctgtgacccgctgttaacctgcaaatattgttaccttgcatagaacatagcaaaccagatataagcaggtaaagtacacacccaggtaaagtacaaggtaaaggacaaccaggtaaagtacggtaaactgcattgtatacatctggtgcaactggtaaaactttgttcctataattttttaccctaatggaaccctatacaaaatccaagaaagatgaattccttttgcagcatatacaactaatgtttgcaacggactgttactagcaatcttaacgaataaatcatcagggatgcctgtaagcctacccaatctggtactctatctacgaatggcgaaggaaaaccatggtgaaagggatcgcctcctcaatgctccacatcaacagcgcctgcttcgtcatccatcatctacttcctgccaatgaggtgaatgaacatgcttagacaacacagctggatgccaactgaacagaaagtcaacttttgcacaagtgaaaaccatgcatggagttttgccttgccgatttgacatgatatgcaactactattgaacatgaaaaagggtaaataaaaagtacaaattggcagagtatcatgtttccaatgctaaaagctagtttatttttttggttgtaaaagaagatggcaagcaatatcacggaggttccacatgttttacctcgtaactgcactagtactactctcctagaataccttaagaagttgactgtaacaaaacctatttatgtgactctagtatgaaggacttctagcaaaattatttaattaattttggcctgttgagaaaacgacagctaacataacgagcttaaacgtgaaactgtacgacatcaaaaacagaaatgggaactggtatcatgtagtttttaccatatatgatcacacagtagaaaataaataaatatgtgcagtactcatcacgaaggaataggggattcatcaagcagaaatagcaactcaccttagaaatgttagtgcactgcaatggaaaaccagctggctcaattgtaagatatctcaattgacacaagaatctcagcaaagtacagatgaaatccaaattatgaccagaagagtggagcatggcaaggtatttgcaccccaaatgtttctctctgtcagccctaccgagaatgttataacttgaccatggtaaaagttgtaccagatatatgcttattgcatgtcattctcaataatttgaacgcttcacttgtcagatcagcataattccaaaaagaaaaccacaaaaaattgaataatccacaaaagtagccttctcccttttgtagattattattgggttgcacgactgatatatcatcctatagcacaagtaatatatgttgtgaggcagactggcaacccgcaccactagtcagcagaacttgtacgagagcagcagcaaaaagttgggtagcagacagaacatgccagatatataagttttcttttcaatgtccaccataccctataaagtcaccaccacctgaagatcaatgtcatgatcagcaggaacaggattctcctcaggtttattcttggtttgcaaaggaatagattcctttatcttaccattttctgatgctatgatcagtcctttgtcagatatcctaatgttgaaggggtcatcaagaaaaccatccgactgcgtcactgcagcagagtgttcattattttcagtacagtcaagctcttttggacttataatattatcaagctcttctggacttttatgactatcaagctcttgtgaacttcgatgattttcaagctcttttagactattttgattatgacactctttttggcagtcttgattatcgagttcacccaggttattgtcaagactatgacactccttaagaatttcatggttgttgagctcatgcagacagtgtgcttctccaccagcacatatgctttctccagtactatcaagctccttcgtattgttaagattgaagaacatttccatattgacatcaaactcttctatcttgttatgatcaccaagctctttctcagtgctagtactatcaagctcctttgtactgttaagattaaatagcactttcatattgccatcaaactcttccgtcttgttatgatcaccgagctctttctcagtgctatgactgtcgagctccttttcattatgatcttcctgcgcttgcaaacaaatatgatcaccaacttccttttcaaaactatgatcattaacctctttctcaatgatatgaccatgagacccttccagactgtcatgggcaaccagatctgttgggctcctgtcttccttgtcctctatagatctgcttgtgacgtcatccttatcagattgagccataaggatattatctgtttgtacatacggacaaacaggtacatctttcaaacggcatctatggcacttgaaacctatgagattattaacattctcaagagtaatagaatagatgtctccatggaaccaatctacaagaataaacaattctaattagaacaacaatttgtgaaatacaaaagtttgcagtggcaggaaaagcaacacaagtcactgcacaaccatcaaaaaattcaaaaatgataaaatatggttacataaagaagtgataagtaaatgatgctcctcagtatgtccaagacctaaaagtaataagtagaaagcacataatccacaggaaaaggatagtaaaatctgttaatttgtttcaagaggtccaagcaaatttcagattcatactgtccccatctcttagggccaaatatagtcattctatacagagaatgcaggtttaaaaaattacctccacaatcttcacaggcaatataaatagattctccactgtagcatttctggcatagacggcacactggaaaaacttcagacagatcagcatcttcgcagggaaagacaactctttctgtcctaaaagatattgcccgatcatcatttgggttttgtgtccaccgaaggccatctaaccagtatgaataatgagaagcagtcctcctcctctttgctgaacgctcagatatatttgaattgcctttcatgtactttgaatataatctttttgatatacgtttagctggctcattcttgggcacattggctggttctttcacacgcaactctggcaatttattctttgactcattcagcgggtacttcctaggtcggccacgcttgcccttattcttgcccatcttctgcttggatttggc

SEQ ID NO: 20548 - DNA, 3501 bp, Oryza sativa
ttggttatcatggatcttgagcggatttaaagacatatactttattcatatgtgcaattcgtcacgtttaggttatatatatacatatgtcgtatctagtttctgggatatggaaatgtttgttattcttgtgcgcctacttgtggtcttcaaatgataaggatgtgcttttttttgagtgccaaaagagtcaacattcataattgatggttctacattttcaacaaagttatcttctccaatttatacccgtgatagtttcaatctttttgtggcagatctgccagcagcatgaattttttacaaataagaagggtggtcgacatgtaaaattccatacattgataactacttatgaggtcatacttaaggacaaagctgccctttccaagatcaaatggaactatcttatggtcgatgaagctcatcgattaaagaattgtgaagcatcgctgtatacgactcttttggtatgaacagtatttcctgaactaaaaataagagtgagttgactacctggaaagatgactctaatttcactgcccccacacaggaattcagcactaagaataagcttctcatcaccgggaccccattgcaaaacagcgttgaagagctctggtatgcgattttatgtagatttatggttggaagttcatattcttattgtgaataggtgactagagactgcaacatgttcatagctgttgcattttgcctctatatatatttttgttttacctttattattctttgtcccatttttgctgagtgtattttaaaatctgcagggcgttacttcattccttgatccatctaaattcaacagcaaggatatatttgttgagagatacaaaaatttgagttccttcaatgaaactgaggtaaatatttttctctttcaaaatgtacttttctcttgacctagactattctgtcagcattggacatccataactttgcttgatttatttttatagcttgcaaatcttcacaaggaattgaggcctcatattctaagacgagttataaaagatgtggagaaatctttacctccgaaaattgagcggattcttcgtgttgatatgtctcctctacagaagcagtaaatactttgtactaatgtaagtttatgttccttttattcatcattgagataaaatcatttttcctaattaattattaggtattacaaatggattttggagcggaatttccagaatctcaacaaaggagttcgtgggaatcaggtgttgataaatcttgagcactattttattttagtaatgatttcttctattcttctgttcctacgtagtcgctatgacggtgtactacttttatatatgcaaacctttattgcctgatttactcgatgcattattattttttgacaaccaccacttatctttaacttcacaactatttataattaggctgttcacaatgcttgtgtaatgctgattgtccttcatggaatatcctgtatattgtatttgagaaatgagcagtgcatatgtagcagttctttttccaatcgagggctatttttcctgagctaatctgcagttcttcgtgttttcaattttttatgattccattttgttttttctaggtgattcttcataatatacacacaaagaaaatagcattaacaaaacacagattcttctgcaggcacatttaaatgtctggttatttaaattattctagctaacttgattattgcatatgcaggtctcgcttttaaatatcgttgttgagttgaaaaagtgctgcaaccacccatttttatttgaaagtgctgatcatggttatggtggagatagcattggtgatcgcaataaagttgaacgcattgttatgagtagtgggaaattagtgttattggacaagctgttggtaagactgcgggagactaatcatcgtgtgcttatcttctctcaggtttgtatgtttggtttacttgccatttgatgcccattgtgttgcagtctatattagtcgaactaatagtatccaatacattgtctaaacttattttctacaatccattagcaatatgttgcatacgtgcagaaatttgcttcaatttgagaaattagtatggtgagtcaagttaacaacgtggttagttggttgcatagttggttagtgttttgtttgcagaatgaaacttctcttcagggatgataggaagagctggctcagtgtatttgttttgatactttgcagtgttttttctgttcttttatctgacagaacaagcttattcaattggttgcttttgttagttggtaaatgtatttatattttttacaacacaattatggtttccctgcattttgaaagctattgtgttactagagccacatttgtattttacaccaacatcaatatatcggacaacgaatatattatatgtcgcttgaaagcatttgcaccttagataacttatataagtgctttctgaatcaaattgttgcagatggttaggatgttggacatccttgctgagtatctatccctccgaggattccagtttcagaggcttgatggcagtacgagagcagatcttcgtcaccaggccatggagcattttaatgctcctggaagtgatgacttctgttttcttctgtctacacgtgctggtgggcttggtattaatcttgcaacagcagataccgtgatcatttttgattcagactggaatccgcaaaatgatttacaggttcccctctctctctctctctctcatatatgggttttcaatttttgtcttgaaagagtttctcatatttcgggtttttgaatgtgtgatgtcatgctaggcaatgagtagggcacacaggattgggcaacaagaaactgttaacatatatcgtttcgtgacatgcaaaagtgttgaagaggatatattggaacgtgcaaagaaaaaaatggtgatgagcctgatttgtttcatatattgttttaataaatataaacgaataacctctgacttgttctttttctatatatgtcaggttcttgatcacctagtgattcagaagctaaatgctgagggcaggctcgagaagaaagaatcaaaaaaaggtggttccatgtttgacaaggtaagtttctgcaccagttatttagtttacttaggtatttgggttgatttggatgtcatattggtttggtacaacaatattacttaggtagttttaacaatcttttgtatataagatagatttgtatatttgaaatctatctattgtataattgtattacaaaagattgttaaaactaccagtaacttatcaactaagcgattgttagtgatacaggctgtaagtctagtgtggtatatatatgctcatgtgactagaccagccttctttcaagatacccaagctataattctctctacaacacaagagcatttactgataattaaaattctgagagaaatgcattaaatagaatctggcttgtcacctcacttgtattttctgt

SEQ ID NO: 20549 - DNA, 1519 bp, Oryza sativa
catcttctgaaaattcagattgtgattttacctgttaatgtaacaggaagcatatgagtatgcaaaatagcatatgatagtatacacaaaatcatataaccaactagaattcaataaactggaacaacattgatatactataaagcaactcactttattcctacgaagattgctgacagataaagtcccgtcgccactgcaaacaacccaagtagttagttctgattaccaaacatcaaggcaacgaagacttctgcttagaattgaacgagcaaaagtaacacaaaggaaaaataaattcagtgagacaacaaaacattagcatcattaatacaacaccattgcactaagaaacaaatgagtagtttctgaaccagtatgaagtaaattatataaggttcaaatcctggtatccacaaatatggctttgagcatccttagttggtgcagaagccagaaattatagttcctttgttaaaaaaaggaacgtggaaattttactgaattcgtgctggaatgtaaaagtttcctttcaaatccatgtgttccaagtagggcctaaatggctggagctgcttcatgaataattacataaaatggtgtataagccaagcaatgctgatctctttccaacaaaaaagcagatttcgcatgcatactgaatgacatgcatattgatcagggcttgaaggcgaataaaattatttaccttgttgccagtatttgagttgagtcagatacatatgtcatatctgatatgtaatcttcgtggcagtgaaaggtgttacagcaggaacgttcccgagtatcccatacctaaaattgcacagctattttacttcaaattgactttaccaaagaggcaaactatagtcaataacacacaatacaatgcaggtgtcagtccaaaaacaaatgtacatggaattttggccaggatggtcttttctgcttattacccaatcatgtgctgatgtgcatatatgtatactcacgaacaagacatccttgggtaaataagcttatcaataatatatatttgcacaccttttaaatatacaggttttaagagtcaatgataaagctggcctacactcaacaaccatgcacggttaaaccagattgactacttataataccttaatgcaaccttcatcatcacctgaagcaacagtagtttcagtaagacacacaaggcgatttatgccattcctataatattttaagaagaagatatttagttccacaagcaaaattcaaagaaagaactgcaagtctgcaaactgacaaaacttactcatgtgcatcctccaagcgagcaatgggtttgccagtttccacatcagaggcaagaattgagcaatcagcagatcctgtcaaaatcactgaaacatggcacaaagtcaagatagcccgcacaacatggttagaggagctaacagatgaatgtatgtgtcttccttcccatccaagttagttttacaattccattgtgaacacgaatctgctaatgttgcag

SEQ ID NO: 20550 - DNA, 1259 bp, Oryza sativa
tgaaatacagccgataatccaaacatttagcatttactttctaccataagctgctgaaacaggcacctagtagtacacaaaatcctgaagtatacataaattccagggaaatctcaaaataagcattagcagcacgaacatctgtagctcaaaaggtggtaattgtaaagttgttgaatccaaggagcgagagactaaaactaacacctaaaaactaaaccctaaacacctgatacaatgataggatcatcaatgcaaaccacaaactaacagagcgcgatgaacagcagcgttggtcgtgagtacctctcaggctgcgactccgcggcgtaccggaacctgcgaaaccagctcgataagaagagaagattaccaaggtcgcgataagaacaaactaaaatcagaggagggggatgaagaagtagtggggcgcgcccgtggatcgtacaggtagagctcgccggtgatgagggaggttgcgacgaggggggaggacgggtggaaggcgaggtcgaagggcatctcctcgtggagggcctccatggcggcggcggcggcggtggcggcagacagaggtggcggcggcggcggcggtggcggcagacagaggaggcggcggcgcgacggggaagaagcctaggagacgggagcaatgcgcttgtagcctcacgtaaagcttccttggctgggctgtgtacgagcaaatgggcctcaaacaaggcccaaaaacttttttttccacatttttatttgcaaaaagtacaccaaaggttcctcaacttgtcattgaccccaaccacaaaaccagatatatgacatccctcaacttatgaaatctgtggttttaatcccagttttatccgacgtgacatcagcgtgggactccatgtgggtcccacatgtcaggatgccacgtcagcactctttcttccccctcctctcccagtctcccttcctcctctctctctctctctctctctcattttctcctctcagggcaagccggccggcgggtgggaagaaggtcgccgggacgaggcgggagaggaggtccggcggtcggcgacgcggcggcggtggcgaagcagggtgggggagtcgcgcagcatggagagtgtggcagccaccgtctgtacatggccctcacggatgtcgagctggacgcggttcccgccgtccgtggtggacatggcaccaacgtcggcgtcctccggcgacggctgccgcggcgccattccctgccttcacctccccctgcc

SEQ ID NO: 20551 - DNA, 12554 bp, Oryza sativa
agtgacattttagtaccatatgcttctcaccttgtaagttttatgttattgttatttgagtaaatttcgcaaaactatatgttttatggtcaagttacagaaagtcacgcatattttgacacttggcatttaactacatatattttggcagtgtcgtttcataaaccacactatcaataaatggattcacctgtgagatgatgtgactgttccaccaaagatgagggtcaagattcaccaaatcgcttttagtcgagttaccgtcaccacatggtaagacggttatcccgtaaccgtgcggttaccatgacatacggttatcacgagaattaccgtggtttcaaacctaagaaggttgccacgtgttataacagtggttctgtaaaccctggtgagggcattatcaaggcaagcaactcatattgtgagtggcctcaagtgctatataagctggacacacatattccagtacgatgcatgttagctgtaggttagtatctttgattttgtatattagccccttaaatattttttatttaaacataagcccaaaaattcaaactttatacactcaaaaccagaaactattaaaatgtcaccgttctcccccttcctccttttggcaggctagagttcatcagccggccgttggagagttgagacctcaaccctatttgttgtctcctctctccttccttttatcgtcgggtgttgtattcgagcaagaggcgaacgatgagcattttgtctccatgcagttgaaacctcacctctaccatcgatccacatcttttggctcatgcaaaaggagctgcgcgacctcgtcttcctctcggaggtactgccaagaagaatcgcgagacctcgtcttccttgcctctcccctccattctccaacaacgagatcggagcaacacaatcgtaatctagttgctcctccccttttccccaacaccaccatttctttcttcaatccggtgctgatgcatatcaatctagcattgccggtcaacgttctcgagcaaaataatggttagagttgggggacaagcagatccaaccagatgtttcatcttcttcttgttgttggttcttgacgacagtagatgcatcgtcctcgtaccacttcctcatgtcggttattttcttccttctttctcctgcttcacgggcccgacctatgtggcttggtttttctttacgagactatccttgcatgtagaagctttgtgaagtcacttcaccagctaatgatgttactcatccgtaggtgtattgtaaatgaaagaactactctcacatgggtcgctgtcttgctgaaatatgggctaacaagctgtgggggttcatatgtcaaccaccggtaagttatatgatccgtttccattgtgaatgtcgtaaagtacaatcatgctaaatgtcaatcttttgaaaactgaatcccctagcactaaagactactaaaggaaggggcgtacataaatcaagtctaaaaatacagcaatctatagtttctatattgggaatgccatggctaacagtacaaatacggtacgaattggctgtccgctgcaaattggagtctcgtacataaaatctgtcaacagatttataattagtccctaaaataagtccaaaactctccgaaaaagtcatcggatcctaatccattatttagtacagtggaaccaaattgtcacatgccatttcaccatttttttctataaaaggagaactcgtacttttggtaacaaaaaaaaaatcaaggacaaatcattctctcccatctctagccgccgcgacgcgagcgagcaaagcaatggaggactccgccgccgccgctgccgtcgccgtcgtgacggtgccgttcccgacgcagggtcacctgaaccagctcctccacctgtccatgctgctcgcgtcgcgcggcctcgccgtgcactacgccgcgccggagccgcacctccgggaggcccgcgcgcgggtgcacggctgggacgccgcgggcgcgctccgcctcgccgccgtccgcttccgcgcactcgacatccccggcgggtacgcatcccctccccccgacccctcgtccccgttcccgggccacatgatgcccctcctcgaggccttctgcgacggcgcccgcacgccgctcgccgcgctcctccgcgagctctcggcgtgccaccgccgcgtcgtcgtgctgcacgaccggatggcggcgttcgcggcggtggaggccgcgcgaatccccaacggcgaggcactcggggtgcactgcctcgccgcgtcgtacaatgtcgggtgggtgtaccccgcccaccgcctgctggtggagcacggcctcgtcttccacccgcccgacgcctgtacgaccaaggagttcgtggcgctcgccaagcggatgggccaggagcgcaggcgcgcggccgtcgccggcatggtcgtcaacacctgccgcgcgctggagggggagttcctcgacgtgctcgcgcagatcccgtcctccgatggcgacaagctgttcgccgttgggcctctgagcccggtgctccccgacacgcgcgcgcggggctcgccggaggagagcgcgcgcccgcggcacgagtgcctgagctggctcgacaagcagccgccgtcgtcggtgctgtacatatcgttcggcacgacgtcgacgctccgtggcgagcagatcagggagctcgccgcggcggtgcgcggcagcggccagcggttcatctgggcgctgcgggacgccgaccgcgcggacatggacacgcgcgaggccgaggcggccgtgcacggcgcgcgcctcgcggaggcggcgggcgggctccgggaggagatcgcccggggcgtgggcgtggtggtcaccgggtgggcgccgcagctggagatcctggcgcacggcgcgacggcggcgttcatgagccactgcgggtggaactccgtcgtggagagcatgagccacgggaagcccgtgctggcgtggccgatgcacagcgaccagccgtgggatgccgagctcgtgtgcaagtacctcggcgccggcgtcctcgtgcggccgtgggaggagcgccacgacgtcacgccggcggccgcgatacgcgaggcgatcgagagggcgatggcgtcgggggacggcgcggcgctgcgcgcgagggcggcggcgatcggggaggccgtccgcgccgccgtggccgagggcgggtcgttgcgccaggacatggacgacctcgtcgcctacctgacgaggtgatcgtctcgtcgccggcgcggcggctgagctgcactccatgccgctgttcgcgccaaaagatcactgcttgcttagaaccactcttttgaatcttataattgggataatttcgtccaggatttaagctactactgtaataagtttgggactgtgctggttgtcctcgatcctgggcacctggctctctattggacaatttagtactgcgtatatctcattttcttttggctcccagcacacaataagcagattttgctggagacaatgataatttgctcctgtaataataagacaacaagtctataaacatatgcaattttaattcaacaattttagaatatagacttttccatttaaaaacacgtaagggcttgtttgaaagggtccatggatgatagacaaaactgagtttatgacaattattcgagagcacaaacaacttaattaaatattactagctgataaattgattttaaaaaattataagaaatgcaaatgaagattgttttaaaaaagttatacggtttagtagttcagaaagtgtgcccgcaataattccgtgactataattagaaaataatgggccttaagcatcaggaagtcactgaattgacagatttgcataaactcagtaattatatcacattgcttttagattcaaacagcaacactcacacggtcccccttgattccttgttcaatgttcattggaggactgatgtatacagtctattgccctttttacagtaggcagatatggttaaattttgcactaaaaatattagcatatggtcatgctctaacaattaacattgacatatatgcttttttttaaaaaaaaattgaagtataattgatgaatttcccccaatttcatcgcgttatcttctgaacccgccaaaccagcaacagcgcggcagaagaaaaaccccacccaaaaccgccgaacccaatcccgactcctccctccgccgccgccgccgccgccgcgatgccgaaggcggcggcctccctcgcgtccctcctcccgcagctatggcaccgccccgtccagccccctcccttcctccaccgcgccctctcctcctcctctcccctcctccgacgccaccgcgccgccctccactcgccggcggcgcccctctccgccgctgcggtgtccacctccgccgcaaccgtcgaagccccagcgaccgcagcgtaagctgccctcttaccctcagaccaagctgctcttctccgagcgatgaactgactggtggtggtatatatgggttcttgcaggtatccagtttatggcaggctcttgccttgccctctgcaagatgaccctccaaggatcgagcacctcgtcgcgcgggaagacgaggtcgccgtcgatttcatctccaggtcactcaccctccctccactgtaagcaagcacccctatgctctcttttgtttattgcatcgttcatgtgaaattagtagtggtataagagtaaatgagtaacattgtgggtgtgaaggtacgttgcagatctcatcaagtttggggctgtttactatgcgcttgtcgcgccgcagccgcctcctcacgcggctccggagcatgttaggatttttagagaggtgaccgagccttcggtcctgtgccgtaggaaatccattaaagggaagacggtgagggaggcgcagaagacatttagggtgacagaccccaaccagcgcctcgaggccggcacgtatctgcgggttcatgtgcatcccaaacgttttcctaggtaaagatttgaactttgtaatgtagaaaccttctatatattgtgatggtctatgtttgagctttgtttttaacttcccaccgtgaaatctttccggcggtcagtcagttatcaaatcatctcagatgcttatgtgtctgtgttttatctgatactgtcaggtgttatgaaattgactggaaatccagggtaatagcagtaactgataactatgtcgtacttgacaaaccagctgcaacatcagtatgtttctcttctctttcccttttctagttggcatctacaacaacctcatagatttggatttccaaggccacatatatgagaatattggatatgttttttgcaagtaattatctggtttattagtttcacttagtgtgtgttgcaagaatgttggatatgactttcagattgtcgtcgagtaggttacccatttggattttactgattattggttcacacatttaatgtgcaaatatgccactaatgtaagataaaacatgaacacaaataccaagagtgttacttaagagattataattggaagttcttggagttgatgatttaagaaacagcccaattgatgcatctaggcttatgattaaacttttttgaggctcacgtatttttttttcatgatttttttacatgtaggtgggaggagcaactgataacattgaggaatcctgtgtggtttttacttcacgcgcactaggattagaaacacctttaatgacaactcatcaaattgataactgttctgaaggctggtttgtctcttaccattttacttctacaaactaggtatacataagtgtacaatgtaattaagtaatgtcatgattgtttgcagtgtggtattatctaaaactaaggagttttgctcagttttccatggaatgataagggtaagctactttatcgattactatgatatataacatggtattgagcctctagtaatgttgttaaacttttaattttgtgacaggaaaaacaggtcaataaacgttaccttgcacttactacagcacctgtgtctacaggaataatcacacattacatgcgtcctattaatcgtgctcctagattagtttcagaaggtaatccttgaattgcagtttattattgcttctaaaagttttggcgacagttcattcgtggctaggtgctaaaacattgttggctcttagtgtgcaaggtcaaaaacattgttggctcttagtactttaacagctcctagattagtttctactatgcatatgttttggttacaatttacacacatattagagtttgggtgagattcttgtgtactgttatttaaatatatatgcagtcacacagcattgtaaattgtaaccgttcatcaaaggtattgaattaactgtttacgcattttatactcacctattttacgttgtgtcatttgtcatttggcttgcgccattacttactggattttaaacaatggtaaagataccttgatatgattagatttagaactaggatcctacatactacgtacacgtgggcctgactggtaccactaagaattctgaattagtccgtggtcggctcgttgtattctgacctcggatgttttaccatgcatgcatatatcataaatttcctgtctctgttagtagattaatattcttgtcacacttaacagatcatattaaaggatggcatgtttgtcaaatggagatattggactgtaagaaggtcccatggccaagctctctgatcagaaaagtccataaagtagacaactgtggttggccccaacacgaagctgcctatgaatgtaaaatcaatctcttgacaggaaaaactcatcaggtatcagtactattgtattttttgagatgtcaggcttaaatgctaattatctttttgtggagaaggctttttttggggggctcagagaaaagatccatgactaacaaactctcacttagaataggaaactctgatttaaagtttgctttattctagttcaatttgatcataaacatggaccatgtgggtcagtgggccgtagtttcctgggttaggtaggctagcacacacacatttctgatgcttcttttgatagtttatactccaaagtccaaactagtatttgaagctccaccattgatgtactgaaaaaaggaaaatgagggggcaacaacaccattacataagctaaacctgcaactatttccttgggttgaatcatagcccagcgctaattatgttgttgcattgaatgagttgtcaatatgtttttgtttcgttgagtggtatggtcattgccaacattgtgtttatatagagtaacgggtagatgatatggtatgcagatacgagcacaacttgctgctataggcactccaattgtaggggattctgcctacatgacggcagcaatggcagcaatagttaatccaagcataaatccatttggtcgatggggacagaactatgatagtgaagatgaaaaggcagctgctgttgaagcttggatttcttgtcatggcaaagaaccaaaatcagtaattggcctacaagcatctgagatctcatgggattatgaaggtgaacaccattcttataaggcaggagttccatggtggcggcaagatgcagttgaatctgacttgatctgaagaagaacaggagtatatgagaattttagccctgaacctcagcctggggtggctcattttgtgtgttctggcagaggtcggatctccaaggttatttggccgccaaagagaaacataaaaaaaaatgccaaatatgaaaaccacagaatgcgtggtgccaccgatgaaaagcttacacgccaaaaatcttcccacatccttccaaaatatcttgctacagattattctacatctcagatgaaacttactgacagagttgagttgtacacttctagctgttatatctggggtggagtagctcatttgcattgccacacatgcaacattttacttctagagtgtaattttgtcagagttttgcccaaggtgctgtacatcttcgaaatttacatcttttgtcagtaacttgttctggtattttgtactgtcccgagatttgctttcctgcttcacatggcactgtttataaattgaattgaatttgaggtttcaccttttgttctgagctgtggtacacgggccaggcccaagctgaatgtcgacccagacttgaaagctatcctggtgtttttgtgggcctgtgctgaacagcggatgggttcgcgaatgctggcggcttctgctgccactttgtgacgagttgcgattcgtgcagggggcaatgacgtgattgctataggccaacgacacgagttatgacgtatctgaccagacaaatctaggctcccctggggccagtattggttgaggtaaggtttgtactgaacagttaggcgaggagataaagtgaagatgaaaagacgccacaaatccatccctaaaagggagatgattactatacttccgtttgttttgtttgatccgaatatgatacagccatacaggcatggtggggaacagggacagagctagaacgaaatggagggtggtaccactaatttactctattttagatcgagtttaagctcatacgggtgcctaagtttgtattaagggggtatatatatggtgaaaatagatgaggtatagctaaaaaattttcttaaccagtttctgggcacccccttaatatatactagcttcgcccctggagagaaagaacaatgaattacattcaacgtagacatgtaaaccttaaatatcaataagcaattattcacaccaaagttatcacataatttcgataatcctttctacattttcatacacttttcgtcaaaatttaatgattactaatagtaactatatcgaccctatttgtttatgattataagttgcctcgaatttaaaattctaggttggagaatttcttttttatgtgaagtccaccgttaaatttgaagcggaggaagtgtctatttatggattaaatcaaatatacaatatataaacctataaataaaaaatcggcttaaaagcttaaaccaataaagttaagcacaaacaaaaagggccataggctcgcccacacaaaacaccagatgaatggacaacgaaaagcatgcagctacaatagcctaacccagtgaaaaacgaactaccacaagaaccataaagccaagccaaccctctccgggaagaaagccaaacccaaagcgtaaatagagcgtagatacagcactacacaccgacacacggaccccacccccatcccgggccccacttgtcatccactgacccccacccccgtggcgcctcctcacgcgaagaaaaaaaaaattaggggttgtccagagacgaggcgagcctcccgaataccgcaaggcccagcaatacccgcatacaaaaacgcgaccaaaaaggagaagaaaaaaacttatctctgcccccctaatctccccttacccttctctctctctctctctcatagataaccacccccctccccgccgccgccgccgccgccgcgggaggcatcgcgtcgccgtccaccgggtcccctctcccccgcctgtctccggcgatcgccgctttcctccgccacccccgatccgaattttcgaaaaaaaacccccgcggaaatacggagaaaaatcgcggaaattcgttttttagagtgaatcgcacctcctccccacccctgagcccgcctccaccccccgccctcgtgctcgtcggcgacggcgatcgcatcggggaatagtcatcgccccccttgacgggcaatccccccccgcgccttctcttcgcggtccaaacctgagggagacagaggtggggggagcgagcgagcggcgtcatccttcctcctcgccggcggccgcaagaggtgcgtctcctcgccgcctcgcgggtttgtttcttcgcgggaatttgtgggtgaggggcgtggttgctgggtctagggagttgggggaagcctccgccgcgccgatttggaccgccgcgcgcccgatccgcgccccgggaggctcgatctggccgccgcgcgcgctgatctgcgcggcgtcgcgcgaatcggtcgggatttagggtttcggaatcctattcgaattcctcgcgcccgaggctgcgcggcgccatggttgccctcctcctcccactcgtcgattttgaatagagttggggtagagttatttcttcccttgggagagttcaatccatgtagcaccgaaatgatcaagccataacaaaaagcatgacaaaacaataggattagactttgatcgccccatttgaggcgctaaatgttgtcctaagagctactcgagtgggcttctaaactagcttcgtttgatgaactgcagggagtgatagactgctgaggccgtgagagtttttcatgtgtcgtcatggcattcttcagcaactctggaagcagggctgattcaggagggtacaacctgaatgagaaggctgaggatgaagctgcctatgagtcagttggggacagggatgtcgacttgaactctaggcaatggaacttaaatgagaaggctgaggatgcctatcatagtgatgaggagcaatatgatggtggccggtcaggtccgaactcctcggagaataaatctgtgcagaatgcccggaaaataaatgggccttctggcccatggggtacaaactttttgaaggattgtggacccacacagacggctaaggaagagcaattgaccagtaacaggggaatggaatatgggtcggcggctagttcacatgacgacatggatgctagtggagaggatgatgagctgaaccgagggcatggggaggtgcctgctgaggaaatgctctctgatgactactatgagcaggatggagaggagcagagtgattcattgcttcgtggtgggatgcgccgcccaagctgttctacttctggggctgcagcagaatctgtctcctctagacaaaagaagaagccgacaaaatacaatgcttatgaggatgaagatgatgacgagtacaatgatgagaatgatgatgaagacgatgatgacgcagacggtatacttatatctggaaacttgagttagcaaagcagatcagttactgttttaacccgctgctttcttggcagctgcaaagaatacagctcatcattgatcaacaactttctttcttccctattttgcagaagatgatccagacgatgtggattttgagccagaaagtgatactgaaaaggctgccgataaggttatttattgactcaagttcatgccaccccatgccataatattgtcctatgtattaagttacatcgtcatcttattatttaagctaggtggtttagtagtaattctagttataaaagattctggttggtatcttctttcttgaaataaagatagaaaactgccttagtcattgaaaagaatccactctaattgaactctatgttgcttaatactgaatgtttcttaaaagaataacacgctaaatatcactaactgccccttgaagcatctgaaaagcaatcaatgagaaatctgtagataggatgagacacacagaaacaagcaaggagtgaggctcgaagcttggaagattgatgaacctgtgttctttggtgtcttgaagaaggtcatttaatgcattaaatagttcccctgtgaactacctctgtcaactactgtaatgcagctataaactcttaatccgtgagctgtaggattttgtttattttcttaattgaacgatttgatcgcatttgcatgtatactgcattttattgggtgatattatggagaactgcacaccattagcacctgcattgcttattttataaattacgccagacatctaataacaagtgatatgcattcttttgctccttttctaatctataagtttcaatcagtttattatcataacttttattgagttattttcttctgaaatgctgatgatattgagttattttgttattgaattttaggtatttcagcactcttgatcatcaaatattaattaagttcactttcttttgtaacattaaaattttaggataagtttgtggatagtgagaactccgacgaagaagaagatgatgagcttgagctctcagatgatgatgaagatgattttgttgagaataagaggcaatgtaagcgacttaaggttggtggaactaaaacctccaagggaagaaagcttcctgtacaggttcaacgcaaacgaggggtgtcttttacagatgaagattcttcaggaaaagactctgatgctcccagtgatactgatatcagtcaccgagcaaaaaaacccgacaagttgcatcagaaaactgtaggccgcaaggatgttttctcaaatgttgattctcatgaggttcgaacttctggaaggaggaggacagctagaaatatttcatatgctgaaagtgaagaaagtgatgatagtgaggaaaagttagctaagcaacaaaagg

SEQ ID NO: 20552 - DNA, 2608 bp, Oryza sativa
attcctgcagcccgatcttgcaccatttgcctagtggagggccaccttccacatcgatctgtcgtcggtgttgccatcgccaccatggcaccatcttgcccttcgatgatttatttgtcctcgacttttcaaaaccgtgatgtcgtgtgttggcaatgttgccttttgatgatctttgcaagcgatgggttcttggttgccttgttgcgccgttgttggccaccatccatcattgggtagtgctacttgtcaagatactaagtttacatgtagatcttggagaaatcaaaggaaaatccttctaatctattggggaaaacaggtatgtgttccataacgaatcgtttcctttatgcacttcgaattattattatttcagtcaggtggaaacattatcaacaaaaacaagtagatttgttagatctattagtatatctacatttggatgtatatatatgtacatgtgtccctgacttatttttaagtgctggaatctgatgcatttgaagggatgggatggggatgttccatcgttgatgatagacatggaaggattagacggaatcgttgatatccattggtgtttttgcaggtgccgcttggatccactgtcttcaaccattaagcattggtcgaacttgtcaacgatcaaagtcttaggtgtgtagatcttggagaagacaaaaaggttaaagactcgacatacatgatttgtgtggaatttcaggtgtgttctaggcaaatccttttccatggttaaacactttgaaatttcaattattatgtgaaactagggcaacattctcaacaaaaatcatcaagctagctatcagtataaacaatagatgaccagaatgtagtctcatatctattttattttgctatttatgtaaacatgtacctccaacgatcatcattccttcctatacaaacacgagtggtttcatagaacttcaagcaagttaaacataaacccctcacaccgaaaaaaaatcaaccaacaagttcatctctataaaaagcaatcttttaaaacagtcctattctaccatccaattaaacacctacttaaaaaaaacctaatgacattccacattagccatgcatcatttcagcccaaaccaaaaagtggaccaatgctacaccagacaccccaaagaaaaacccacagtcactcacaaagcgaagcaaaggaaggaaacatcattctactgttccatcttttttttttttgcacctctctattccattccatttcaaatcaaaccttcgaaccaattctatccccccttggagccaatttttccttttccctcctccgtctcggctcgtcgtaggcgtcgcctctcgccctcgcacaccacgcgcccgaaacgcccatcccacgaggaggagacgcctcacgcctccttctcctcacccacaatataaccacgcctccatcttctcctcttccccttctcctcctcctcatcgccatcgccgcggaccaaattcccaaccctcgaagcggccaaaccccgcctcccccgccgccggggacctccgatccgggccctgatccgccgccgccaccccgatctgccgtctacgcgccttcccctgcccgcaaaccctaggaattcgggccttcccggggcggcggcggccgtgggccgtcgttcgtggctatggaggggttggtggggagggcggtgaggaaggagttcccggggttcggggtgttcgacggggtggtggagtcgtacgacgccgaggcggggtacttccgggtgatgtacgaggacggggactccgaggaggtggagcttggggaggtggtggggttgctggttggtgggtcgccggttggggtggagatggcgcatccgctgccgttgacgcccgggcggcgcccgaagaagcggcggcgcggggatgaggaggggggcgttggcgtgggcgcggtggtggcgatggaggtggattccgtggttctggctgtccccgccggtggcgcggagcccgcgtcgccggtggtggtggtggaggggagtagtagggatgaggtggatggggacgtggtgtcggagatggcggagaagaggcggagggtggtgagtccagggcctgagtcgtccgggaagccgcttcggcggagcgcgcggcaggcgaaggcggccgcgcgggtggccgaaatggaggccgccgccgctgtggcggccgccgctgaggctgaagcagctgctgccgcgatggccgaggccgaggcagaggctgctgttacgccaccgcagtctgggagtaagcgtaagcgtgcaagcggggctggcaggtatcggtctgtcgcgaaggatttggagaaggctgcggtggagaggctgcctccgaagccggagcttccaccctcgtcgcagagtttggatttggaaggtctccctgctctcgacgtctttcaagtgtactcctgcttgaggtcttttagtaggcagctgttcctgagcccgttcctgctggagacatttgtggctgcactgcggtgtatatatgtgaaccctttgattgactgggttcatttttctctcctgcgagcgatgaagagtcacttggaagatctcgccaatgaagg

SEQ ID NO: 20553 - DNA, 2221 bp, Oryza sativa
ctggaaattgaggctatacgttctgaagttgtttcaaggatgtctgagttggatgggaatgatgagctttgtaaaagcactcgtacaagaagaaaaaggagggcttctgctgtcaagaacctactgaattcttctcgggctcctgaagattccagtgacactgaagatggtaacagcgatgagtgttatctttgtggcatggatggtaatttgttatgttgtgatggctgtcctgctgcatttcactctaaatgtgtgggggtagtggaagatttattgcctgaaggtaattggttttgcccggagtgtttgatacagaagaatgatggattcaaaaatatggtaaagcctggaagaggagctgaggttctgggaatggatccacatgaccgactatactttggcacctgtggctatattttggtgtaagtcaatatattttgtggtatgcgcaaatttgggtcttttggctatgtagtgaatgggaataatcctctgccatattgtctattggttattagtagcttgcgtgattccaaacctcagtataatgcaaaaattaaattcacaattttactgttctgatcattgagttgccttaggatttaagaaaaatgatgtagcactttctcctgtctatgtactgcaccaaggacgtggtgccacctgtccatagaacaacacgtaagcttcagtcaagatttgtatgtgtgtactagctacgtgtgtcatacgagtctagatatacgcaatggacctatatacctagaaatgcatttaatttcatcatgcaatgcagctcgtgaaatatttcttattttctaagctagaggttttggaagagtaaatttaccaacttagcttatcctgttaaaactaaaacctatatatactttctcattttataacattctactgtgttttgtttggttataacaaccggaagatgatgttataagtgactagtcgaaatatttttcaaactgtattgctttttaatgactatctgccaattgttacacttattaaatatcccaatgcagtatttatgccattttttcatttatgcattcaggtgcatgcttgttcatgagtatttcctcacggcaaaatctagttcttattccttgcaattcatatgttatatttatatacatatttatatttatatatattgcagtgcagtacgagatgtttaccttgggaaattgaacctctctgtatgtactatagtataattgttacgttttgctacatcaaaagcataacatcattttgaatttgcagggttgagtcaactgctgaggattctctggactcgacatgtcattactatggcatttttgatcaccattcgcttttcaatgtgctaagaacatgccatccctcgtacagttcaatcactaacatgatatctttgttttggggcactgcaattgattcttttgattccaatggtcgatgtgaaaataacaaggaattcagtatctttgatgccaagatagactgtagtcatttattgccatcgaagcaacacacagaacatgagcagcttaagtcagataagaatggctcctgtgaacaattggcctgtgggaaagctcatgcctcggatccagatcggctggatcatgacacctctcaccacaagttctccttgagatctgcggttatttctgaaaatggaaatgcaactagtgccaagactcagcaagatgtttgttcttatgctaatggattgcctgctgagaataagatagaccaatcacctcacaaaaagataagtgattgttatatccattcgaaccctgctatgtacgtaaactactacagttttggtcaaatagcagcatcagctgctgaagagttgaaggacaagctatcggaaaacaaagaaggaaagaaagttggtcaggatgcagcttcattccagctaaaaacaatatgtaagaaatatgccaatatttttgctctgacagatcaaaagttgtctgtagagctgcgaaaggaaaaatgtggttggtgtaattcctgccaaatcagtggcggtgttgattgcattttcagagtcaccgatggcaaatgcatggagggtcttcagtcagaaaagaatatgaacagccatattattcttgccatacatatcatcttgtccattgaagaacggctaaatggtctactgattggtccatggaaaaatccccaatttagcagttattgg

SEQ ID NO: 20554 - DNA, 6012 bp, Oryza sativa
tgtttaaccattcgtcttattcaaaaaatttaagtaattatttatttttttcatatcatttgattcattgttaaatatactttcatgtacacatatagttttacatatttcaaaaaaaaatttgaataagacgaacggtcaaacatgtgctaaaaagtcaacggtgtcaaacattttgaaacggagggagtacaagagaaggcatcagtagcatgtgcacgcacatgcacaattgcgtctgtacattttcgttgaagattcagagcttttatcttgaaatgttcatacaaccgctgaaatttaatacgccataaaaaaaagccaagagatactttatctgtaaatcttgtgcagttcaaagtgaacataattgttcgatttcttttgtgcagggatttgttgaatgtactcatctcagggcctctgattcctcaattgggaggactgaaaaatctccagtacctgtaacaatttcataacacactttgcttaggacatgacagcttgaactcagatgctgagttgctggaaaaatactaacagatcatgtttgcagtcagttgtatgggagtcgcctaaatggatcaataccagcaacactggggaagctgaaacatcttgtgagccttgatctttcgaacaacctgctcactggcgcgataccaccttcgcttggcgccatcagcaatttgctaattctgtatgctattttttttacaacaattttatatgccgaatggtgaagaaattgaagtaaaatccggatattgtttgaagtgccaaaatgaatgctggttatatgcaggaggttatctgggaacaacctgacaggggctatacccccatcattgggcaatctgaagagccttgagatcttggagcttggcaataatgcactgagtggctctattccagcttctctcggcgatattgaaacattgaattacttgtatgtgctcatttctaaatttctcattgataagttataatatatctcctcctcaaaaaaaaaaaaaagaacttgcaagatgtttttaacttgaaataatattcgtttgaatgaaaaactaataaaactttaaagagattataaagttgcagaaatgttgatagaaatgctactagaggagactctggtataagaactaagaagcgaacgaaagcttataaagttacaattctgtattaaaaaccttgaagtatacagctttgatgtgtaattgttctcaaataaactgaacgatatgttttatatttatgtccagagatttgaatgacaatatgctgactggcaccgtgccattggaaatcctttctcgtcttgtcaccaccttggatgaactgtgagttgcatacatgttattaacatattgagttattacattccagagcatctgtgtccggcataattcatgccgagacatgtttgcgagagaaaaaaaaaaacatactgagacaaaactaaatttccatacaggaacgttgcacacaatgatttgtacggcacaaccaggaaatctgtaaccagaggtatatatgtatcattctaagattttgcattttctttatacatacatgccaaatgtgtgcttacataaacttcgaattgtcattcttgcagttactaccgtagtccatgacatgccgaaaacttcaaactgagtccagggacatgattctgtactatttcaggcatatttttggaaatgaaggaataaaataatatcgcattaccatatgctgaagagttttttttttccttggcattttgtgtttcccctgtggagcatatgcctgcactctacgcagaagcaaggctgcgcgcctcaagttacatcgtgtacccgagatcggaacgtgtgggatggcactcgtcgtgaaccaatcatggcatgtatgcaggagctcgtggctatgggctcctcttattttttccataaattggcaatgagatagaacagaaaagctgcagcaaaacagcagcaccgcgatcactcgtgttgttcattgtgctctggagttcgagctcgtgcgtgagttgaaaaatcgagcgagagaaccgacaccctatgtgctcactgaagtgctgaacatgtcctagcttaatgttcactttagtttgcaataggttggaattcaaactttgtgtttactgataaggttattccattattctattccatacctacatcaatcatttctacaacttcctaataattctaaagtaaatcagagaaaacatgaatacatctagttcacataaacatgtctagtttaatttatgcttcagatgaaagggaaactttcacctcggacaaatgcagttgttactaattaatactctagctgcaatttgaaccgaaccaaaccgaaagagcattttcctgttgttgttagtttcttcttgagttttgattttgtgaattgctaaaaattgtcaagttctttaggcagaaaattttcaaatgtaactatagtattattgcagtgtaattacattttgactataggcaaaatttgctacatggcatcgaaaaaacgtgtaattggctggtggacatcgcaagaatgagaatttactgtcaggcataaaaaaacgtgtaattagctggtggacactcacgggcttattttattatttccggtggatttggagagagaaacactggtgagagtacgattttgcccctgtcattgttccacttacaacgagggagcgagaaggcgagcaccgcgtggtggattggattcgattcatccccgcaaaccttagacgctgatccccccacttcatctccgactcgatcgccgccggtcgccataccgtacaagcatgtttccgtcgtttctactccgggcactctccctcgccagtcgcaaggcggcgtgcccacctcacccccgcgacctcgtcatgctcgccggcgcgcacagcgcaagccaggccaccacatcctgttgtcgtcccttctctaggcgctctccagcggcggcgtcgacggcacgaacctggtgtcacctaccaccactacctctggtggcgacacatggtcggaatcgggatatctacgaagcccgctccttggcagatcagcctgccggtgcgagcgcggaaatcaagttggggtcagatttggtggcttcggtgaccgctcgcgaagactctgctctcctccgtgctcgtcacctcttgaacaaggtacaagtccaggcagagcaacatcacctcgccgtgcacgacggctacgggggagtgagactggactgagtcttggttcgaaccagacacagtctactgtaagcaaaacgatggcaggggcaaaatcatactctcactagtgtttctctctccaaatccatcggaaataataaaataaggccacgagtgtccaccagctaattacaccttttttttatgcccgacagcaaattctcgttcttgcggtgtccacaagctaattacacgttttttcgatgccctgtagcaaatttgccttgactatattgtaactattatatgattgtagtgtatttacaccgtaactacattataacttctatatacaggttatttaagttatgtgcatttttaatagttatatacaagttatataaaagttacaatttaattatattacaatttgttcttcaaaacccagtagaactgcgattcatttcattaagaagaagaaaacaaatatttacaccggagaggatcaaagatcacccctccctccaaacaaaaaatgtctcttaattacattacaattatactatactatagttatgtttggcatgcggcagtatttaggtagccctttttttcttgcatagctcaggatttcgctttcggctcggtgttcaaaggtagaaaactgatgttatcacataaaccgaagtaggctatacctctccatgttctgtgcagttgcccctgtcaaccaagctcttgcgatcaatcgctcgcacactcccctccatagcccttccgccctcactcggtttaacccaagaaccgaagaaaccgacctggcctggaatagtttggcttttaaagctcttttttttccgacaatttctcaaaaaccgaacttcctaaaaaacgaagaaaatgactgaaaaaaccatagaaatctactccattgtagtaacacaaacgttatatgctttatgtaaatgaccaggtacaattttagattgtggtaaaatatgttgagggttaaaatgaagtgcatggtaatgagaattacaaccattaatatccaaaaaatatcatttactgaaacatctactcacgtgtttatatagcaatcgaaccaactagggggaaaatgaaaaattagaaaaatgaaagaaaaaaaaggaaataagtaataaattttattgtttaccaaaaaacaatggatttgctacagttgttggaaatcttcacatgaaaagatctcttacaagttaaataaaaaaaatcaaagcaagtagcataacaacgttgcatgatacctatatttctagaaaataataaggtacttaatgaaactgaaggacacctttcacaactcattgtatgtttttcaaagtaaatggataaaaataagtatgagtacaaacagacataatagatataaaaacaaaatcaaaattcattaccgtaagacacatgcctattacaatgtgattttctgctcgcttattctattaaaagtagcattagtacttgtagtcacatcaaaattctcaatccaaaagaaatctgaatctgtacctcccgtgtagttgaaagtatttttcactgattataaacaaaatcgacaacaataggaaagaaaggttcttcttatttttcatctgcttgcttgtctaacagacatatactaggctgcattcggtagtgagctttcccaacatataccctcgtttttcatgcacatgtttttcaaactgctaaatagtgtatttttttcgcaaaaaattgcaaaaaatttctataggaaagtcacttgataataccatattaatttatttttaaagttagttttagctaatacttaattaatcatctaatgagttgctttgtttttcatgccgaagggggaaagttcccagtcagagcaatgaacgcagcctagtatgtttgataagttagttttacttaattaatgccaatgtactgtgatactcggcagtataacagaagcatacacatgaacaatctacaaaataaatgtgtctaggtatagataaaaaaaaacccttttttctacttgaaatataaaattcctgcaggaaaaaatggccagaaagctccattgactgcaagacttggacatatgtgtcattggaagcttctatagaaaactttctgattgcttagatgacaagtacttcctccatccaaaaatataaacgtatttctagaatagactttgactaacaattactctaatacgatataattcatacaacataaaattgatgccatagattcatattcaaaagtatttatgattatgcttttgtagcacacaagtgatgtagagtaattgttggtcaaagttttatcctacgagataaaataagctttatatttttggacagagggtttatgttcatctgaccggcttcttcttttaccattgaagttaacctaacaaaagataagcatttatggtcgagagtcaatccaatgggtagtaggagaaagaattgttccatggtttccttctatggcttggtattggagtatttgaaactttaacaacttctgaaatagaatatgaaatgacagtacatggatgtttgcaattagtcaagtggtgcacagttgaaagtagatgtatacttttttcatatatattttgttaatagcttcatatatatgtttgttaagagattcgtatatatatcttaagagtttcatttttgcatatatatttaaaattatgactattttgccataacccatgcatttgatacttaaattcacgtatatatactccctctggttgtaatgtt

SEQ ID NO: 20555 - DNA, 2461 bp, Oryza sativa
tgcagttcaattcaaagtgcgcataattgttcgatttcttttatgcagggatttgggggatgcagacatctcagggcctctgattcctcaattgggtggactgaaaaatctccagtacctgtaagaacttcataactcgctctgcttcgaacatgacagtttgcattcagatgatgaattactggaaaaatattgataactcatgtctgcagtgagttgtacgggaatcgcctgaatggatcaattccagcagcactgggcaagatggaacatctagtcagccttgatctttatagcaacctgctcactggcacgataccaacttcgcttggtgccatgagccgtttgcgatatctgtatgataatttcacaataattttataataccgaatagtgaaagattacggtgaaacttctggatattgtttgaactgccaaaatgaattatggttatatgcaggaggttatctcaaaacaaactgagaggggcaatacccccatcactgggcaatctgatgagccttgaggatttggagcttcacaagaatgcattgagtggctctattccggcttctctgggcaatgtcaaaacattgaattacttgtatatgctcattcctaaatttgccaacagagaaattacgagatattttttcaccaaattgggaacctccaagatacttttaacttataatagtagtttttgtttacataaactacatcctccaccccaaaagtaataagaaaagattataaattttccttttttaaaaaaaagattttactagaggaaatagtcatatactaggttttgcacaaatctgtgatataaaaattcaggggatgaaagcttacaaaccagtattaaagaccttcaactagaagcatacaactttgatatgttattcttctcaaatcaacagaactatatatatacctttttaaatttgtttgcaggcggttgaatggtaatatgctgactggcactgtgccgttggaaatcctctctcttcttgtctccaacctagttgaattgtgagttttacatgcttgtttttcatgtattgattagttaaattccagagaaacagtcctgattaactcatactgacaagactaaatatttcgtacagaaatgttgcgaataataatctggatggcacagacagagaatctggaacgagaggtatgtatcatttgaagctcttttggctgcgtacatccatgttgaatatagaggccgggttttaatccattttttataaaaaaaacattttgaagcttttgactttttctttatatacgtgtaaaaaaatcagttgtgttgattacatgaactaccgatcgacaatattcttgcagttactaccattatccaggacatgccgaaaactgcaagttgaatccaggaatccaagttcaagattttgtatttcaggcacattttggaaaatgggataaataaaaaaaataatgatccctcctgtgctcactgaagtactattactgaacatatatctcctagcattttaatgttgactaggagtgcaatggaaattatggtgctaatatgtactttctctgtttcacattataaattattttgggctttaatagattcatgcatcgatacatgtatgtacttcatttatgtgttcaaattcatatgaatgttagtgaatcttgactagagatagagagaccaaaacatcttgtaatatgtaatggagggagtagttgtgtgttttactgatcatgtgcctctattccaaaacttactaatcatgtatttcctaaaaattcatctatgcggtgaaactgagaattattatggtttcaaattaaatagtagatttcacttcagactagctttgttacccatatttagtctgaatgagagttttacaaaatttaatcactttggacccgtttttgttacaaaacagctgcagctcgaatctgtggcccacctgtccaagaaagggagaaacatatccatgtagaggaaaacatggatatacggtgtaaaccccaacttaggtgaaaaatcgtgcaaaccatgaaaaaaatgtcaattttttggaagattttatttcatggtttatacaggttttcaagtagggtggggtttccaccacggtcaataaaaagttgggatttccggcgtatattttggtcacatgctgttgtttttgttcccctgtttctagtcctctgtttttcgcatggagagagccccaatcctcatgtaaagtagccaaggagaggaacggcagattttgcagcccaagggctctctctgtgtcattgttcctgttctgatctggatctgaatttaccatttaccgtagcaaaaaattattatttttacatatcttgtatcagcagatgtcgaccatcggatcaaaataccgatgattcacatgtcaattttaggggagaagatagaaatttggggatt

SEQ ID NO: 20556 - DNA, 11344 bp, Oryza sativa
acatcaaccgtaaaacgatgcactcaagaatagcttactgttggaatgtgccatatggcgtgtaagaggattagaggaatcccatattgctttatcacagtttacttaagaaaagaattgcattttctttctatcagatattagctagttaaatgcaactaatcattacatggtactccaatgttactaacttaaaaaaaaggtactaaccttgtattaatggtttttcttaatacaagcccatcttttgtggcttagttatttaatactaaccttgtcttattattattattattattattattattattattattattattattattattattattattattattattattattattatttctgtggcttgatttaacactaaaagttatttaagcatcatataaaactaacaattaaatgttttaaaaaactcaatgacgccatctaataaaaataaatttaatataacctaatgtcaatagctaatcttacacgaccaccaagaccacattctgaaataaacatatatgccaaaaccatataaatatgaaaaaaaatctaataaatatcatcaacaaacgttaagaccatcgacaaacacaacttcaaaaaaataccattatacgagtcaatttattccgaaataatattgtcgttagagtttcaaccattccactctattaacccatcacattttaatacgtagaattgtacgaaaccttttgaacgcagaggaatgtatgactgtatgagaccccaagatcatagtatttatatggcttttacaacggtattttctaaaagtcatgatggccaatggtatttcgtgcatttcttacattttctccatgaatataacgcttaaaaaactgtacctcactaaaaggaaaaaaaaacatatatccggagacaacgacatgccttgacaacgaaatgaaacaacgaactcaaaaaatcgccccaaagaaaatgaaagaaaaaactgatttattttttctttttccagattggcttcggctccttcttccatcgccgtcctgttcaacgttcaaacccttcctcctcccgtcgcctagtcgccattggcgacctcctcctcctccacctccacctcccctcccttaaatccctcctctccccgccccacctccctccccatccacaccgcaagcaagattcccaagagaaccatccatcatcttggaatccaagaatcgcccgccaagaacagccaagaaccggaggatttccgcgagggagggagctccaggaccctatcaatcggggattcggtgaggggggaggaggaggcgggcgagatggtgaggctgccgtacaccacggcgctgacgacgctcttcagctacgggctgctcttcgcgttcggccagctcagggatttcttccgcaagctcatcgattggttcaaggccaagaacgtcaaggtagggcctggcgaaaatcgctgcgggctctctctggtcggatccgggtgtttctcttcgtaattcttgatgagagatttggatttttctttttggacgcagggctacgcgccgatctgcctcggcctggaggatttctacgtgcgccgcctgtaccttcggatccaggtactcgctttggatcgacgcatttgcttgctcgccttattttggtttaggaaattctgatatgctttagagattaattgaaatgctcgctgtttatgcctcgtagctagaaatgtctgagttgtatcggcgattcgatgaatgttttctgtgatttggggtgggctttgtgacgatgagatgggggaattgctggttccggaacacattttgttgcattttcacaaaatgttgcattcgatattctacgagtatatgggagcatgttgggggaaatttctgattatttaggagtttgggtgagtgtttattattgtggagaagattattttgtatttttttaagctctgtgaggaactttggatgcaaccccctgtctttggagctgaagcaatatgctggattctttcatggcttgaaataatctcattatctgctgacactaatatgtaaataccaactaaaattgtagaagattttagttccagttctaaagtgctggttttctaaaataattggtagcataacatgcttgatgttcatgtctttttttacttggctgtttgaaatgtgtttggcctgaaatggcaagggccatgttatctacttcctgaatatatgtatgacataatccaatcatgctgctcatttcaagtgttttacggatttagtccaccgcacgctaaatgtactgtactagtcagtattggactggattttgcatgactctgttatgttgcaaggttatctccttcaattatttcagtgttaattgcattggatattaaccaatccatatttatggtttcacaggattgcttcggtaggcccatagcaagtgcaccagatgcttggtttgatgttgttgagcgctactccaatgacagtaacaagacattaaagtaagcacttcttcttcttattgttatcattctaggatagagcttgagcttaagacaattgggctgaaaaaattacgtgcagttctgttatctgggcatttccacatgcagctgcatacttggtgcattgaccaaaacaaaaatcagctgatcatgcaggcaaagtcaacccacctgatctggacctatatctgtacaaccttttaagctatatatactacataatgaccataatcaagtttgtcaatatgcacttattggaaagttgtcggttgagcttcaatgatctgttctgacatatagatgattatgataaaaatatatgatccaaaaataaatgaaatgaaaaacacgcacaagtttcaactgttgtttaaactccaaatattgtttcaggcgtacttcaaataccacaagatgcctcaacctaggatcctacaattaccttggatttgcagcagcagatgagtactgcactccacttgtgatcgagtctctcaagaaatactcacccagcacctgcagtgttcgcgttgatggcggtatgcctggatgcttgtcatgcttttttttttaaagaactgcagtctgtaggcaccatgctgattccttttatttggcaacaggcacgaccaaacttcacactgagttggaggagttggttgcacgctttgttggaaagcctgctgctatcctatttggcatgggttatgttacaaactcggccatcattccttgcctagtaggaaaggtacaatcaaaacgtcaagtggttgatctatccagtaacagaaaacatgactaaacttagcagcaattaacatgactaaatttcatgttattccagggtgggctgataattagtgactcactgaaccataactcaattgtcaatggtgcaagaggatccggtgcaaccgttcgggttttccagcataactgtaagcttttatgcctttatgcaatgcgaagcaatattcactgtttgtggttcacaaggacttatttgtcagcatgctgcttacagcccctgctcatttggaagaggtcctgagagagcagatagctggtggtcaaccacgcacacacagaccttggaaaaagatcattgtcattgttgagggtatctacagcatggaaggcgagctgtgcaaactacctgagatcatagctgtatgcaagaaatacaaggttcgaggaaatttcttctaatttacagtttaagttctgcgcataaagcagcttaattagcttctcaatcaattagcaatctatatgaagtgcaacatcgagagttgaccatgttgaattattctttattctgtaaaataggcttacacttatctggatgaggcccatagcattggcgctgttggccagtctggtcggggtgtttgtgagctccttggggttgatccagctgatgtggacataatgatgggcactttcactaagtcatttggatcatgtggtggatatattgcagcatcgaaggtacatcttcagagcacttctttcagttgcttgaattgaaaatttactgattcaccttgcttgaactctcaggagataattcagcacctgaagcttagctgcccagcgcatatttatgctacctccatgtcaccaccagcagtacaacaagttatttcagccattaaagtgatccttggagaggatggctccaacagaggtactagccttttcttctgcttcgaccctttcaatgcgctgcaggctatccatgtaagttttactttcaattcttatttattttggttttgatgtcttgcaggtgcccagaaacttgcacgcatccgtgagaacagcaatttctttaggtcagagctcaagaagatgggttttgaggttctcggagacaatgactctccagttatgccaataatgctctacaatccagccaaaattccagctttttccagggagtgccttagacaaaaggttagtaatggtatagaatgctatttatcttcagaaatggtacagaataatggtttttgccagttttttgtcgttccctagcccctattaccgtgcgactgatgtggcactggcatttcaggttgctgttgtcactgtggcattccctgccacacctctgctccttgcaagggcgcgcatctgcatttctgcttcgcacactagggaggacctgataaaagcccttgatgtgagtgctttcgtttgttaattttcggctgttcacatatgtttaaacggattccaattcacattgttctcatgtttgtaatccactcacgttatcagcagagttggtgatcttgtgggcatcaagtacttccctgcggagccgccaaagattgctgaagctgatcacgataagctggagtaaatgatgaactgggttgccccattgaatgctcaagttgctggaatctggtaaacaaggcgcatgttgttgattggtttcatcggtttgacttgggattttgttgatacctgagaatccagagcctgtctcattagctgactactgttggttgtacaatttacacttctaaaatgtgtatagctggtcgaagtttgattgttctattgttaatcgattttcttcatgtaatacttgatagacacaatataaattaaatttatgatagaacatttctattgatttctgtggaaagttgaagtaaccattttcagcaaatgaagcaatgcttttcatgtgtttctccatattcagtcaatgcggtatttgagatacagcagatgcatatgtattatgttgtataccaatctcctttacagcagttctttggattgcattatttcacttagtattagagaaatatatactggagtttctagaacctttgtaaatacgatgttaaaatataaaaacgggtagtcactggaacaaaattttcattttaattcgccttgcacaatcacctaaagtttaatatcatttgacttaaattcttgaaagtctatagtatataccaccttttcatattaaatcgttttgattttttttaaatcaaacttttttaggtttgacaaagtttatgaaaaagtatagtaatattttcaaaaaaaaaatcaaaatatcaatatgttcaacgttaaatgtaataaaactaatttggtacttaagcgttgttaacttcaaaaatttgaagtaccttataatatgaaacggagtgaggagtgttaagggtatgttcggcaccccttttcccaacccctcttcctcgtttttcacgcacacgcttttcaaactgctaaatggtgcttaaaaaaccaaattaatccatttttgaaaaaaaatagctaatacttaattaatcacatgctaatggactgctccgttttccgtgtggagggaatgagttcccatccggtagatgcaaacacagcctaaatgagttctcatataggtggtgtttagatctagggactaaactttagtccgtatcatatcggatgtttgaacactattttggagtattaaacatagactaataataaaactaattgcataaatgagagctaattcacgagtcgaattttttaagcctaattaatttatgattagtaaatgtttactatagcatcacataggctaatcatggattaattaggcttaatagattcgtctcacgaattagtctaagattatggaatgggtttttataattagtctatatttaatactctaaattagcatctaagagcctgttcactttgatgcaaaaaaacccttacaaaattttggcatagttgccaaaattttggcaggatttcttatatagttaccaaaattttgcagcaaagtaaatgtagccacttttttggtaactttactaaaacttggtaaggttgaaaatggcatcaaagtaaacaggtcaataggctctaaacatccaatgtgacaggcacttaaaaaagatttagtctacacaaaaaaaagaaaaataaaaaagagaaattaggaaatgaccaaaatacccgtaggcatctcatcctctacccttgcctcctctctctctctgttttccagccgcctccccccgcttcgcctcccctcccctcccctcctctcgcgcgccgccgccggcgagcacgtcaccggaggcacggcgcagacgagctcctctcctctcctctcctctcctctcctccccgattcctccctgctcccgccccccgccctccgtctcggttctattcgaatcgaatcgaaggtaaactcatcctcccctctctctccctcttcctcccatatgagcagatgtgggagattcatcaggacatggatttggattggtttttttttagtactgaaacccccatttacccccagcaccaccacgtgacgccccctagttcagatgtgtcgccgtttgcgcctaagatggcagtggcagagtgcagcaaagagttgagagatgttagttcgccatatcgtcaattaggatgctccacggagctctcgtcttgatgttagtacaaatttagtcgaaagccattctaatgtggcggtgcccctgggctatttattgggagcaagggggatttgctccattttgttacctctgtacggtgtctttaccaggaatttttagccgaaaggaatcccgcgccgccgattttaagcgctttgaatagatttttggttatagcctcgaatcgctagtaatattccctgcgcatcttcgacttatgattcatcacctgcggaaacatgtgtaggtctgattttgtgttgcaagagagtgtggaaaggtaggtcggctaattcagtttgtttcagccgtcctgtgtattatattgtggtggttggttttattcggacctgatttccaatgactaccctggttaatatggttatgctgtatagcagtattttactacctatgtgtattcttaacacttcagaatgaataaaatcaatctatgaatgtgtaagccaaaacttaaattctacactacagctgtatagctgtagtagcaactgtggtattgctaaagaagtctgtatgttggatcggaaaatgtgaaaccagaataatacagtccagtagtccatatgttttctttctgccttttcttataaggagtaaggttatcagccagattgtaagtttatttctgtgaacatggaacttgaataggcatatgatctttcacaggattgggaatttaggatataccctaatgaactacaacctctaagcagcactgccttcttgtgtgactaattaagcaactattagtttgattcttactttcatatgatttatcttaaatggccatgactgttcaatatgtgtcttaccaggaattagtaggcagggattcatatgactgcctcatttgtttttttgttacctttgtttgctgttcaatatgtgtcttaccaggaattagtaggcagggattcatatgactgcctcatatgtttttttgttacctttgtttgctgttcaatatgtgtcttaccaggaattagtaggcagggattccattcagattttgagtgctttgaatagactggtgattagcttcaattctctagtaagattccctgagcatgcgcaacttatggttcgtcacccatggaaccatgtgtaggccgatttttgtcttggcgaaagtgtacaagtttcctaggtaggacagctaattgaatctgtttcagtcgttcctatcaattgtatcatggtggttttttttttaccttgaatccttgttcttatttcaaataaccgtgcgttgcttatatagttattttgtacagttactattttactacctatggtttgtgctgacatcggaatgaacaaaatcaatatatgaatgggtaagtcaaaacatagaaatcctacacggcacttgcttgatggggtattaccaaagaattctgtttatgaaaacagaatacagtccagttgtccatattttgctgcttttgcttataaagagcaaggttgccagccagattttccctgcgaattcggaaattgaatagaagtagaatctttcacaggattgggaatttaggatgtactcccatataatttaatcattttaacttccgtacctgtggaagcatgaagatcggtactctgactattgtgtcatcttttatttcttatgaagaactacctatctctaataatgcaacaggaatgtggaagagttctagatggaaccattatacatgggtaacaggggattaataggcatcactcttcgtctgttttctgtagttcatatataccttcactttgcgctgcatattaggctctactcatggtcttaggaatggtatttccgagcatattttgttacatggttcaacaatctcacttaataagttcaatggacgaatttgaatatacatgatgatggagatttgttttctaatggagtacatctgaatgtgatctttgacttttgttgtcttttcgtgtgactaataatcaactactacttcgatccctactttcatattatttatcttaaatggtcatttgactgtctttttcttcttcatattataccatcctaccttcttttgtatgattgggtggttctcgcatgttttgcttaacattggagaacttatgctcatttatgactgggtggtacatttatgctcatgcaacatttgtgtggcagaacttgttcagcatcactccttaattggcttgacatccaccgtaatgtgaacattcattatgatgatatcaaaggtcatgcatttgttaccttttttttttttttgcttttttccgaggattcttcttattactgaccattatctcctaatctagttgttatgtagtgtatttttaggaactggatatttcttccatggttaatgtccagaaccatgataatagatatttactagttacatttcttttcgtgtatagtgtaagaagaattgttcagcataaaaacttgtagccttttctgacatccttgcatttttttaattccttttgaataggttgtaaggatgaagaagggactgcatcctcagatgcagtggatttcatatgtgacacaaagcggcaggttgatcaatatcatgatgaccaaggtcaaccatactggcaaagtgtatcatatgagagcaaagcgtcaaatggctcaaagcctgggccagattgcaaagttcaaccgccgataccagcaggaatctgaggaaaacaaagaaaagtaggctgctgtcagcaaggagctacatatgctctaaggcagattagtgtggtgctatgtttatcgtccaggaacattgctcatggatctttgttttggatgtcatcctcttccatgtagccatctgatcattgtggtttatccctgtagtttcagttctaccattcacgaatttttctggagctatttttgttgctcaattctgcccgatatctctagagaatacagcatgctactttatgttttgttgattttagattgaagctccctgaattcctgtaagatggcatcgtttggcttgtcatgctacgtctcttttagcttatataaattatgtttattgttagtacataatatttctattattctcaggtgtacttgaacctttttttgtatgaactgtaaccttaggtgatcctggccttaggatttatataagataaccgtagtgtgatgatgattgattatagttgtagacgatggacaagggctcaaatgtataaattaaatactagaattaaaatatcatttagaaaagtcatagaagcaatgctgattgctgattgagcaagtttttgaaatcaacgtacagtacttcctagaagtgtttgtttggataatttacagaagttatgcccattgtctcgtttatttatatgcttatccaaatcgtttattagcacataaataatcatttgtgggtgaaacttttatgtagtgttcttagcgacccaaaagtacatgttgtaaaataaattatgatgcaaaaacaaaaaatcaaattcaaaattagattccaatatttaaatttcaacttacaaacataatttaattcctagcatcttaacgtggagttagtggagatgaataataactaaaatatccttaattattaaaaaaggtagtaaaagtgaaaagtagtaaaagtgatagataggtaacatggagttagtggagatgaataataactaaaatatccttaattattgaaaaaagtagtaaaagtgatagataggtaaagggtattgtaggaataaaactgagagtaggtagaatagcagatgttggtattttgtgggataaaatttacactctagaggttattttattttattattattattttttgacgaagggagtatgcgagaccgaccaatcaagggaagggaatacgagatactcgtgcaaagcccgcaccccctgtctctctctatcttctcctcttttctttaagatttattaccgttgaagaaaccatttctctccctgtgtctctcgctgcaagtggaccccgcggtttccgggccccaccgtgtcagtgggagatggggaagaaccgagaggtgtttgaagcttcttccccttgtcgccgtcaccgtctcgtgagtcgtgagtcgtgacagctgcctgctccttctccacctccaccctctctcttctcgccgagcgccgcgtcggccgcatcctgctcccggggccccggccgccgccgccgacgacgccgccacctagcagctgcgggttacagcggcgctgagggcgagggagggagaaggccggccgcgcgcaagccgcaaggtggcaggtgaggtggggggggggggggggggg

SEQ ID NO: 20557 - DNA, 6396 bp, Oryza sativa
ccaccacctgctgccgccggtcttcgccgaccgaggcgcgtgcgtgcgttcgcgggtgcgcgtcgagggaggggaagcacgccaccaccacgcgcgactcgctacttggcgacgacgacgccgaggccgaggaggcggacaagcgcggttcaccaggcgtacggcgccgccgaagggggtcgagaatcccgcgtcgctcgcgggcgggcgctgaggaagccaggaaggccgccgaaacatagcggccacacctgctgctctgctccctctgcgtgcggcgcccggtgaggtagtcggggtcgaagcgcgtcaagtcgagggaggcgaacctgcgcccgcggctgatcgatcgaggccctcgccgccgcgcgcccgcctcgatcgagagcccttctgcatttgatcgtctgaactcagctcaggtacgcactaatttggttccgcatctagcatggtgtccaccacccacgcacgcacgcacgcactccgctcgtccgcttgccgcggcgcacgcacgacacgataggcgccgccgcgcgcgtctcgccgccggccatttcgcgcagcttctgagtgtcgtgatgactgcgtgacgtgcaactgtgcgcttaccatgtcaatgcagtgccgcgtagagattggtggatggccatcgccaatacatggattaattagttagtgatgagttaaactaacacacgcacacaaactgcagccgcggcgcctacttctgagcactaaattaaccttgaaatccattttagccagcactaaacatggattagttagtgatgagtaaattgatgtagttaattttgcttacaaatcatcattaattagtcctctccaagtaattaaatgttggatgaaaaccgagcaggtgtgattaaggacaagacatactcaagctatttggaagacaaccgtgagtttcatgcatggccaaggtttcagataacgaaaggttagtgcctccaatacatctcaatttttcattgattgtatttttttttcatctctggtagctacttgtgcatttatatatcttctatagagtccttacgaatatttaattgctatgcactaccgtatataatttagtgattggtccatattactattgacccatagttccctggtagtagtttaaataaaacaaatataatgcccatagtttcctaaaaacgttataatgcccactatagactataaaccaaaaataataatgcacaccatagactaacatggtaccggccgacaagcaagattaaagttaaaagtttctctcttttttctagctctcctatataatcccagcagcttagtagtcactagacagtgatggttttgtcgttgccatcctttatctgctcttactactctgggttcaaacctttgatatagcaaaaaaacattaagagatcaaaattttagaaatacatcaaaatattgattgaaattgtcaaacaaaatttggaatgaaccttttttttttgtttcatttgactatttgagcctgcctgatgtatcttaaatgagccctcctctccaccttcctcaccactgcaagtgattgtgaatgctaggcctatttgcctgattacattgtggatttaaattaattttataattattctagtcaaaatattatttatactatattccctccgtttcatattatcagttgctttgacttctttctaagtcaaattcctataagtttgattaagtttatagagaaatgtagcaactcttgtaacaccaaattgaacataacattgaatatcttcttccccaatttcttcttcttttcctctctctcccttcctcctcgactggtcggctatagcagcggcactgacgccaccgtcattgcttcgatgcaatcggaatccggtggagccacctcaaatctagcctggatgatgggcctgtgccctccacagccaagtcccctgcctaggagaaaccatgggtgcagcttcccctctctctatatggtaccgacgaggaggaggcggtggtggcggttgatgaggagcctctatcttcctccaccactcaagcttccacccgccttgcctctagcgcgaggctacaatgaccgtcgtgtgtcgcaccaccgtcggccctgtcgaccaccaagagtggtcatggaagtcttgcaactgtggtattcaatcccacgcaagcttcgaccttgcctattccctccgcggctccacctactcaccgacatgtaggtcaccgggttgtgcgctagcagcgcggcctacatgcgcctcatccgggtgcttcccggtgccggccgcacactcgaggatgaggcgttcctccttgagatgtgctgcctcgagctccaccctgtcgctcgcgaaggcgggtaaggaggacatggtggcagaggatggtgacggatcctcgcggcctgccgcatatggatcaacgaggtggaagagagatggggaagacataagagatgatagaggaataagatggaactgtcatatgggtcccatgtttaggggtattttggtctatatgatgacggaaaatgtgacggcgatggcatgcttctaattttgtgcgtattcgaatggtatggatacgaatagatgaatagtaatgaatttatctaaaaaggcaaaattttcccaaaaaaaactaaaaaaatgtgtaattagctgcgacactgtaaagacgtgaatttgtccgaaaacactccaagtgtggtaatttgctacaggacaatggatacattaaaatataatattaactcaattgatgggagagaaaccacacaaaatgatagttttaccgttatgttattctcctttctcccaatcttcttccgccgctcactcacagcaagctccacccgcttgctcatggcggcacaaccactcgacgtagtcgatggcgcggtcggtcgacatgctgccggcaccggtgagattggacaccgtctagctagtgcgcaccgggggggggggtgtgctatggtgccgtcggcaaactccctaattatgaacacgttgccgaagtgggtgaccttggtgagccagctttcgccatcgtccatagagtgttccctgagacaatgtaggaaatccgccgggtcgtcaaccacctcgaggaggcggtgctcggggcgaggcggtacctagtggagagcacgatgtggttcatgtctctcacgtggtcgtccggttcaagtgccggccgcgacggtggcgcgagcacgagtggcaccggcgattgcaacgccaccacggtcaccgatgacatttggctgtaccttccgtcctcgtcgccaacagcctcgacatgctgtgcgaccgcaccattgactacaccgagcagctgtccgtcatgggtaagccggtggagctcactgcgaatgagcgttgcaagaaaaccgaaagaagggagaagaagggaaaaaatgtcattttatgtggtttcattctcatcaattgggtggatattatattttaatgcgtccagtgtcctgcagcaaattaccacacttctgaagtgtctttggacaaattcacgtctacggtgtctcatagctaattacacatttttgtgtgtcctgtagcaaaatggcacatttgtaatggcatggatcaattaatcctatattctaaacaatcttctgtttttcaggtatccagttgaagtaagcaatatttcaaaggagggggtaatcaatttctcatacaaactattaatattcttttgcattttttaaaaaaatattaaataaaattattggatctaattccaaattacacatgtttgtaggaggtggaggtcgttaacaacaatgtgaagttaatctgttatagggatcctgttccagggactacaaaattcaattacccattttattatgcttcagtttatgatctcttaaatcctaaaactgcgatagatcaaagcattaggcaatatgttgtccttcgaagaaagccacttcaagatgcatatgacacattcaacttcttgagcctttgtgaacacccgaacatccttaagccctatggattttgggaggataatgataacaaaggttttattgcatttccacgtgtcaaaggcacattaggtaaccttccaacagatgagttgttctctgtggagatcgatgcgaataaggttacctggctcaaaggcttttctccaagtggcatgcaaataatcaggtacaataatgggtaaccttgctaaacaaattctcaattattcatgtcatgtcattatgcgttaatttattaatcttcacatccttttgtatagataatatctattttacgatattgagcttagtctatttttgaaaaaaaaatgccattgactttgtttccttgagcaaaactgaaatattatgagttttttttgttgcttttatagagatattgtgagctcggttcactatgtgaacgagcggtatcctcaagctggcactagttctagtggaagtgccataccgccacttacgatgtttccactagaacttgcctctcacaaaattttatatgagaagattccaacaggagaatacaagatttttcttggagatatatccacgactaaccattggccaaaaacaatgaaaaagagtaagttatcgtttcatttagtattaagtgctatatttacctctatgatatttgtatgttctcatgaaattacgaaaataattacttgggtcattttgtacttgccaataaaaaaaaactcgtagaactaaatttctgaaattatgcacctttaaatgaaggtagctagactttatttatacccctagtgtaatactccatccatctcattttcatgattacctaagcaaaagtgtagcaaccaagtacaaaaaaacctttattattctaaaattaatccttatcagttaatatgcttcataactttgtattccatggattatgtcatattttaaatattacatgacattgcaccaatagaaattaatcttggttagttgcatgcagtgcattcgacgatgcacgtttactctttacacaaataaatgaatagacacttgttagatgatgattataatatattaattactaatttgctttatttttttaaaaatttgctttattttcttggcagtaggataactgtacacttcccgaaaaaaatattagctattgttcttttctttctagaccaaatatccaaatagcttctaacttcagttttggtatttctgtatatttagacttttcagttgaagatctcaagaggcacaactggaattgcctgggaaaatacatttcaactatcatggccggccataagcccaatactgaattgatacatcttgtagatgtcctgataaaggtaaattggttgttacagttttaatgactcaatgcaaggaagcctgacaactaactcatctgaactggagtaatatatttgttattaaaaaaataattacaaatttcttactgttgctggaagtagtttgaatcaaatgttgcatgggagggggagcgtggttaggaattatatcgaagttcacaaatattttcatgattattagtttgaataaaaaatatgctggaaaataatttaggggttaagtgctctggtgaaataattcgagacaatagaattgacttttcccatttgttaatacccgagaattccagtaggtagctaaagctatggaatgtacgttgtatatgtagaaactagctagtcctagtgtccaatgctcaatatttggttgggcctgtagcactaggccactggcctcaagctgttgtttacattggactaaggccttgtttgattcagcttaggattattataatttggattactagtagtaagctgaatcaacagatagcttattatgatagattattacaatctataagtcagattactataatatggtaatgcactctaaaggtgcttttttagattactaagtggctaacagctagtaaagctaatgatctagagaaacaaacaactaacaacttattttatgtcggcttattataatccagcttatagtaatctagctcaataatctagattacaataatcttaagctgaaacaaacagggcttatatgtcgactagagtttcctaagtaatttaccaataaaatgtatatatagcactcaatattgctcatatttattttgtctttacatgtgtcaaatagatttgaggatattctctgggaacctgcactatggggatcgaaaatcaaaatgcgttttgttagagagatagtttggtgcttagagaatgacaaaacaggaggaagaaagtcaacactctccaaactatctccattgggtctacaggattgtatcaccaagcttggacttaactacaacgaag

SEQ ID NO: 20558 - DNA, 12217 bp, Oryza sativa
ataacttaggtgtacggtgcaaatgtttttcggtaataaatagagctatattgttgccttacctgcctagggtgacttgtttcagggataatttttgggcgtacttgtcatggctggtgataatcttgttggcgtctcgccaaattgaggaggatcgtgatggatttgcttgggtagcagatgaagaacatgagaagtagaggatgaggcaattggggattaatttctttcttctttcttttcggatggaataaatgggttatgcccgatttattctaagtacatcccataggcccacaattaacgttaagaggattaataccacattggaaactttgtgaggtgatctcaatttaaatagggagctattagagagcccctgttgaccggttgaggtgttggtaggattgccacacgcacgggctgaacgtgcagtgatgtagcctagggggagtgaataggctttcctgaaattttctgaacaatcgcagcggttaaattgacagggcccggaacttccgggtggttaaattgacagggcccggaacttccgggtaggatgtagtatcccggaacttccgaagttcttaagccaagaacttccttaagaacttccgggcagcagagataatttgtaaactgagaagaaaagtcctagctaggaagatcaggcacacagatgcacaagaaaaagatcacaggatatcagcagattcaaacaaagaacatgcacaagagagacaaagacgatttttttcccgaagttcggatcacacggctcctactctccgttgaggtgctccaaagagccgggtctcgattaaccccttgcctcacttatgtaaagatcccagaagagatccacagccttcaactcaacacttctaggtcattttctagaattgagtgatcaccaagatctaacttaaaattccttctagaaaagaccacaagtgcaagttgctctacctaagataacctctgaaaactcagcacaagaatctttactcacttacctcgtttccttgcggaggtgaggaaaaccttcacgaactttcccgggacatccacaagatctttggaagctcatgggcgacacctaaccgtctaggagaagatctccaagagtaataagcccaagtgacagcccacaaggtatccaaagtgctcaatcaaacctaatcttcaagccatctccaaaacactcctacactctcatctaatctctcaatctcacaagataggctttagatttaagtggaggaagcaaaggaagcttgggagtggctagaaaaccctagaacatgaaagaactgaagtggaatggccaaagggtgacctggggacgaaatccatatatataacggctaggtgacgtcatatagccgctactcacaagtttgaactggaaacttgctaggaggttccgggcaaaagtgccaggaacttccaggcagcacttaggaaaatttttgcaatgaaacggcgcccggaagtttcggccagaacctccgggtagccctctctgtcccgaggagaaaatcatttttcaaaaatgattccaaaaatcttttgactcatggatatgactaagagcactttgtataccctagaaccacacttgaaacccctcttaatagtacggtttttcctaaactcaatttcgaaagtgaaaattctagtctaatcaccttcggtcctttccgctcttaggaacattcaaattggggggtctccttgtattcttagccatcacaacatgctttgggactaaactcctgtgaataaacttgatagacatgttagtcccctttaaccaccttgtcattaatcaccaaaacccactagggggtttaagtgcaccttcaatctccccctttttggtgattgatgacaacatggttaaagcatacaaaaagataatagaatttaaatttggtatgatgagagaagtgtgaagctccccctgaagatatgcatataatgaaatgagaaatgaatacattatgcataagacgaaggaaagctcaaaagaaacttcacactaccctcgtcaatcaagagatgcagatgaaagtgcttgaatgatgagtgatgcaaaaataaagattagatgacatggcaatcactcaaaaaaaatgaaaggaacacaacatcacatcaaaatgcaacatccatatggtctaacttactgacataaagggataataaagcatctaacagtcaatgcatccaaccaaaatagaaaacgaatacatgtccatatagagagagataaaagagaggaaatcggcctggccggaacctcctgatcacaggacccggaacttctggtcaaatgaccagacaatagtgacccccttcaattcacaattgtaatgacccccttcaattcacaatttctccccctttggcatcaaggcaccaaaaagcaagaaaccatgaagagaagaagatgatcactcatctccatctccattagagggaacaatctcggtatcgccagcgagatgagattcatcggactgtgcagcggtgtcgccctcatcaacatcagtgggagcatcctcagcagctgcctctgtgtcaccctcatcatcatcatcaacatcatcatcggagtaggtggatggaccttctccgacaatgttgcgggctgcctcatacgcctcaaatggatcaacatagacctcatcttcagaatcatctgacacttctttcccagcttctctactatcttccttctaacgcctttcgatcttcttcactttcttggcagtcttagcacacatacaaaaaattgcctgaagtgccttcttgatgggagaagaacttgaggaactcggttgggcactagaagaaggaccagctgaagtagaaggaacagatcgaggtaccactggagaagaggaaggtggagcacgagggcgaaaaggactgtggcgcccatctttaatgtagaacaccccggtgactgtctcaatcatcttcataatgaaaggggcatagatacaaccccgcttaggctcaagaatggtgttggctatctcataccaaatcaacttcatcacactgaagggaggctgattgtagcgcatgcgactgagaagatgtgcatgcttggatagcaaagcagtaacatctccaacctttggaagcaaagaccaacgaaagatggagtacaacaccttgtagttaggatgcaaaccatgagtagattccatgcaagtcctaggagcatcctttgcatacatgaacttggttttgatcatggggaggggtgcttcactatgaatgttgggcctattgagatcctcatcatctaaccccaacatctcagtaaactgtgccatggaaatcttgtgcctaacaccctcagtcaaccacttcacataaggggttcctttccttgtagtaccaaagaatgctgtcgcatagaactgtgcaatgacctcctcattccaaccatactccaaggcaagaatatctccaagattcttgttgtggcacacttgcatcacttggttgaacacttcattgtttttctttctcatgtaagcccaatcaatccacttcatctcaaccactggattttctctagccataatcactgagttataccaatccaattgagtgaaagtcctgaagcgtggatcctgtgactcctcaggctgtgtctctggatcaatcaaacgatctcttctgcacttggcaagttgatgaaggtagttggacttgggtcttccaatgtggtgcataggagtggtgtcaaatccaagagtcttgtagagccgaacgggattctcacgagatcctacagggaaatcatgagatgcccttccagccccagaactacgaccaccacctctcccacgacctcttgtattaggtgcatcacttccttaaccactgtcaccatccctaatctgaacaggacggttgctggattgccttgtaaacctgggagaagtacgagtgccactgccactgccgccctcaaccactttttctttatccaaatgaccacgaggaaaccgaataggaggactctcatcacaggacacatcctgagatgctttctgtcttttctcacgagtcatagtgcttactgcaacaggaatcaataaatttgagtgcagtagttaggccaaaattgagagaatcaagaattgcaggctgactggacagcgcccagaggttctgggtgcaagaacaccggaacttccggccggcaaaaatgaagaaaagaggtctcaaaaatagccagtgcatgtgaacaaatcctatagatcggtgatctacaaggtagcagaaacaagactatccaagtggttttctccctaggttcacagatttagagatcgggataaaaacacaatgaaccgagagagggaatcaaaaagtgctaccttgagagaagaaactgcgaatcgatcacagaaagaagctcccagccaccaatgtggatgaatccacggagaataaacgaatttgattggtggaaagagaaaatcgccacttggggcactgtagcagcgactaggactggcatcggggagggagaagaataaggagagagaatagggtttctaactccccctgagtatatatactcaccgacacccggaggttccggacagggaggcccgaaacttccggcctgacagataaagggcagccacgcccaaaaacaaggtagagagaagaattcaacgagtggaattagagaaactatggacaagcagagacttatgatacatatgaccagccaacaatcaacactacataacaatggtcaatattcatcacaagaaggggataaaaatcaaattttcgcaataaaaggcacacaaaggattttgcaaaaaaattcacaaaagggtttttggatatagggggaatgtttgagctttattcctggtatcaagaccatcttctaccaagaagtgatcttcaagacagaagcactttttttttaatttacatgttagtgatacatgtttgactataaattagccaaccacccatcacctaatgttgcgagaatctaagatattgagctcactcctaagctcgcaaaatcttttctcatctaaaggcttggtgaatatgtcggctaattggctctcggttctcacatgggtaaggcatatgtctcctttggtctcatgatctctcaaaaagtggtggcgaatatctatgtgtttggttcgtgagtgttgaacgtgattattggctattttgatgacattctcattgtcacataggagtgggatcttggtgaagttgtagccaaagtcttttagagtttgtttcatccaaatgagttgggcacaacaagaaccggcggcgacatattcggcttcggcggtggataatgcaatgaaattttgcttcttggaggaccaagaaacaagggactgcccaagaaattggcaagtcccggttgtgctttttctatcaaccttacacccggcataatctgaatcggaatagcccaaaagctcaaagtcacaacccttatgataccacaagccaagattaggagtatgaactaaatatcttagaattctcttgacggcaatcaaatgacactctttaggctccacttgaaagcgagcacacatgcaaaacactaagcatgatatcgggacgagatgcacataagtaaagcaaggatcctatcatagagcgatataccttttggtccacacatttaccattttcatcaagatcaaggtgaccattggtaggtataggagtcttgatgggtttggtatcttccatcccaaacttcttgagaatgtccttcacgtacttggtttgagagatgaaagtaccatcttgtgcttgcttgacttgtagcccgaggaagaaggttagctcacccatcatagacatctcgaaccttttagtcatgatactactaaattcttcaaaaaagaggcattagtagaaccaaatattatgtcatcgacataaatttggcaaatgaataaatcattttcaaactttttagtgaagagagtagtgtccgccttcccaatttcaaaaccatttttcaaaagaaaatctcggagacattcataccaagctctaggggcttgtttgagcccgtagagcgccttgtggagcttgtacacatggtttggcaactttggatcctcgaaccccggtggttgctccacatagaccaactccgagatgggtccattgagaaaggcgctcttgacatccatttgatataacctgaaatcatggtgagcggcataggctaaaagcattcggattgactcaaggcgagcaacgggtgcgaaggtttcaccaaaatcgagaccctcgacttgggtgaacacttgcgcaactaaccgggctttgttccttacaaccactccatgttcatcttgcttgttgcggaagatccacttggtgccgatgacattttggtcgggtctctccaccaatgtccacacttggttgcgagtgaagttattcaactactcttgcatagccatcacccaatccggatcaccaagtgcatcttcaaccctgattggttccaaagaagagacaaacgaatggtgttgacaaaagttagcgacatgagaacgagtagttaccccctttcttatgtcatcaagtaagttgtcgacggggtgatctctttggacagtgtgatgtattcttggatggtgcaccgaggggacctgagcctgatcaggatgctctatagtgccctcggcatcaatcccatccacttgtgccgtaggcacgccttgactgtcctctgcccggaacttcctagcagatggacccagaacttcctggcctggggaggtccggaggttccgatcatctgatcccggaacttccgggtcaactgactcttgactttttgtagggctattggatgttgatgatgaaggttgatccctatcttcttggtcatcctacgtctcgactggtcgtatgtctccaatagccttagaaccaattgcttgtctaggattcgcattatctacaacatgtacaacaacttgctctccttgggagccattagattcgtcaaatgtcacatcccttctaacttcaacaataccggaggttttgttgaagacacgataggcatgtgcatttgactcatagccaagtaagaatctctcgtccaccttaggtgagaacttagatgaacgaggcctcttactcaaaaatgaagcatttactcccgaagacacgaaaataggaaacatttggcttcttaccactcaagagctcatatgaagttttctttaggattttgtggaggtagaggcgattgatggcatggcatgcggcgctcacggcctccgcctaaaagatatccgaagtcttgtactcatcaagcattgctcttgcggcttcaataagagttcggttcttcctctcaacgatgccattttgaggaggatcataggaggcggagaactcgtgcttgattccctctccatcaaggaattcctccacttgagtgttctttaattctcctccattgttacttcgtaccctcttgatggtgagatcatagaggttttgggcttgcttggcgaagcgcttgaagacatcttgagcctcacttttgtcatggagaaaatacacccaagtgaagcgggaaaaatcatcaacaatgacaaaaccatacttgttacctccaatacttatgtaggccacgggcctaaataaatccatatgtagaagctcgagagggcgtgttgtagtcatgatgttcttgataggatgcagattcccaacttgtttcctggcttggcaagcactacacacacgatctttctcaaatgtgacattagtgagcccgatgatgtgttccccctttagaagagttgccaaattccgcattccaacatgggctagtttacgatgccatagcaaacccatgaaggatttagcaatcaaacaagcttcaggattcactctatccacatcaaaatcgacaagatagatatcacccttcaacttgcctttgaatgcaacggaggagtcatcccttctaaagacggtcacatcctcatcggtaaacaagcaattgtaacccaacttacacaattgagaaacagataataaattatagcttaataaattgacaagaagaacattagagagagattgattattggagatggcaattttacctagaccaattacctttcctttaccatcatctccaaacacaatattctcacgagtttcgttctccttatcaagacttgtaaacatactcctctctcccgtcatatgattggtgcaaccactatccacaacccaacttgaaccaccggaggagtatgcctacaaaagaaatcaagcttgggatttaggaacccaaacttgtctaagtttgggtcccttgatgttagttaccaaagcctttggcacccacacacaagtgcggtactcatcattgtaattcccattaaaattggcaaccactttgctctctgaatttttgaagattacatatgaatcatagtaaagaccctctggccggaaccttctggcattgtgcccggaacttccggtcatgtcttgtgcacggccattggcccggaacttcctggtgggaatttttgagagacagatactcccacccggaggtttttcccggtctgtccggatgttccgggtccctggcagttcacaagcctagtcacctcacttgcttgtggtgctttaccttctctcacaaacatcaagcattctttcccatttaccatcacgcgcttagacacaggacttccacccaaaaacccgagcccgtgtccatccttgttaggatgagcggtgatggtcttgtaaagggcatcttttaaatggtatgtcttcatgcatccatatttcaccaatgtgcccaacctttcattctctttcttaagagcttgcatagcatcaatattagtagcataagatttcaaatcaatattgtaacacctagcacaactattgctagtagaagggttagaagaattagaaaccacatttggttgagaggtgctattccaaagagtatcaaattgaacttgatctttatgacttttgtctgaattagcaaatttttcttgaagggtttcattgacatccctaaggctagctaaagaaccattagccaaattaagatcattagcaagttgttcatttttgtcacattctttagctaagctctcctctaaggcaaggtttcttttcttctcaagaataagcaattcttcttgcctttcgagtgattgttctttactatccaaagctctcattaacttagccaaatgttgcatagcaggtttgctaaagctcttaagcacatcatctaattcattatcactttcctcatcactagaatcaacatcaagagaagtgtgggagggcttttgagtcatcaccttgcggccttgggccatgaagtaagagtagtggtaggagtcgtcgtcgtcatcactcaagttattgaagagacgctccttacttgaagaggatgacttgaaggcgacggtagcaacaccaccttctccttcaaccttgtcttttgacttgggcttgggctcgacctcgtgatcaggatcttcttactcatactcgtagcagtagcactggcaacagccttcgaggatgaggccgtcgaaaaggagacgccgtctgggccggaggggaaggcggccccctccccatcacggacgaggtgccaacgttcatccccaacactaccgaggttggggagcagcaacagcaaagtaaagtcgtgcttatttaccagcaatcgctgcagcagccctaccaaagctagaagaaaccaagattttcgttttgaacccaaccaaataaaacatatctgaaatcactaaatttttgcaaatatggtaacaacatactggcattcggctagtactaacattagtattactaatccatgcactacctcgacagagcacacggtttgcctctcatttttcgccgaacgctgatcaatatggtaacaaggcaaccatcctaaaattctagctgtatatgtacgataacgctttatatcggtcgaccggcacgggagcgtcaaggattggttgctcgcgcgtcgccacccacgtgtccctgtccccaccttccacttccacacacacataactcaattgcaacaaatcacccacgtgtcccctgcccccacctgccacttccacacacacataactccattgcaacaaatcacccacatattttggaaaccctctataaagggaatttggtttactttttgttccataaaaaatatttatctagtacactcacaacgtttcactatatatagatctaatgttgcagtgaactaaaatattccattgcaacaaatcacccacatattttagaaatcctctgttaaggaaatttgttttattttttgttccacaaaaaatatttcacctaatgtacttacaatgttttacaatgtttcactatgtatggatcaaatgttgcagtgaactgaaacattctttcgctatttgctgaaacattatttttatataaggtgaaacaacgtctgatttaaacgagtgaaacattttcgatctaatcagtgaaacaattccgatatacctagtggaacatcgtgcaacatttaaaaataattcaataataagctaaattttgttttcgtcggaatatatccacgtgtgatcttgtttcgaatatttaattacaacgaatttaatggtgcaatcggatcattatttggataagtaatttaagagaaaaatcagtttaaaatagttttgcacgtaaatcaggcgccgattttaacctcctcccatcgggcgcccgagccggagtcacatccggatatatatcaaaatatggcattgttgccctggtgagggctccttgacaggctacactcatctgcagggcgatcttcactttttagctgctaacggcgagattctattgatggaagaaacgaggaaaaaacctgctcaataaacaactagaagacatcaacatactggcagcaaggtagaataacccaaaaaaagaaaaagaaaaaaaggggagagcagctagccaactaataaaatgaacttcccaattaataataaactaataatactaacctcttgcaagggtcgtctaacaatgtcatagtagtggtgctcatagtatcttgaatccatccaatattgggcataacatacaagaaaacaaataaacaagtgaagagacaacaatcgaaatttttgcatttatgcacttctcgaacacttttcgtggcttccacacaatgacaaaaactaccagtaagaagtgagaaaatagctaaagttttccaatttgtatatctagagtgaatctcttttctgggccgattgggagttttgctactccctccatctaagtttatagcacattatttaagttctatccatcgatacgagatacattgcagatatcaatgtaaataagtgagcttttcactatatttttaatagatatacagatttatttcctatgtcatgtacgcatgcattgaatccagtccttgaaagaaaataacgacactttttttagtttagcaactttcaatcaccttggtctacatacaaaatagaagacaatttttttgtcagtacactgacattatgttctatttgtacaaaaatatcagtctgacatattttttacatcctgaattttagtaacacttctagatgtataaaaaaatactgtcactgttcaatcaacctaaataaataaacaaatactaaatcatgataagacaatccagaattcaataccttctcacgattttcagtccacctttcacatgcttcaacaaccacctaatagaagacaccaataagtttgatatatcatcaaggatgcaccataaaaatgaaacattgactagtaaaagactcagtatactacctcttcgaaagtatcttgccaagagttacccttccgcgtgaagattaaccaacaatcctgacattatttacagattgcatttgaaatattaatttggaatagatgagaataacaaaattagaactacagaagacctacaatgattcctctgatcatgtaatgcttaggaagggaatgcccagaaaaaactctctcattgaattcatctacaagatctgaaaagcatttcttgtcctaaaatccaaggggtgcagga

SEQ ID NO: 20559 - DNA, 4568 bp, Oryza sativa
  unsure (1)..(4568): unsure at all n locations
taagtggcagcagatgagagtgctatcatttattaaagatcagtttaattcagatacaagagtcactaatttataagaccaaattagagtggttaggtttatgaattatgaagtacaggaagaagcttgtagccgtaggaattgtctgtgcattaacagcaccctgtcaatctgccacatgctgaaatactgaccattcgtattgcttatgaaacaaaccattgacttttaatatacacctaagctttgtcaattgaaacatactggcttaaaagttagaatgtggttatgtgaaacttaggcttcctattaccgatgcagtgttgtttaaagaagggttagataatcggatgtaaatccaatatgaaactattggttctatcttattcaaaatgccctcttctttagttaaattgtgatgtaggctgtctttcatacgttgacacaaatctgtttcgttaggtcattttgtttcaatctcagtaatattctcacagtaacatgtacaacattgctgattgtctatccacattataacgtgaatttgtttgcacaatggactttcagcatttaagcgaacaaagtaactgatttgataatctacacttgcaggttgatttttttgacctggaagttctatataagaacttgaggcctgaatttagatccaagtatgctattgacagtagcaagcacccccatctaaggatcatgtcaaatatgcgagaagtatgcgcttgttatgatttctgataatcagcttgtacatatgttcatatatgctaattaattatttcttctttttttgaagcggaaatattattcaatgatcagtgcaaaacatcacaaacaaatatgtgaaattcttggagaactcattactttgaaaccatatatcaaggtatctccttagtttgaactacgtagttaagttgaaacgtcatgacctacatttatttcatttgcagggctctgaccattattatgaaattgttgaacgtattggagaaaaaattgagataccatccaggatctttgaccgtgatgatgcgaaaaagtccatccgtgtgagtatttgctattgatttaggaatattgtattgaaagactcgcatacttaccctaattcttaactaaatcttcttgctaggtcctccttcaaatcttacatttctgggaacctcagtttcatcctctaatacgggaggtaatttctggaatttgtgagagcacttttcttcttttttttcattgtttgtatataatgttttcatcatatagggtcacaaggacttccttttagacatagccaggcggttggccaaggcaaaagcaacagaatattctgaggtttgttctttttttctttttctgctgtaatcttagaatactacttaaatatgtttcctttttcagccattgataccacaaatggaggatttcttgccacatttacaaccttatgcattcgcatttattgtggctacgctaaaagatccaatggtatgacattgaatatttcatgcccacgcctagggctaccacagtcccactacggcggagtagcgtcgccgcgcgcctcccacacccacncacccacaccccccccccccccgcccaaaacctaacctgccccgatcgagcccttccttctcccagagccgccgctcgatcagccgcccctggagggagcgcccatggacgccgccacaacgtccgtccgcgccgtcgactgcaatcccgtgccggtgagggatttctctgtactgcctgatcggtggcggtgccccggtcatcgtgatggttcggggctacgcaaattttatctcgctttggcggggctctgtccgatgagttgtgcaacagaatttgatcattttttttatttctttttgcttgcttgatttgacgctgcaggtgagggatgaagggtatgtcgatgcgttggtgagggcgtcgcttcattttatcaggaaggatttccctcatgaggtccggggacatggcgtcagattgctacaggtcgtttaatttaattcctgctgtgctgacattatgtgctttgtcgtggacttgatcggaggataaccttttcgttgtgtgcttccatttatctgcaatttttgcccatcctattgcgtctaaaatattgggttgcacggtttagtgggaaggggaagtggatgaagttctcaatatttgcctaatgatcaaatactttagtgaattgcaactaaatggcagcatatagcagatgatattctccacaatgacattgcagatagaaatttaaaaggagttgggtatatatgtttcgtatcaaatttaggaagaataatcgtgtgatgaatcttggatctgattcattggattttactaccaacatgtcctttgaatcagttttatgattcattgtattatgctatcatcataattatatcattcaccagccaccttttgatttgtcttatcacataaggtactaactgtgacaagttctgatttgcatcgcataaattcattttggtttttgatacttgatgatcggcatgaaggaaaacctagtcaaatctgtcaaactaaacagaccagttatttctctatattgtttctataaactttaccacaatttaattgtttttccctttggtcatttcttactttgaactcccatgatgattagtagtaaaccccccttcaactatgtctgagagagctagttcctgcaactgttcctggtgatgccaggatgaccaccgagcaggtctcaactgatgttagtcttcacctcgtggagcactctaatggtagaagtgaacatgggatttgttagtcttcacctcatggagcactctaacggtagaagtgaacatgggatttgcagtttctggagagaattaatgttgtggcaggtggatgggagattcagagcggcggacaactccgggaatagacaggaaggaagggtagctggatgggttgctagttgtgagcttgtgtgtgcggtgtggaagacaatgtgagcagtgttatggtcatacataatgggagaagacgaaaatgtcaaataacttaactttgtaaactgtcaattgcattaaaatgtaccagttacttttggtggtataaatctaactctagatctttcagtggcacaaaaccaattttgcctttcagttactttcaagtttggatgtgtcctgaaaatttgtactacaacataggattttactaatcatgtacgtattttagtctaattcttgccattctgtttgacatatgctccagaaatgcttcaagtgataaccattatcgtcctttaattatgtgtcatgcagggaagaaatgttaaggttgatgtctagaattgcactaacaagtttgctaaattttggttatatctagttggctgcccccatgtttccgaaagaatagttggagagaccttggaaagggattctgatgaaattccaaatctagtaaaaatagttgccaaatttttttatccacttccatgggcctcagaacaaaatccccctaggcacttaagtaatgctacacctacgttggatgtgatgtgagctgcagcagccaattccatctatagggttgtgccaactcttaatggatctgactgggggaacaatggtcagatgatggttattgtggaccgattaatttattgatctcatacctttcattattttgttgctatctaattctcgccatttcggaattactctattcaagactcacacttgcagtatttactataatgaagaattatgagcacaacctttcacatcctgttttcctttatattagatgcagataaggcatccgtagttgggatttcgtccatgagttcttatgtcaggcctgcagttgtttccaatgtttatgctatagaactgtgtattcatcaccttctgtattgttattttgcagcatttgatgagattcaggtgggaggaagttagcatcataaattgaagcaaatttgctcatgtttttagtttattaggagttgagttgggagttcccgatgatctggtttggaagaatgcagcagctgatttagttgcagaggttatgatttaatcttattttattgtttgcgttggtaccgattcatttcttatgtattatgttgaaaattcatactatttctcaataacaatttaatgtagcaggtggtttggagccatggaatttctctcttgcatgacctaatcccatgccttgtgtgtctatcagcaaagggtgctactgaggtaagtttgtctattttaaccaccactttgacctatttgtactgacatttgtgtgactaatattattttgttttgtcgtgtgaattgttagaccgaattagtttgctttattctgaagtcaatttctgataatcgaattgctcatgtttcacattctggaggtaagaatcataattcttttatgggtagtagttcaactaacaggtaaattgacaccgttggttttaatcggtgataaaggcgaaccgctttccttatctgagttccttcagcagattttgccattcatttcct

SEQ ID NO: 20560 - DNA, 9365 bp, Oryza sativa
  unsure (1)..(9365): unsure at all n locations
attgacatgtttgatactgatgagtattatgatagttattggggaatgatgggcatgacaatgatagtagagataacatgctggatgccgcagacccaagaatggtagtaactgcgttgccatctaatccaataatatatttatttgctgtttggtgttctaaatcagctcatgaagaacacagcagattctaacagttcgaatttcccatataaaactataccttccataagaagtgtcacaatttgctaagtttcgttttgattttccatggtaattaggtatttcatttattgtaacaccccagcctctgtattgttccctgtctcttccatggggtcaggttcacatgcggatagcactcgagtactcgactttctcttttgtcctttcttcatgtgaaaaaagttgttaacccagaagtgctattgttggaggcttgcagcactctccgtatggcactaatcccatcatgtagcacataagttttcactctaatgggcgatgatactacatgttaatgaaagtgtttacccttcaactctttctagagtagcaatcattttcactaggtattagatgcacatgcttttaaagatgcacactactatgttgtatatgtattctattgttctattatgtttcagggtaatgatggagctagacgagcaaactctttccaccacttgggctgtctactccttgctgagcataatattatatctgaagcattccttactgcgtcatcctggtctagatgtgtcatcatgtaatttgttattatctaacattaattgggtggagctactatgtgcaaccgtagtaggcttcatgtagtagaaataattacttgcatcatattcttttctcttttaggattcagcgatacaaggaagttcttgtatactcagtcctcttagcaaaatttgaacccagccagagtgggaaagcaaatacacacattatgcatggtgcctcacacgtctattttctaatagacagtttgtgaagaatgttcatgatgtggcgaagacatgggaagggcagctcaaaaggagagcagaagagtctcatgcaatccaaatgcctgataaatactcaggtagtctcttagggttgatccttccattgctcctaagggtatatctccacataaaagttcacattatcataagattatatacataatgatgttgaattcttgctttatttctagttacttttgaatcttgtgaattatttgtatatctgttgacttgaaattattgtctttcagttccttcaatgtgtacatgccctctggaatcgagatattacttatgatctatcaaaaaagtttgcaaaagctaaaagacttgggatcgatgaggaggaaggtttccaagaaattgagatgagacaatggctacaggatatccgagagattgggtatgtaccatgcttgctcagatactcatgcagattctacttgctgtgttttcctctattatatgtatttcatgggtacaagagtttttgactttttattttgtcctgtgacaaatgatatttttcttcagaaaatgtattaaattgcagcaggcgcacaagggcaagatttgtacatggaattgggaggtatgttctcatatttccttgttttcgatgatctcaactacaatttagtggaaccatgatttttggattttatcatctattaaaacatattttttgttttatgcagtttgaagatgaatttgaagatatcttccagtttattttgagatgatgcaagaagtggatacaatggttgggtgttttgaggtaatttttccgtgagcaacaatagtgcaatgcaaagaatgcttattatacgtttatttaaagagtactacagaatgcttgagtgttcaatagtttagctaggtattagatagttttatccattagtgtttagggctttaatgtgattgggaggtgggacatgggcgataactgtggcaacagatctgtgcatctactatgtagtgagcatctattaacatccttacgaactgcagtagttctagaaaccaaatatgatattgacaaggttcgagacctgctcccatatcttctatggttacccctacactcgggaggtctgggggctggtcaggggtcgtgtcggccttctttacgcagcaccggatgatgtcttctcatcctggtggtgtaaagtgcgaaaggcaatcgccaaaaaggataggagatctttcgatgcgggcgacattttggtgacctggctgatttggaaggagcgcaatgcgcgtgtatttgagggtcgagcctgttcgcctgtcaacctttctgcagccatagaagatgaatggagaacttggattgcagcgggcttgattgtagcttcgtaagcggcagaggcggccgtgtgctgtagccttttctcttttctgtcttctcgccctcagattgccggcccggcaaaaaaatattgacaaggttaaaaaatcaatatagttggaatagccagctccatgtgctatgatgcatggacacagatgcgtatctctgaaatattctattgcatgctgccttcaatctagtgtagctactgaatccaacatgctgaacttaggaaagaacaagatatcagaacaactcatgagagaggggcttgtgtgcaacttttctgcagtgtcagtgcatgtgttattggaaactatgttcattcatcttagtgccgggggccactaactctactggcagttggtaaatcagaaactactctgtgttctccatgcctagttatttatgctctagtctgctagctattaactctcanagctaatagtgcctagagaagacagccattaggagtctgcagaactattcagtagggattaggtcttttgtgctgtctttcctgactcctgtttgttcagtgggtctcaatattcacatatgcatgattcagtatgtcatttgttctgaaatgttgtttactggaccaccaatttagtgtggtaaggttggcgttttagatatgtgaaaacttaggcttcctattaccgatgcagagttgtttaaagaagggttagataatcgtatgtaaatccaatatgaaactattggttctatcttattcaaaatgccctgttttttagttaaattgtgatgtaggctgtctttcatatgttgacacaaatctgttttgttaggacattttgtttcaagctcagtaatattctcacagtaacatggacaacaatggtgattttccatccacattataacgtgaatttgtttgcacaatggactttcaggatttaagtgaacaaagtaaccgatttgataatctatacttgcaggttgatttttttggaccgggaagttctatataagaaattgaggcctgaatttagatccatgtatgccattgacagtagcaagtaccctcatctaaggatcatctcaaatatgtgagaagtatgcacttgctatgatttctaataatcagcttgtagggttccccgtaaggaaaaaagagtacaacaactattttacattttagcatcaattacttcggatcgactattttacccctattttgatcttcaattttgattttgcccctgtatttttttaggttttcttttttgcctctacttttttgaaatgaaagccaactttgcccctacttttttttagaattacatagtacaacgtagacacttacaatgcacgcgcactcacccatatgaacgcacacacataaaccctatccctatgagcatcttcgaagactggactgtcaaatccttgagattgacgaagtcatcacagacgtctcgctgtcgacgggtacgttgactaccactaaaagcacaacgacgttaaatcctggaaaatccgctcccatgaggagtcgaacccatggatggacacgttgacggagttaaatctttggtgaaaagacgattatgctcttatttgatattgcatatttgtctcaatgtttattcaataatatctgcccccattttacatgaaacttgcattttggacaaacttttacaaatttgacaattttgatagaatattaaaaatgaattggaataattttgccacaaattttttgaaaaaaaaaggacagaatttgggcacaattttgacatgtttttacatagctaacaaaaggcatgtagcaatcacaaaatcaagcaaatccaaatccaaatcgcctgctctctgcatcaagccgtcgccgcctcccgcatgaagccgccgatgcctaattaagtcgagacgccgccgtcgcttgctcctcgcgtcaagccgctaccgtctggacaagagcctaccgtcgtctcgtcccctcgtcgagccgctgtcgcttggcttgcgtcgacacgcgcagccttctgcttgtcaccattgtttggttatcggctcaccaggggtataaaggtccatcaacgaattaaaaaaccattattacttctttatttctctacttctttagctccataatcccatgtcgactaattacgtctattccattaaaaaaggaaaaaaaattaaaaaccctaatttttagggtaaaattaatattggacatcaaatagggataagaacgaaattttcccatatataaaatacgtttttcaaaagtagtaaaatgtggcaaaaaaaaatccagccgtctattgggacacctcctaaagctaggaggaggggccccacggtgcagtttctcaggtgaccgcgaacgacgcgaaagcgcaggccaaattagggatggcaatttaacccgtttgcatgtttacccgtgggtaaaagccctaatagtgttggatttgttctctatgtaccaataggcatacgggcacgggcatgggtagtcactacctacccatgcccgtttcacccgtttacccgaaaaaaccaactaacatgtgatccctcggtcaaattagtatagatgccaccatctagtattgatgaacttatgtttgtggcaatattctttctctttttggactcaaccgcaaaggattcatctaaactaattagcaaagtcttgctttgattttctggggtacttttcaagtgtaccaataaattgtttgttagtaaggaatcaaatgctggagaattcatttctaatagatactcaaatgaaaaatttcgataccaaagtccctgttacttctctcattgaatctttagcaaaagctcaattttgttctgcaatgcttgtattgttaaatttggtacaactataccttttctttaaactatgataatgtctctctgcttgtggagatttgtgattaaagaaagtgttgaactgtgagtatgtggcgggtaaacgggcatgtccgcgggcacatagcgccggcgtgcaatggacgtgggtagtgtttcttacccgttatgtagtaacgggcatgaattatctcgcgggtacggcgtcatgcccgactgccatcaaccgggttccggatccggtgcgatcgcgccccgtcggagtcgggagcgggagcgggtcggcctccgcctccgataagtgcacgcatctctgcgcagcgcgaggccgccattctgtttttcgcctcggggagctaagccgccgccaacccgctacaaaaccctcgccctcatcgtcgtcgcctccggcggcggccgcggccccacgcaccgcccgctaccccaccgtgcgcgccgcgcttggccagcccggccgcggcccccctcaccgtcaccgaccaggtagggagggctggagcgcagccattccggagagtcgtcgcctcctcgcaccgagcgagcaggaaggtagcgggggcgccgtgcgcggcgaccaggcagggacggacgcgggcatccatcgcctcgtcgggcccctccactccctccccacctcgcgccgccggttgacgcggcgcagccggagcccccccagagcgcgcgctgcatcaccttcgccggcgttcgtttcgcccgtacctgcggaggcgggtcgccgacaccgagcgcctccgtcgacgcgacgccgcggcctgtctgcgactcctcctccttttgccccaaggtacaaaatagcaaacatatgctcagcatttcaccttcatatgcttctatttttgggaatccttttgatttctttaagataaaccaagttttatccatgttaaacagttacatcaagataatacaattactatggaggcaattacgcttttgactctgttataaagtctaagccaatctaaccttgttttctcaactttgctcatttcaccctatggacatgaccttattatgtgagacaaacgtaatggtgttaacttggggccataatgcatgccattaccttattctctcggaatttggcacgtcgtattggagaggcatacttgctgtgcgctgtgtgtcgagacttgagagtgatagctgcacattgcattagccaagaggctcggcggccttcacaccaaagagactaggtctggtcatcctcaacggtttgacggtaggggtgagcatcctcgggtgttgggcgtcgaaacgggcgtaggggatctctgtggtggcaatgggctgtgggcgtaagcatcgatcaggtgctccaaacactagaccctcttgtggaagccgggacataattggggaacgatgcaaattctttatgttttgtgtgatgaagagcgcttgccttactgccgacaaccttcaacgcaggggctggcatcttgccccaatttgccacctctgctcaaacggcggcgagtcatgccaccacatctttagtagctgctccttcactcaggaggtctggggccttgtcagaggtcgccttggtcaccttcaaacaacaccgtctgttgatctctcctggtggtgtgatgctcgtaagtttattgctaagaaggagagaaaggtatttgatgcgggtgttattttggtgacttggttaatttggaaagaacgcaatgcgcgtgtgtatgaagggaaaacaagctcccctgttaatctatgtgcgaccatcatggatgaatgggagacctggacagctgcggggttgattccagctggctgatctgtggttggggcggccctgtttgaggaggggtttttagtagcttttctttgccttgcccttttctcttttctgctccctgagttctgttcctggggtgataggataatttacattctcgcattctttcttaatatactctggccggcaaagttttgccggcccggcgaaaaaataattggggcaacatgttgcaccacgcatgatagtcgctcgggagaattataggatctctaggagaaaactacttttaatcatgaacattggcttgcgctactccgacggtttggaaacatctagatgcacttccactgtgtaactgtagttctgataccttatattagtacagatgaatagagtccctaaaatcaagcctaaagaagctgattatcacgttcaacaattgtagcatatatgttggcattaaataaaggtacataaacctggccacacccaaactagtccactattgtctgttcatttatagtttgctttagaacagcccattttactcaaatgctcgctattcttattgcaggatacaacatggacacgatgtcagataatacaagccacaacattttgtcccaggtaaaattttgtctcaaatctcactcatccattgatcaatggtaaagctagacatacaagcattttatagatggcaagttaactaaagtgatgttaaaggtagaatattccattgaaatttaatattttcttggcacattccaatacgcaaatatattcactcaattgtccataaactgcacatatatactcaattgcatgtttctttgttgtgctgttcgtgtagacataaggttcaaaaaactacatggttcaataggaactttgacagtgcaaatcaactgaaatatattatatgtactctcctatgtgtttccaatgaaatatgaaattttgtcaaaactgtttgagtatatattgatcaatctatatgaaattctcctaaaacacatatatgattgttttgtagctttttcatgtcattgtgctgctttcttttacttctaaccacttccttgatctatcgggttaccatcttcttaggtcaatggaagttctcaaatagtcataacagacagcaaggtccaaaaacttgggagttcagcaaactatgtgaaatattataagggtactgttaagtttggtaaaggacttagaatacaaaccaaagcatctgtgcttgcatttacctcatgtgatggagaagctgcagatgccttgtatgtgcgacttgttgcagttaatagcccattcacagtcaaaccattgtcatatggcagaggtattcgaaggtacagggaatacaccttcttagctgttccaccgccaagttgtttgctgtctaactacactgatggattcaatgataaaactgtcagtatgaagagattcactgaagaattcatcaagataactgggtatgtcgttaatgttttggcttatctgactgaatttatttatgcttgttgatgcatttactaattgttttgtgtttggttagggatattgttcgagcaattatcacccttcattgccaaggttactggtgttctggtttgaaagggaaacacatatgcatctacaaaatggagaagtgtactgatgcaaagatttggagtttttgctttgcaggtatgaatttggcaaaaaaaaagaagtgtttcgacttatatagtcagtataaattgctatgttcatagaaagcctctaataattttataattactggagaaaatgcatgattaattgtgtcaacctagagttgatatttcaaccttgaactattgcctcaatcttaaaacttatcatctctaaattctataaccataattcatgcctttatccaatatgaaggggttttaaggtttaatggtatcctagttatcgtgaagtttatatacaagttgaccttttagttatatatcagttgtaaaccaatgaaattatagaaatcactctataggttacgtgcagaagttgtgaagaattctctcataattaaaatatataggtgaggtactactattatacatcctaatgaccatgtaaaatacgtatgaaacttacaaactacaaagtaatgttgacatagtgcaaattcattgtttctgatttcatactttttatgaacgaaatcaaattgattcttaaattttatatggttgtaaaatactaccctgccctacatatccctcacatttaccttctgtcaaatatttgctaacccgttatacatacagggggaaatgaggca

SEQ ID NO: 20561 - DNA, 8031 bp, Oryza sativa
ttaattaacaagtgctatataatatatactagtaattgtatatctaccctgacttagaacttacgctgctgatctatctcacctctctccatccttgcactggaatttttaattttctgcatactagcatattgcccatacattaaaacggatatttaacagaaaattttaacccattttttaccactttctatatatatcttctcttaattcattcatatcctctcaactgataagtgggcactttgaactcatattctacgttctttaattcacaaaagtagggagctagttaggggtgcatggtggcagatttaccatcgccccactactgtttattttaaagtaccatatatatagattaatttcttcatccttccatactggatgctaatcaagcagagtttttttctagataattaatggataactcgactactgctgcgtcatcagaaacgcgcaaattaagcacaattattggcagagttatataggaagagtgatttcttggatcattaagcacatcagtttgtaggagtatcagcaatgatcagccattcagcctgatgaatgttcacaataatggttcctattttttttgggtacattctaaaactctaaattgttaatattttactgaccaccaagcctgcaagcatacatgatcagtcatgtggcagtggtccttaattacataaggaagccaggttttattttattgtattttttctatatatgcaagcaagtggagcatatactagtacagttcatgttcatggctggcttctagacaagtaaagctgtaactgcactatgcaagttgcatatctaagctagtagccccacatatctgatctactgatggttgcatcatggggagtagttagctaagctatctggtgatagttttgcatgtgtgatccacttgccaaccaccttccattggcagaagaaatcactttaattttccttttaaaaaagcggtagaaacttcaatggaaaaagtgtgatcctaatcgtttaatgccacacatccaacggctgatataatgtgtgaatgctgcattcatacaggaatgaaacaaaatcttaaataaatattgctaacaccctgaataggacctagtcatagttgtttctggttaatcaggaggaactaggtcaaagatgatatctttaatttctcctgaaagaaccaaagagcagtgtactttcaaataatgaccctagttggggcatgcacatggatgcatgtcatgagcaaacctttgtgtaaccgtgttgctcttgttttctatgttttggaaagatagcttttctccaagtggttttcaactggactaggagatttgtaaacaatatgcatggtatcatattgttgatcttgtttgtcaacatccaacattttctatctttttggataatttccacccttttctattgggaatatgtacatatcactggtggagaagtgctttttactcccggttcgtaacccctatatagtctcggttttccaaccgggactacgaagccgggattaaagatcgctatctttagttccgggtgaaataaccgggagtaaaaatacatttttagtcccggttggtaacgataaagcatttttagtcctgactaaagagactagatccggttgcttctttattcttttattttcttcattgtttttaatatattgatttcaccccatcccatccccaaaatcccaaatcaatcatcctcaaattgcctccaaatccacaaatcgatcatctcaaatacatcacaaaatcttaaaaaaaattacatcacaacttctacaaaattcatcacatattcacatcacacacaaatcaaatacatcacacaccaatctcatatccaaatcacaagttctcccaaaaaaaaaagaaagaaaaaaacgttggcgcagaccgccgcctcgtcgtgcgccgtgccggccggctggccctccacgccctgccgccgcgaggccgccagccgccggccctccgcgccctgccgctgcactagagaggagaaggagaggaatagataaggagaggaatagataaggagaggaggagataaggttgaggagaggaggagaggagttaacgaagaggagaagatacctcgatccgatcgcgcacgcctctccaatctccgcgtcgatctttttttcccggttggtgttaccaaccgggactacaaatagatctttagtcccggttggtaacatcaaccaagagtaaagcatatggcgatcttttttcccggttggtgttatcaactgggactacaaatagatcttttactcccgtttggtaacaccttaccaaccggtagtaaagattgaaaagtaccctggagcttttaaatcgggactaaagatgtttttagtcctagtttttaatacaaccgggactattgtgaaatctgatggaccaaccaaagatggtttctccacccgtgaatggaatccttataaaccccattggtcatgcacatatgccttttcactttacactttcgttcattcacaaccccatgtgtaaaatattgtcccaaaaaaaggccctggcaacacaagtgtttcatgccacatcttctcactacttttatgccagacgcaagatatatagctaccagcctaccacccacgcatatatatagatatatataatagctttacacataagaaaaattaattgctactaattaaattacgaagtgagcttaacattcaactgattgattacattggaacctgtctacccagattagttaagtcctaaattgacataggtgcttgcatttatgactaattagtattattttagtgataagcgatatgatcaacaaggcgcctgtgatgattttcatttttgaatcttaagacatatatatgacggtctccccagtcttcaagatgctcataggggtaaggtgcacacgtgtttatatgagcatccgcgtctacactgtgtttcgaaaaataatgtatatcaaattcaatgtacaacaattgcttgcatggatcttaggttaattagattaactcttttggatttttaacccgatttatggcatgacaagtaaaattaaacatctgccttgacaaggcataacggtctgtttggttggagggagttggtgatggggaataggagtttatgatatctaggagtttaagtctgtagtttggttggaggacttgggaattcgagggggtttgggatggggaattaaggggtccaattcccacccatctcttacctagggaaggcctgttaattcgtgagacttggagggaattcgatgtgaaaccaaacaagggatgaggagtaaaaaagtaactcccatgaccaatcccaccatcaactccctccttcaagctcccattcctcttcccttctcttgccaaacaggccgtaaaggaaaatgaggcggacacgtgggattcatgtggaattttcggacaacattttcacttgggtgcatttatgtattattcttttcttccttttttgatcaaaagttgtgtactgaagaatttatactcctttgatcaagatttggtgcaagggtgtggtttccaaaacagattttatctaggactaatttcaagaaacattgagtactatgtcctcaaaacaaataatgtattccagaaagcattgcataattataatatttctacaataatttgaaatggaagtactacaactaccatttaattatggagtatatcacaaagcaccattgactccatctactatgattcaaatcctgttgttggtcgtgtgcatccttagttggtacagagaccgaaggctatatcttttttaaaaaaaaataatttattatatccaaatgaatactgtagacagtttgatggctgaaattacaattttctttcctgtaaatgaatactccaattttatttactgccttgcaacagataacacaatttctctttttcacaccaaacgtgccaatgtgcctatttaaccatctttgacgaagatagtgagaaacacgtctttaacgaagcgtgaaatgagtaaaacctatttaaccatgaatatttattttttgagaattaaccacgaataaactaaccatgcatgtctcacactaaaacgaacaaacctatatatttaaccatgctgaattcttgtgtcaggtagaactccacgtcaatcctaaactccagggaaactttcagagatcgatcactcttttctgttactccagggagtatatttttcttcatccgagcatgattcctgagcataaaataatgtcagcagttaattgcactggcacccatgcacccacgacggtgaccatcatactttagttcctgtcagtacacccctcttaatcttccacctgtgatgtgctcctcgccatgtgatcctcgccccctcctcctcctcctcctcctcggtatctacacgccaagatctctctctctctctctttcttggagagttgcagtgtgatctgaacaaaagcttcagttttcagtgccatcttgcgttgcatctcctcctcgctttgccgcttgtttcgccaagtataaagcctggtccagtgaccctttttgtttcgatgtgcagggtcaaaacaaacacacacacacacatctgtctcttcttcaggtttcaggtctcctggctgctttgcttctgctgcctctgtgtggggctccagccttgctcagattgtaagtgtgtggggattagtatgattggttgagttcttggtggttcttggatgtgttgattattggtttgctgatctgtatgcccatctgtgtgtgtgtgtgtactgttgcctgcatctgttgagttgatgcattattggtttcagagcttcagagttgcgtgtatgtatgtgtggagattcagagcatgctgatgccccatctggataactaatcagatggttaaatttgtatcattaatttagttagaacaaaaaactagtatgccaaatgctgggtttttttttttggtgtgttatgttctggttcccctctgctagtgtcaagatccagcatttgttgatcacttcttggatctctgattcagaggccaatagctttcacttcattgatccagttatctgcacattaatgttagtgttagttactagtttcatatgttgcttctagatattttgtctggtaaatctcttgccagagatgaacaaccaatttttattttctacaagtaaattgcaagctgctatgatatctgatctctgctttttctctgcaaaaggatgattggtgatccaaccatcttcatcacttacagagatggggtgtggtgcatcaatccctaagaaatgcaaggtaggagggaaggggaagaagcgccggagcgtcatacaggaggttgccatattcgtgccgacaattcgcattccggtggacagtgatgttgcccatccactcagaggactagtatccaaggagctcgtcgaccgcctctcaaagttcagagaccgcgttgtcgcgctctctgaagatatctgtatgtcactgcctctctggctactggattctgaacattttgtaatgctaggatactgacaattgttctttgattttgttgtgttcggttgctgactacatatgaagattgcgcggatgtttcggatgtttcagagttacagcatgcccttgaggagtacttgccagttgttcttggtttaacaatgaaaggtctggccttttgcttcctaaaatttgtgttaatttcaggatcaagcttgatgttgacagtgaaattgttatgatttcaacagaaagccgtcttgaatcatcggtggaattcagatggaggaccttggatgatgacgaagtgagtattctggataagcgccaactgtaattccagttgtctgatgtttttcattgctttattgaaagatgatattttgaattcaggagtgttgtctttcaagtgcatggtatgaagttctgtcagtcatccacatgatggcgatgcttgcattgtttgaagccaacctgatacttattccgaagaacggtcaagttggaggtgaaaggaaggtatcagaaggtctgttcatctttttgctgtaaatatctctataatttttatgaatattcatacattggtgatatgtgcttagtttttaatcttaattgtaacatagttgaattgtctgaacaatattatagaatgcattttgatatctatacaaggaaattctatcacttgaagaatacattacttactaaatttagtgatattgatgaaaaatgaaacattgactgatttatttctgtagatgcaaagaaggatgtcgtcgattcgttgctcagagcatcaggatgtttagattactgcgtgcaccgtatacttgtacagatgccggcacaagtcaagtatgcctgaaacctgaaatgcacaaatccttgactatatatcaccttttatcaatccctttatggataccttttcagacttgctttgtactattgcaggaaaagttttcctagttattttcaggaaggtatgcttgaggccatttcaattcaagcattggctcaggtagtaaaatgtctcctttatataaatcctatgaataaaattttattttgaagaaactataatgaaattttgaggcatgcatttctttatgtttgtctccactatgaaaacagtgtgtagaaatacaacttggattggcttcagagtgtgagaaggcaactctgtcagtaaagaggaggctagcctgtgagctagtcagttatttctcacaggtaatgcaacttttttatttcagaactatatctgatcatgcatactgaacattgtctgtgaaatttctgatatatctcactattttcaggctcactattgcttatcgggatgcgacacgagcgactcgtttgggaagaagctcctgctgtttctgaagtggaaatgcatggaagccaaggttgcctgaacaaacaaaacaaacacagatcctgaaatctgcaagaaggccttgaattctgatatttaactcaatgttgcatcttgtcatcaggcagtagcatactactaccatggccttgtgcttgacaaaggcaatgaagccagcagccacatcagtgcagtgtgctgcctctctgcagctgatgatctagttgcagatagcaagagggcttgtttgagcttctgcttggcaaaccccatcacaaggtctgaattttctctgagaagaatgtatttttatgtgtgatgctaatcggaatatgcggtgataggaattttgtttctgaactgaattcagggtacctcctccttggggtatcatgaggaatatgcacaagaaaatcccagattctgcgtgcaagagattccaaatgtatggatatctttttgaacaagacaataacaggtaatactctgatctcaagagaaattccatgaaaatgattcaaaagctggaaattgaagcgaaatgctttttcgtgtttgttgatatgataattttctttggatttggctcaagaacatgcttgaacaatctgttcctcatctttattatgatcatactcaaactcttatttcctggagcagtgcacttcaatccttaccagatctaccagaatttgcgctgtcgctgagacccgaagggtatgaactgcctagcactgattcaatctgggataatgttgatagccagcctcagattcagagcctcaaggagcatctggatgatgaagacgaagtggaaacaaaatgatacttcagacatccaaaacgcttcatttcattgtgccatgaaaagtagcattagtactagcaaagacatcggaatgctcaattcagaagtgtttggattcagcatatggcattgagccaaaaagaaatcagaatatgtaccttctgtgtagttgaaagtatctatcactgattataaacagaatcaacaataataggaaagaagggtgtttcttatttttcatcttcttgctgctgggctgcaggaatt

SEQ ID NO: 20562 - DNA, 5727 bp, Oryza sativa
atccagacgctaaagctgcattcagcgctacaattgtctttgccttctctagaaaactcctgccacagagcacgggggaaagtgcagaaagcatgtcagaacgtctaagttcaaaataataatattcaattcaagagcaaaaaaaatatgaatgacttgcctggatttgaaaataattatacaattgttgacaaaggacaacaaggtccttgccagcactatcagctgcacctggattcagtttgtgtctttggcactggattgcacaagtaagctgattgtctagacgtctaactatagatggaagcaaatcatccacgatgaagagcctgagactcatatcatcagttgttgcaaggtgaatgagagaacgtaaaaaaggaatagccttgcttgttgcttcatcatccacaaagtacccaaagaggctcatatccagccagtcaaaacaatcaccagttaaaataaacctataagattagcagctttttacttgttctttatatcaaaattatcatccaacaaaaaagaacataaaaataacattgatagtagattacaagttagccaaagtagtacctaaagagagagattgatgacatagattcaggatcttgcaaatagttttcttctgttactgccaatactccaagaaattctgaaacttcacgagtgaaatcaagtagtaatttttgctgtagcttttctgtctcaccaaattcagaaaggaatggtacttcagctttccctttgtataaatgattgaaccaagcaaaattaagtacaaatttacactgtcgtaacatgggttgtacaaacttgattgccaatttcttggagaattcaggagggcaacacaaaaccaatggaatagctacataatggataaggctttttcaaatgcctcacttccatagaccctagatctttagtgatagtagcactgagagatagactacccaataactccgaaaatgatccaccaatggatggacatagacctatgccatcatatctgcagtatgacacaggccattataggatgaaatataaaagcagcaaataagtaattatcataacatatatttgctatatgagagttaggttcatgacaggaagctctgggaaccagcaaagggaccaacaaagaataaaggaatgattatttaggagaatatctaacaagtagaaaaattgaaatagtatatctgaaccactataaacagcatacttacactttctgttgaattccctctaacaatgctcttgtcttaggttcaacagaactctccacgatattaatgttagacaatccatcagtgattttaagtatatgagcaagctttgtaaggctcatatgtttttcttttttaagatcttcgaataaaccgtcaacaacttgattttcccgaagcgagtgtatatattgaatcagctgaagacaaagaggtcaaattaatcagatactatacatgtagttatatgcaacttaaaactatagcttcaataccataataccgtataacttagtttgaattaacacaaggtttatagggatattgacatgtagcagcaaagcaacaattgattgtaaacgtgttactcagcaaatatgataatgcacaggcattaagtttttttttttggcaattcacacaaatttagggttttatttttatgagatcaagatcaatgcataagatttgccactgttcactggaaagcactcggatttagtgttttgtttttataagaaaactggcctatatattgttttccatgtgagatttgcaactattgattgaaaagcattctaaaatttagtggtgggttttaagaggctaaaagacacaaattcaacattaatttattggtagtatctccataagatggctaattttcccgtgaacaataaaggattggaagattagaggctaaaagacacaaattcaacataaatttcttgatagtatctccataagaagactagttttaccgtgaacaaaaaaggaagacacaaattcaacatgctaaaagacttaactgaatccagttcctaaaagaaagagctaattcaaccatctaccatcttatgagattgagaagtttgtgatgctggcacagaacttcatccatctacatttgtttattagttagaaggaattttgttgaaaccattataatccctttgcagaaaaacagtacaacaaccaatcagtaaacaatgtcaacaatacagaaagacttgttagttagtatcaccggatcgatgtctgccacatgcagcaagtatcaagatacttccatttgaggacagcacgtttatgtttcggtgtgcagattaacttgatatacttccacacacttctaatatattaacgtgcaatccttttgcgctttcgtaaagatatacttccacgcacacctggaatttgcaggccggtcaaaacctaatactagcggacaattgcaattcaggttgcatttgctggacaagaaacctaccatggcttctggtaacccacaacaatttcaattttaggtttcgtatatcaacaaactcagtagtaattggcattagtaattaaaaaaaacgcagtctaagctacctgtttttgttttttttctgaggggaaaaaaaaagcacaaacctgctgctctgagagccctgaatctccagcgacaggagccgctgagtcaggcacagcggaggggaggacagtgtccatggcggtgcgggtaactgcttccaccgctcccgttcaccgccggcgcacctactcaaagctccggtcctcccgtggcagcgaaggcgaggaagccacaggcgagggccggagggccgcccgtggtagctaggcggcgccggcgtttccgcggggcgagagggcggccgccgcccgtggcacctaggccgggcggcgcgtcgattgccgggatcggggttagggttggggcagcggcgccggcggcttggcttcccgacttcaagttgcctacgggctacacgtttttttttttttctaaagtaaatttcactttagtccacttatatcgacctactgtaagttgtacattgtgctaggggtgggccactttttttcactttacaccacctatttttaccctcctttacaagttgtaccatgtttactgtaaggctgggtttcgacccacacaagtaggtgtacgtttactagcggccgacagtccccgtctctgggcaccagctgcgagggctccctcgacggcggttccgcctccctctctggtatgaccgtatgagtacttccctcccaactcaaaaaagtctcccttgacacgtgactgctgtgcagcaacataaactcaacaatcggcgcacaaacgccaccgtctaggtccaccgtccaccggctgaagaccctcgttgcatacggctggggcgaaaaggtacgtggtcgtcggcgccaaggtggagcaagtctcatcatccggtcgtgtcgccagcgtcagggcgaagggcctctgcgtattggacgcccatgccacctcgatcgatggcttcctgaggatggaatcgctggggtcgtcggctggctcgttactagcatgcttgttgggtttatgaggtagacaggtatgcgtctgctattcgatcatggagcaatccatggaggaatgatttgaccctgggacttgggagagtgaaacaaagcaatgtattcaataatttctatgagatttgggttttgtggggtaatcaatattcctctctactcttcgaaaaaactagagtaattaattcgtacgtgttcctcggttggtaactagaaacgtgtcgaattatctcaagaaaagaaaagatcggatcgatcttgattactgctaaatggaatagttggcttttttttcttcatatgcatgatctgaatgggatagttctggacttctggtatagtctcagatcctgtcaacgtaatcagatgtgtcgcgtgatcactacagggtccacgtccactggacgacgaaatgctcgccctcgctgatgaccaccccatcgacgcgtcgcacacgctcctggtatcgcgtaccaccgccaccatgagcaaattaaacaccagctgctcgcgtggattaggccaaagcgtagcctatgccgtaaacctggtccaacacgtaaacctggtccaacatgaaaaagatggtaaaattaggtggtgttaagtgaaaagagaaacttaaccctagcccattatgctacattggtcaatataggtggttcaactttttttaattggaatacacgttaattgccttcacacgttattggggattttaactatttgccacttttacatttgtcaattgctcaaatacccctcttaaatttttagttaataatatgccattggatagagaaacttttctacttttttgccacttttcacactgtacactgccacatgggcttgccaacgtggaatgggcacgtgaggaatgggcacgtgaaataacgaatttacccctgtctccagaacactaaattaggttctatcccctctctatcctgattcccctcgtccgtccaccaccgtcgccgggcaacgccacgccgtcgacgtctgtccgccccgcgccatcgacactggtccgccacacagcttcaacgtccgcagcaggcattattctttttggccaataatgttgccacataatttagaccgatgtggcaatgttattatgtcacgccagctaggctggcatggtcaaaacgttcatatcttagaaataatttttggaaatgtttgtttttaaaattacataaaattttgaaaagttcaaaaaaataaaaaaaataaatgtgtgggtattttgctatttctataacactgccttcgtttttttaataaacaatgttgttaacttttaaacacatgtttgttcattttatttaaatttttttaataatcgatgttgttaacttttaaacacatgtttgttcatcttatttaaaaaattgatgtaattatcatttattttgttacaagttattttatcactaaaagtactttaagcatgatgattttatattttatgcatttactattttttccatgatgatttatattttatgtatttatatttttttaaacaaggcaaataaacaaatgtgtgtttaaaagttaatgccgtcatccattcatctattaaaaaaaacagagtgaagagtttatgccaccaaagataagtttaattttagccgttaccgagtgaaagatgtattggatgggagtgtgggtgcacatctacacccaaatcccggtcatcttcaacccaacttcaaatgcatttctccccgattcaattgagttgttcatactaaaaatcctacagtgattttttttcacagatattttttaattaattacacatgaaaattgccaaacgtcgtaactcacggacattttgccagttactattgatgttagatggattgtagaatagcaaaagttctcaaatgagtaatgaatgtttacagttggttacatagtataggctttgacaataattatgtcacattcataattagcttgggtcatgttacacagtatttgtattggtaaatcccacgagctacctctaggagccgatacaaagaacaaatggaaagggtgttctcaacatatttcatcgagctatttgttttctttaatgcaagggacagtcagtacttttgtcattgaa

SEQ ID NO: 20563 - DNA, 1648 bp, Oryza sativa
gtttagttccaacaatacgcacatagtaatccaaaaacaaaaaaaggtcaatacactgaaatatctaatgtcagatgaaaagaaaacttttgttaactgccaatatgactagcataagatagttgtactcttgatagagtaatcattaaattctgggtatacttccatgaatgttgacaacctagctttacaacactttttaaggatctaatatattatacgttagactctaaactctaaagttcccacttgaggaaagtaaaaatctggtttgagcatttccatgtgtaagtttttgtttcttcaattttccttgcagtctgtatcttcaagagaatatcgcaaaatggtgagctgggattaaacaatgttccattaaaagtctgtccacactactccctccgtcccaaaaaaaggcaaaccctaggtttctgtgtccaacgtttgaccgtccgtcttatttgaaaaaattatgaaaaaaatttaaaagacaagtcacgcataaagtattaatcatgttttatcatctaacaacaatgaaaatagtaattataaaaaaatttcatataagacggacaatcaaacgttggacacggaaacccagggtttgtctttttttgggacggagggagtaatagattaacaaatttctgaataaggtccagacagcatgaaacaaatttgtatcttatggctcattacagatgagcaagtatgcctcgccgcaagctcagctctcaatgaaagccacgatcatgatacctttgcttggacacttcttttgcattagtccctagccaaaacatcaagctcgccataaccgtgactgcttagcctccttgcactgcaatgcgctacactaatcccagaaactagttactaatagaaaataaacagataacaattggtataaaaggaatagaaactagtagtagctagtagtcaatagaaaataaacagatatatagcaattagtagaaaaacttcagtggaaagatcccaacaaaagaaatgaaactaaggactaatagccttacaacacagctgaaatttaagcccatcaactttacaaacaagaaatttatcagtcaacttgataagaaactctaaaaaaatgtgttagaggaataaaaaaaccagtattcagacacaaaaaaatcttattgcaaaagttatttttcattctcattgtaatatatttatatatgcacaagagttctcttatatacagcaatgctagaaaaacatttagagatgaattaagctgacctctcaatattcaatatccagttcaagaacaaaattttgagcttggagaaaaatcttttccaaatttaaacgaagctgacattccagatctggatcccgaccaactaattggattttcgattgggattgtttaacctgtgattaaaatataaataataattatacctaattgaaagttacggttgtggtatttataaacacgtaccttttctggaatatactcgttttcatgctcaaataggtctcttagtccatcaatgaaagataaaccagtttctgtggttggtgcttgataattagaactttgagttatccagtgaggcatagccttcgcccattgtaaactagcattcatgaatttcaccagttcgctaatgat

SEQ ID NO: 20564 - DNA, 4953 bp, Oryza sativa
gttcattgccaacagtgttcgtttttccaattcctttgctttgcttataaaccacacttatcgtcgtgtttttttttcatggtggtaatctctatatatctaatacaaaagctcgaatttgagtttgaatgattttaggcttggctcgaatgtgggttttggctcagcttattagcagcacgtacgcaaatcaagtctggtcatcaactcatgattaattaactgctataaacttagacatagatttatttatttttaataaacttctatatagaaagtttgtatcaaaagtgtatcttttttagcagttcataaagcgtgctaattaaaaaggcaagggagtagctaaatcctaaaggtgcattcaaatcacccttagttatttacaaattgttagttacaatatattacctccgtcccaaaataagtgcagccgtgggaatccttatctaacgtttgactgttcgtcttatttaaaaaatttatgaaaaaaataaaaaaatagtcacacataaaatattatttatgttttatcatctaataacaataaaagtactaatcataaaaagtttttaaataagacaagcggttaaacgttagacaacagtgcaaaactgcacttattttaggacggagtgagtttctaattgaacaatatggagtttctaatgaaaacctccttctcagtgtctcttttcattgtctgtactacacaacatgacgtttgcaaaagaagactaacagaaatataggaaattacatttaaaaagacataaggtctagaaaataaaatgtcatgaagtgggtgtgcatgctcaaaattttcgtacatgagtttggtgttacaatgtaatttttttctgaacgcacaaaagaaattacatgttattcctttaaatgttattcctttaagatgaaagaagggtttacacaatgtaaaagtcggagggcgtctgccagggattaggggattgaaggattaataccagaaggtgctattagaggaatgatccccaaaaaaaaggaagaagggaaggaagctacataggtcctatcctcctaggaagcccactagaaactacagaagtattgatacaatgtcacatatatactcacatagttactatttattagtgcattcaattatttattgtgttgatcattattttacccgagatgcctgatttaatttgtctccagttttcttctcctgttcggtctcccatattgattttatctatgacatatgctaatgacctttctataacccatttattcatgtctcatatatattgcccaaatttgctccttggtaactgcgatgaggttttctaaagcaatgggataacaattaggtaggagatcaatacatacatgacaactagagctagagggatccaagaggtgtgccgcccgactacttgagtagaggcataacctgtaggttagtattgaagactattgggaatctgagatgagagaaccctgatttagtagagatgggggaagaaaaaaaaatgaaaacttaaaattaggcggtccgataaatttttcaataatacttttgaccacaactacttattatgaactatatgagattgtaatataatcaatttttccactgtattgacaatgcacaacatgcccgatggtatggcctaccctttcacatcatagaattactctgcagcggcagcccggcaaaggtatcatccatgacaaacgagtttaccctaaagattttaccataaaaatttgaatactataaaacatcttaaatgaaaatttgaacaaacataacatagaatttatttaactagcgctatacattttgtgtaattttacatacaggcaacaacttaagttgccaaataaaactcattacaaaccaagttgttaccttctaatataagctaaaacgtaattgttgtgaaaaaaaacaaatacagttttatactccttctgtttcatattatttttttctactagtgaaacattttttaatttgaccatatttatagaaaaatatagtaacatttataaaaaaaaaaatattatcaaactgtatccaatgttacatttaatgaaactaatttagtattaacaagttaatttagaaaataatcaacatgattataaaacagatgaagtataatttattcaagcctcttcatttattaaaactgaaaaaagaaatgtaatttgagaacaaaaatcccttgctcatctcccttcccttccgttcgccatctaacgaactttcgcggaataggcggttcccacttccatccatgtccattcccctttttcctctccccttcgctactcgccaacagaagaaaaaccctcacctccactcccccctcgccggagccacggcgaccctctccaccccctgccttgccgccggcgagtgtccttgcgtgcgccgccggtgagcgggtgtggatcccagcggcggcgcgatcggccttcgaatcgaactgaaaggtattgggctcttctctctcgtaactggggatcgattagatcggtgttagattggcctatttgcgtccaattagccgatcctatttcgtcccgatttcatttatatgatccgtggtgcgtgctgcagtactaattgcaattttgtttttatttttttttgcaaaataattggggctcagctgaaccctcgttgccactgctgtgaacatgtcccaaattgagaagatcgtatgagctatggggaattattaggattcttggaggcggcggcggcatatggtgttcttcccggaggaggtggtggagcacatccttgggtttctagcgtcgcaccgcgaccgcaacgcggtgtcgctggtgtgccgggagtggtaccgcgtcgagcgcctcagccgccgctcggtgctcgtgcgcaactgctacgcggcgcgcccggagcgcgtgcacgcgcgcttccccggcctgcgctcgctgagcgtgaaggggaggccgcgctttgtccccgcggggtggggtgccgcggcgcggccatgggtggccgcgtgcgtcgccgcgtgccctggcctcgaggagctccggctgaagcggatggttgtcactgatgggtgcctcaagctgctcgcttgctcattccccaatttgaagtcgctcgtccttgttggctgtcaggggttcagcactgatgggcttgctactgtcgctaccaattgcaggtgagactaatgcaagcttctagattttgtgtcgtaatgatctgaatttaggagtcctccattagatattgactttgttggctctgactgtttaagttaatcttgcatagccattttaattagctatgctttacctattgttaggtactcaggttttcaaccttcttgatgttcagtttatggcaatgctcaagtctagttcacatcatggaacctcattcgtccttgtgtacttcgtttcagtttaggctatatctatctattacaggtttagagatcataatcgcgtaactaaaactgtcaaacacaatgcacaagctcctcacaaaatttaggggcaatctaagttttgcataatttagtttgaatctccagttaaatacttacactatttttttgcattagttgttattagttaacactcttttattcatatcaaatcgtgtgatatgatttgcttgtctatttattgggattttgtgtgacttatgtcagaagataattattgaaatcacgaaaatatcacatattcatttttccatgagcacttaactgaaatacttcaagattcctttatccatagttctcaatgtttatgtgaactccatatagcaaggtggaaacaccaagaacaaccatgtaatgttggaaaattgagcaagtcactgctactagtatattgttattgcaattttaaggagcactggaaacacttcattgtatacttacacatgtttgggaaatgttttgactaataaccaagaaacagtgctggagggtggagaactggagatcaacaaaaattatacttcctaaatccatcctaaaggactaaagaaatttaaactattcactgttttactttttcctatctaatagcttttgcatttctcagtttcacagtttcatttataagccgtctcatgtttttttaataacatctattgaccttttactccaaattgaattatgataagttgtttggttatttggatgatatcatctttaagggtgttcaccatccagtattttgtgcactacctgtttgtttttggtggaactggtggtcagtgctcaagaggcaccagtgctaagcatatttcatcggcttgattaccttgatagtcatttaatcatagtagctggcaacaatttggacaactttaaatttgtgatctcatacttctgttctgttacataaagctaactttagatttattttcacctctactgtctctagtttttctgcagaagtattttggctgacacaatgcatcttatgaattttatttataactcttcgctcttagatttatgaaggaactggacttacaagagagtctggtggaggatcgagactctcgttggcttggatgttttcccaagccttctacattactagaatccttgaatttttcttgcttgaccggggaggtgaatagtcctgcattggaaatactggttgcaaggagtccaaatcttagaagcttgagattgaaccgttcagttccacttgatgttttggccagaattctttgtcgcagacctaggctggtggatttatgtacaggatcttttgtacgaggcaatattgttggtgcatatgctgggctattcaatagttttcaacattgcagtttgctgaagagtttatctgggttttgggatgctacaagcttgtttattccagtgattgctcctgtttgcaagaatctaacgtgcttgaaccttagctctgctccaatggtca

SEQ ID NO: 20565 - DNA, 11083 bp, Oryza sativa
tattgaatttatttgtcaatgcaagaaactccaacaattgtgggtaagacttactagaagtaatgcaaatgatttgctagggatttatttaagtaatctagttatgaagtgtgatactgtgttggttgtttatattttcaacttacaaaatttataggggttgctggcgaatgggaaaaaatataggtgtttttttgcgaggttaagtacactgttaacgttcctgcagtcgataggtgcatttgttgtgacttgtgaggttgattatactgtttccctgtttacaagaccgttgcactggaagtatatggaatgacagtgtagatgggatatcattttcttcttatttggaacttctgttttggcaatcatatcctacttcaatcagcttatggtttgagttacatgcttagtaggcaagaatttcatatacttaaacaaaccaaaattcattttagtccactttctagtaactctcactgtttagcagaggtgaattgcacccctctgagttaaataaaaaaccacaaatttgtttgtgcgaatgttgatctgtttgtgcaaatgttactaaaatatctagatggtgagatagatttacaaatgttctagaattttgaaataacaacgttttgaattttcctgtatctttagtaatgctaccatggttttaatgttctgatttgtgttttggtcgcatcatatacagttcaacgtttgtgtcaacatggtactgattccttgatattggaagattgttaattgataacttgataaaactagtctggatccacttcataccagggaaaaagggaataatgccaaatatttgttggactagagtatcaatgtgacctaatcagttcactgtgtgattagtgcacataatgacacaataaatcaagtataataataattggggtgttatactcaggttagataagctttgtatgtgggttgtgttaacaactatttgaatagaagttaaagcttactaactgcagtagaatgctatccctatgtttcttctatttgtgatgcagttgttggttgtttcttcataaatgtgttttggttacctaggccttatccttggtttcaggtgttagatcacattggtgatgaaggattgaaaattgtagcctcatcctgtatacagctccaagagttgagagtatttcctgcgaatgcaaatgccagagcaagcactgtgacagaggaagggctagttgccatatctgcaggctgtaacaagttacagtctgtgctctatttttgccaacggatgacaaactctgcactgattactgtcgcaaagaactgcccacgattcacgtccttcagactgtgtgttcttgatccaggatcagcagacgctgtgacagggcagccattggatgagggttatggggcaatcgtacagtcatgcaaaggccttagacggctatgtttgtctggacttctcacagacacagtgttcctctacattggcatgtatgctgagaggctggagatgctttctgtagcatttgcaggagataccgacgatggcatgacctacgtgctcaatggctgcaaaaatctcaagaagctggaaatcagggacagtccttttggtgacagcgcgcttcttgcaggcatgcatcagtacgaggcaatgcgctcactctggttgtcgtcgtgtaatgtcaccctggggggttgcaagtctcttgcagcaagcatggcaaacctcaacatcgaggtcatgaatagagcagcaagtatcaatgaggcagacaatgctaatgatgcaaagaaggtgaagaagttgtatatttacaggacagttgctggaccgaggggtgatgcgcctgaattcatctcaacgttctaaatccatatatttttgaagttgaaggtttgttcttcgacaaccaccttttgtttatatcatactctgctacgtcgagttgatctacatgttctaaagatctatctatcttcacggtcgaagggatcttctaggattattttgtgtaaattcctttgctatcacctctgctatgtcattatcttccagcagtgctacacttatgattaatctccaaaattgaaactctatagttatggttaacttggcagattgattacacatcatggtaacatctaagccttgtaataccataattctagcaagtcatatgcgtggttcatcttcatgtatatacgatttcatatcgatgctctcatgtaatgtctgggaaatttgaagtgccaaattgttacttttctgagtcgaaagatatgatcagttaagcctgatgaacagctgattcagtagttggaccctccaatttgttgcagcatttcagcactggtcaagactaatctgtgatttacaagttgagaatttgagtagatccccatcctgtttaccttcaaatactctgaaatttttctttctgatgtcgcaatccaatgtccatgtcgctgcaagacagggtggcttggaagtcagtcatctcgctgtcagttgtagcgtgggggtgtactggtgttgctcacagtttgatatcatcatcatggccatcacacaacatgcttattcctgcacggtttagcaagctttaattgaccaccatcatcgcttgctgtttgatcattagtactacatcaattggagtccaaattccaaaatgtttggttataattgcttcgaggcaattaagatgtttatgagggtaaattaaggacttgtttagttggggaaaatttttatatttgattgtcacattggatatacggacacacatttgaagtattaaatgtaatctaataacacagtaaattatagattccgcctgtaaactgcttggtgaattattgagcctaattaatccgttattagtaaatgtttactgcaacaccacattgtcaaatcatggcgtaattaggtttaaaagattctcctcgtaatttacacgtaatatgtgtaattgttttttcttacatttaatacttcatgcatatgtaaatattcgacgtcacagcgtgaagatttttgttttgggaactaaaggtgaaaacaacatgatggtaggaaaagaatgagtatgagcatgcagcgacgtgtgtaggacagtacgggtctgtgtcatcatgtgatgggagagccccattgctctgaaaattaatgtagagaagtttctgcgaacgtgatatatatacgatggagagggagaggggagacagattgggcggtgagaattaaatcataaaatcaggatctcatcgacatgtatgcctatgcttatgtgtcggcgctgcgtatgggtcacatgcacgcatgctactgttcgatgactctgtaattaacattatatttttgtttctttaattagtttttttctcaaagaatcaacccacttcttttttttttcgtgagtcgttgacgcaattcctgacatttgaccttatcaggtacgaatggcagtatggcagtgagaaccgagatatccagtacaagtacagtagaaaaaaaatactcatcgaagggtgataaattacactaaatttctcccccaaatgttttgattgatttatgtcaaatcatacacaagtactatatccgtcccattaaaaaatcaacatagcaccacgaatgtgatcatacatttgtccaaattcattgtattaaaatgtaacaattcgttttttctttcgtggaacagaggaaatacatagcaatgatacaagtgtactggtaatagtgacacgttctttatgaactgaacttcataaatatttgatactcattctgtcccatattgattcctagcaattcttagataaattagtaatgagaaaatcaaacaaatactattgacaagccagcaaatatttgatattcgttctgtataatgtggcgtggaggagagagatgcgagttgagatagtcaggccggcactttacatgagcagtcgcttgcacgggtacctatgcaaccagtgggatccatagtaatatctccgtcccaagataagtgaagttgtggggaaccatgtccagtgtttgaccgtttgtcttatttaaaaaatttataaaaaaattaaaaaaaattagtcgcccataaagtactattcatgttttatcatctgataacacaaaaatagtaatcactgaagcattggatatgaatagtataaaactgcacttattttaggatggagggagtagtagcaatgtagcatgcatggagggagcatggcttagggttgtttctgagaagttggttggaagaatataaaaaagttaggtttcctaactcctggctttgaatttattttctggattctacagctatagcttcttagaatctggacacgtttttggtgggctcaggtgagacttttcatccattaaatgtatcatgtgtatatagcctcgtagagctttaggtggtgtttggatccagggacttaactttagtttctatatttagacactaatttagagtattaaatatagactacttacaaaactaattacataaatgaaagctaatttgcgagacaaattttttaagcctaattaatccataattagagaatgtttactatagcataacataggctaatcatggattaattagactcaatagattcgtctcgcgaattagtccaagattatggatgggttttattaatagtctacgtttaatatttataattagtgtttaaatatccgatgtgatagggacttaaaagttttagtaccatctaaacagggtcttatacatcaactcttcgactagggctgtgtttagttttacgctaaaattaaaagtttgaagaaaaaagttgaaaatttatgtgtgtagaaaagttttgatgtgatagaaaaaatgaaagttttttaaaaaaagttgggaactaaactcggcctagctatatataaaaatcggagtaagcagtaagtttttttattgactttgatcttacaaacaagtaaataaaagtacgccgctagtacaacatctagtaaggccatgttcctgcattagtagcagatagatttttttacacataaaacgagataaaccattcaaacataattaatcaagtattaattattataaatttgaaaatatatttatttgattttttattttttattatatatcagttttaataaaaatatcgtttagcggttaaaaaagcgtgttaaacaaaaacaaaaaagtttatagtttggagttatagtctagaacgggacctaattagtactgccagcaagactataaatacgttgagtgagttgactgagatctatcaggattcggtcattcccaacccaagacactagacatagttttgataaacttcacatcatcatgaaactagtactagacactactctttcaatgcaaacatcactattccgtacttaaatttaatgctacttatctcacatgatgtcttggatgttgtgtagaaaccatgtcttatgcaagacatggtttccttctctttcctcatttattcacttgccacatcatttttcattctagatggcagcttatttaatgctatggactctatcctggtcattgggttgggaatgggcttataattatttccatcagctttgcttgcttgcatatgatacataggggacactggacacaccatctgattaagggtgtttagttcgccaaaagaaaatttttggtgtcatataggatgtttgaccagatgttggaggggttttcggacacgaataaaaaaactaatttcataactcgtctgaaaaccacgagatgaatttattaagcctaattaatctgtcattagcatatgtgggttactgtagtacttatggctaatcatggactaattaggctcaaaagattcgtgtttaatgctctatgcatatgtccaaagattcgatgtgacgtttttaggaaaaaaaattcgttatatatatagctatttcattggttcaaaaataaatcaatcttatataggatatgacacattctaatatgatgaattcaaacacaaaaaaatattcagattcattatactaatatatgccatatttgttataaagattgatttattttaaaatcgtgatagtagatacttcctctgttccaaaatataagggattttagttggatgtaacgtatactgtactataaatctatacagggtatcataatactactattatgaatctagacatgtttcttatctatatttatattactagcatacgtcatattcaatcaaaatgctaaatatttagggagcgagggagtagggccataggagatggaggacgacatacttgtaaaatcaaaaggtgtttttgattattattctgtgatgaacaattgggcattggagattattggttttgttatttggaacttattcacgaagtggttttggagatgattggattttataggtgatcgcaggattcgtcattttatgtgaccggtcagaccgggatctggtagccggtcagaccggcgtgtaatgcgcggtcagaccggcgcagcccgcggtctgaccagccgacactgtgtcggtttcggtttcgggttgtttatttggatatccgagtttatttcatgattataacttctagatggatactatacgtatgtaatactattgtttgttgctaatgagtcaagttggagatagcttggtctcggaatatagtttctttgtttgttccatatgtaagtgactcgatgtcttgggagagtatttgtggtgatggaccgggagtcggcttggggataagacgacgtccgtggtggtcagagatcatgcaggatacttaggctagagttgatacacgtggttgatggagattctatatggcatacgatggagttattgtgtgcatatgggatgcggagtcgaatttggaaggagtccaaatttggtacgattggttatgtaaagtttctttcttgtactatagagttttctaaagtgtttaggactcctagtatgagtttggtttgtggctttaggctgcctacctcatatataaatagagggggagcgtgaggcttcccggtatcgctttagagaccaattgagttgagttttcagttagggtttcaagtttagtcgaaatttttgtaaggagtgctgttggtgcactttgtaaacacagagagaatcaataaagtcgtcatctactttaagagttcttcgatttgtgtttcaccgggtttcggcggtctaaccggcgatctacgggcggtcagaccggcggcaagtggcggtcagaccggcgggagcacggcggtcagaccggcggcggcgacaggcgcggcaggcgactttggcggtcagaccggagattcaacaccggtcagaccggcggcattcactcggtcagaccggcagatcaatctcggtcagaccgatctccgtcgatttcgagggtaacttttatttccgctaaaagttttcggtttttggtataccaaccattcacccctctctagttagcttagttcctgtgatttgatcctacctgtatgcatggaagaacgatgaatcagcataatcagtgcgatccgatattgcggagagcagcttgccgccggaccaatcatgcaaccctacatagtgcgtcgaaagcgacacgtgcatgcattctcgttagtggaaacgtacaatcgaactttggaactttctacgtgtgtgtcatttggcgcatttaactttgagcaaatttcgttaatgaaaaaccccaattattatattttatttagaggaagttcatattttgagagacaaaatgtttcaaggagccccaaaattatataaaacacactcattttcattgttatatatgctttcttaatatacattcacaaatataataggcgcaaaatgcccatatattcctcatgtctaaattatattcttcctcaccctcgctctctatgattgcacaaacactcaacacaatcctcaccgttaatgacagattaactggttacatacatacaaaatggtttatacttttgataatttacaagtgtaaaaaatggggctaatgtgtatatatacttgaaaaatatcacataccatttttttaaaattattatatataaatatattagtcaaatagataatataagtttaaaaatagggttctcgaaacattttacctcaaaacatgggttccttggaacaaaaatcaatacatgggtttgtgagttacacaagccaccaaaacatgcgtttaattttgtggaatttactctttaactttcttccggcttcattatagtgtaattcttccactgtctttgccgctcgatcacatcacttctcctccatcttcattggctccaatacctcctatcaccatcctacactgtctctggtagctcatgccaccagctcccacagccccctaacagatcgaacggcgagattcctctgctaccaacaacgacccatcgctctccttgatcttgtgcggccaaggaggcaccaccttcgtccaccccaccacggcggccacagccccaccaccattctaagctagggaacaatcccatcttcccctaaaacctaaccactcaggagttcactggagacgaagacataactgaatcatataacaaaccgtaaggtcagatattcacacattttgcctacaattaactttatactcggcacttctcctactctaacacgactcgatcaacggctaactttgcataatttgcgacatctactaggctaacactaagcaaagatcggacgatccacgtaaagtgtaaccaacaaaataaaccgtgaccacaccagtcgggcaacccttgtttatttttatgtaaaaaaagatggaatgctacagctgcgaaatgaactaaacaactgcctaataaaatgtggcacacgtctaacatttagaagaataaacctcaaattaataagaacaaattaactaaagctagctatgtactccctccatatttagacttgatcagcatatattaatctataatccatgtaattagtgcatcgaagaaagaaaattattgcttaatttggtggatgtttcattcactgcgtgaaggtgaagagatgcagtgattccctacatataaattaacagtcccatgcgcatacaagcacagattcattcacttcatatatagaaacgaatagaccatgagtagagtaccaaatatatgtgccgatcatttatgaaaaacatcgaaatcttattatgacgatcatttataaatagagggagtatgcatcaatgatgttgagagggcagacgtttacatatgcatttaacctaccactgcactagtgcacacccttagacaacattgtaggatcataggattgacaagatggatcgaccatagcttctaacctacctggctggcatggcatgcatggctgccggatctttgcattggtggttgttacatgcacataaggttaagttgacggtgtagtcggttgggtagttgccatcactcactcatgcatgctgaatacacagcgcaaaagcagccgacaatttgggattagggtttctttctcctggccggcccctcggttcatttattttctcaatccgacttaatgtgcgattgagcaatgataataatgagctatacacttacgtgaaaaagagaaaaaaaatgagtagtattggctctcacgtataaaagtttagctctatacatgctccaaaaaatacgcattatagaaggtttaatagagtatacataaccgctgacgattaaaagtgccacttcagattggagtgatcaagagaccgtatgtttagcagctggctattaacacgaactccaatagattgatccatattttttaatttaactttcacacacaaaatgcttttacgtggaccccacaaccgtatttttactggttggtggcttggtgctgcctgtctcacctaggaatgtgtttggagccaacagttcatcttccagttcatcacttctgcatgcatgcacactacagaaaaaacctcatatacagaggcacttttgtagaggcgttttgtaaattacttctaagatcagaagttttatactgtagagacaatttatagagacactttaaaaattgcctcgaaaacttttactctagaaacattttcagctcagtttatttgattttatcttgatgcattctttcggcacggtaaaatgtgcctgatatgtaaaggcattttcttaagacattttagactatgtagagacactttttagaatgataatgtgtactaaaggactaaatataaataattaaaggcataaacatacgagtaatgacatggagttgagttggttaatgcatcaagagatcttgagtttaaagcctaactaaagcaaggaaactattttattctcctcttttggactagtttcatatgtttggtacaatttaattcctttttttactagtttcatatgtttggtacaatttaattcctttttttactagtttcatatgtttggtacaatttaattcctttttttactagtttcatactattttattctcctttttttttgactagtttcatatgtttgtggtacaatttaattccttttttggactagtttcatatgtttggtacaattaaattcctttttttgactagtttaatacatttgtggtacaatttaatgtctctagaaaatgactctaccatctaacatgcattttataaaatatatcttcatatgtagagacaaatcatcataagacacttattagactttttaaaaatgcctctacagtattgtaaaggtatttgaaaagtgtctctacagtaatagaaaaatatctctacaaagtatttttcttatagtgacattataccatcagtttaaactgtctattatacttgctcttaataaatttatagtaagagagagagagaaggaaaacaaatagagctaacattatagacatgtacatgtgagctctgcaaggaaaagcgatcgagctctactattaaacttgctagcttttaagttaaaacacatgtgat

SEQ ID NO: 20566 - DNA, 19765 bp, Oryza sativa
ccatcagccggcctttctctagcaaagacatgtgtatacgcttaattgtctctgcttatatattgtgattgtatatattaacgcgtacacgccatctatacttagtattcatgaattgtgttgtgttggccatttagcatggaattaatgttttcttggtaaccaattacttactaaaacaccacttgtttgattcattggtttgtctggttattgtgattgtatatgtgtgtatatatagtactaccagggcccaaccctactggaattggaggtagctagctagctagagaggatcagtatatatatgtgtgtttatctcttgtatgcttgctttgattggtgattccaacaataattaattaactatatcatcttcttggtgttttcttaactttgtcttacgtgtgggattagtgatgagcctcttttgctttggccggcctctcctgcatcgtgcatgtgctttgttaggtcgattgatcacatccctaggcagtttactgatttgccagaaaggaaataaaaactaattaataatgtgctcttgagaaaataaaatccctttttaattgtgaagagaaaatatccaatacacacaagcttcctgtgtacactctgtgcataccaattagcaaatatcctagaaaattctagaaaaaattggacacatacttccaatagtattacacatatctgtaaagtctcatattcaaattcattatattttagccgtaacaaaaatgtgaaaaatctggcagttttaagagttaaaatatatcaaaattttgtctttttgttacggctaaaaaatatataatgaacttttaaataagatttcactcataggagtgtgttcattttctctagaatgtgtttattttttctagaattttttatgatatttgttagttggtgtgcacgaaatgtgcaggataagcttatgtccataggatgtttcctatagtgatatgattatttaggcatatatattgctatagtttttcactgtctattggagctatagctgcaaaattgtcatactgattcgtgcacacactggcattacttgcttcaacaacagggtgtctcaactagcatgtacacgtgtcacatgaagataacactttccaaaaaaaatgcctggctttccaatatttttacaaaaggaatattcagcaaacaattaacaaactataaattactcaaatctagcacatatatgtgtatgtactatatgtggcaagtgcactgttactttctcacagttgctagtaggcagtagctccctatatatgcatggtcctctaatcccatatgcattcatgcaatatggcactaattaattacaattaattcgattatatatgattatgatgacacaggagtacccagcagctacggcctacaaactacaagccagcagctttctgttacaccttccgcttaagaaagcgatccaatctctcttgttgttagcaaagctaattaaacttaattgatgagatgccaaatgcaaaggctttgatttgccgctgtcagcaaagctctctctacttttatattttgagcgaaaatttgtcagctagctcttgcatggatatattatcatcatatcgtacgtacgtacagtgtcattatcttaatccaataattaatctgggttttactcttttgctccctagcttcttgttgtttctttcacgtcgcttttggtagtacacctaggcttggtccgggtgcatgactttgactcctcaatttcgtgcataaaattgacaggaaatcgggaaggaggtacggacgcaggattttacaaaagatggggggtacaaacttgaaaagaaacatcaattaacatatggaaaaacttaaaagtttttttactagaggaaaaaaactaaactatgtaaaaagatataaatagtagctcactataaaaacgattttcctgtataaggagctcttttgattgcaaacggaccgtaattggtcgcgtctgcaaaaaaatcctcccattttcgcgtgcagaccgttaagagtatcgcaagcgaaaatcgattttcgcaggtgggcacgtaaaaataagcctatttttgcaggcggatctcttaaggggccacacgattttcgtgtgcgggcctcttaaatgcccgcctacaagtctatcctccctcctcttttccctgctcaacacttcaaaatttcatccttatccactcatccttatcctctcctctcctctcacactctctcactctgtctcctccctcactgtcctctcgtggtcatgtgtgggcgacgcggccgacgacgggcggcggcgcgtacggcggtgggcggcgaacgcggacggcggaagcgaccggctcggtggccggcggatccgcctttgccggccttgcgatgggcgacggtcaacgagggacggaaggcggtggatccctcgctctcccccgcacagctccggtggcaggctcgagcgggaggccggcggggctctcccctgccctctcccgcgtggatctagcggcgggcggcgcggtggccactgccgacgaggaggaagaagaggtggccgggaatggcgtccttggccccaccacggccggacccgtgccccccgacgatgacgaggaggaggaggcggcaggcgggagtggcgccgccagccccacgcgcacgcgcgctgggcggatctgcgccgccctcgccgccgacaaggaggaggaggcggcggccgggagaagatccgctggattctagggtttttgttttttcgaattttaattttttccatgcgggcgacgtaagcaaccgcatgcgattttcgcgtgcgggtgcgccaccctcatattaaaatcagattttcgcataccttttggtgcagacgggttgggcttacacacgcgaaaataggtttcggcccgcacagaaaaattgtttttgtagtagtggattttttttgtttgaattgtttggggttattttgcaattttggaatcaactatagtttagtcaacaaatcattttacacatatataatacctaacaaatccaagggtatttaagaaaattttgaggtataagtgtagcacatgtcccatgctgtgtccgccatgtgtacgtattatatagataggcatagatatcatgatcggtgttttatggagaaatttttgtatgggcctggaatatttggaagcaaaggaatagtttcatctttgagaatactcttccttccttggtttattggagaacactccttaagggtgatctccttcttttgttatttagactgaatgaatgtgaaaactatagtcttgaactggattagattgtggtaatcttttatattttccatttattattaataaaattttttaacggcgggggcctccctgctgtgtttcttataaaaaaatgtattatatagattgcatattattgccaccttctttattgtcgataatgtagatattaagatggtatatatgtggggatattgttttatcattgactagattatcatgttaaccccacgtatgatataaccgctataaatttaggcccatatggggtaaagggaatagtttcaaaagttcaaaacgatgtacgatttgatagagttcatgacttaattttataattcagtgaaatttccaaattataaaatagatttttgtcatggagaaattgtgaaatcatgtgataagcaattgtcaaaagtaagtgttttgtgaaattgtagtgaatagtatttttgaatggtgaatagtgtgcttggcactagaggctgatcagaccgagcagggccttccaagcagatcggaagtgtccgagcggtttgatcgggcagaccgacgactctaggagggagtcggtttgaggtgtttgggtggattttctagattgcttcatattgatgacttctagatggtttctatacgtatgtgatattattgtgtgctgatgtgagtcaagtcgttggtacaaacttttactcggatatggagtttctttgttattcatgtgcgggtgttgcttgaaaccaatggagtattgtggtgatggatctggacaaggcttgggagaagttgagatccagacggttaaggagatcatgcgtgatactaaggctagagaacgatgcatatgaaggtgaaggtttctatatgacattacgtggtgttgtgtgcatgtggaaaaaggagtcaaatttggattggagttcaagtttaggaatattggagtgtgaagttgtaaagggatgttgtttccctagtttgaggggtttcttatgtgattaggagtcctaattatatttggattcgtggataggtgtagccatgttttgggtataaatagaagagtggttgaggctagaagtatatcaacttttaggagagaaatattagggtttgcttctaggcttcgattatagttcatgacttaagagaggagtgctttggatgcacattataaatatcttgatgcaataaatttgatctatattcaagatcatatttagtttgattttctctagatcccaacggtctaaccgatggcaaaggagcagtcaagccggcagtggcggcgatggtggcagcaagtagacgaggagagcgactggaggtctgactaatcggtaaggcagtggtctgatcggtgaaaagcagttatttgaccaatgttatctagtggtctgaccggtgcactccattagatttaagggtccttttagttccataaaatgatttggtttttgtggtcctaccattccctcctctgatagtattcgatattacaaagtggtatcacaactctgtttgctatttggatctttatcgatctttgagtttttgtcatgactgaaaagttttcgaccaagccttattttttttatggagttgattttccttattggtgcaaaaaaatgaatcttttattatctcaaagttatgatatttggcaaaaagttgataacccctacgagatttagtgttgttctcaaagttgattttgaaaataattgtaaagcttgcaatattcttgttaatggaatttcttgttcgaatttcgatcgggtttcgcgtcttgacactgcgcttgagatttggatgtctttatttgattttcattaaggtacttccaataccaaggaattacgcaaagaagtttttaaaaagaattacataaaatttgagatgaaatctggagaagctttagatgactattttgcaccttttaacaaagttttgagcaatcttcgatttattgatgagtcttttgatattaacaattcttaatttgaaattgctcaatatcttttgaaaagtgttgatatgtaaatttgggagatgaaagtcactttgattcaaaagtctggtgatatgtcttatttgagttttgaattctctttacactaaactgaaaactcataaaatgaatattagttacctcaagactgatttgaaatctactcctttggttccttcttcgagcttccattgatgcttcttcttcatcggtttttacgagttttgagtgccatgtatgatgatcaatttgagcaactaggtgaggaaaccttggttttgattactaacaagttctcttgagctttgaaaaattcgaagaacatgaagcgaggttgactagttcggtgctttgagtgtggagttcaaccacatcaagtacaattgtcgtaaacacaagaagacgatcaaggaggaggaagttgacaagaagcataaacaagaaagaaaaaatagtcgcaattagcctgaggaagaaggatgcatagctattgtgcatttttaacattccttaatactctctctatttcatattataagtcgtttgacttttttcttttggtgtggtagttcttcttctgctgctagaagtacatgtatgatagtcttttaccactgtcacctgcaaatcaaatggaagaaaccttcaatatacaatcattatgagacaacatacaattatcatcgaaatcaacaaatatataccatcactctctgctgattaggttgcttatgcccaacagtatgccaagggaaactttccactttacaaccacctatagatcgttcaggatcagtttttagcacatgtagctcaaattccttgtttatggcaaattgccacatagacaatctaaactccatacttaattctagccttcatgcaaggattatcagggtcgtgggggcatcaccaactctctaggcacttcatgacaggtattgcagctcctttggtgtcttcagtaccaccatctgcaccggtagcagcatctgcagcacccacaccatctgcagcagcataagctccatcaccactaacaacctgtttagacatctcggcttgctcatcctcagccctcaaacccagcaacttgtagaatttttcatccccaatgatatctagccacccttcatcatcatttgggggcaagaacctctagcctatcccaatccacaatatcggtaggaacatatggggcatcaacaatagggactgaaactagtccattaccccatcggtcgcaacgaggaaaacaaaatcgtcaccaaattcaggtccagctaccacgatattaggttctaacatagctaattaagctaagcgcaggctcctcctcaagcttgaaggaaaaaaaaaggtggacgaatgttagagtcctctctaactgattcgcaccactcgcaagaacaaatacatgcaagaatcgatttgaaaaccaaaaagaagttgaagttcttaccccatcagtagctcatgccaggtgcgctttgtcgataccatcctgcgcctaagctagcaccatttggtagtgacggttttgtgcgccaggtgctaggttgccactcgacatggtggcctcgacgctagcggcagtggcggtggcggtgatggcgatgacgggagcggtggtggtggtggcggctgcggcgatgatgggagcgcctggatctggatcccctttcctctgctccacgagtggccaagctaaaagaagcagcttgtaggggtattttcgtcagcccgggtgcgaaatttggtggaaatggagagaattagcgaatatggtaaaagaaatatttggcatcgcttgggcgtggcattttaatgaatccaattagcggaatgtcatttaggcaaaactctttagtagtggcaaaatgttcaatttcttttctaaaacggactatgcagtaattagtaaaattaatgaagcatccttgagttaaataagagacatctacttattttatatttgaacttaatttctactactatgtgcattgcgtttgctgctttggtcagcagtgcaactaatcgtctgaccacgaattaataatgccaataatgtctactatcaaggacactaccaacccgtactcacaagtggctctcaaattatccattaactgaaatgcgatgacctgtactatagtataaataaaaaattttatggaacgttgtgacttgtgaggattgctgatcacgctacgtaattaagacaatcagtaggtcgtcaaagtcattatggaagtaaactaacgaaaaacgtcgtgacttgacgaatagaaataatatatgttcttctcacctctcatgtgaaaattaattttggatctaacacatcatctttggcagtcgtcacggtttacgtcgtctatacccacggctctccatgattaaattgttgtttaattattcatttaaagggtttctaaaacaatccattttgctcttgcggaagatcaggggaaaaaattactagctggcgttctaactaatggaggccaccccaccctgcaatttatagctttcgcgaaacacaagaacttttatagaattttcatatgaattagttcattttatactgaatttctctagtaatttatagaaaaccaattgcatgtgcaggtgaatcttatgcttgaaaccttagaaccactatcttgaaaaattctgccaataattttgctgctttccaaacatgttttttttaagataatggaatagataacatatcagcctttgcttaatagagttatagccaattattaaaaaatacactcaaacaaagagtgtagttcaaataaaattaaacatactcaaacagaaataaaagtgaccaaaccaagataaaaagcacacaattatttaagtctatttgtaaatctccacccatagttggcaaaatgttgcatggccgccgtcttaagcttatgacatgcaaccttcgaaagcttcttcatcataccttaagaaacatgttagccaacaatcaacatgatctctagaaaatccttctgccagaaacttccttcgtctcccattaaatttctctaaatttccttcattaattccaaactgaactttataattaaagtgtgatatatataagtaatctaggtttctcattaatttgatagtattccacacagtgtagctggctagcagcatgcattatatttgttagacaggtgcctgcaggcatgaaccccaacaacctctaggaccaaaaccgcataacatgtagaattgggttccatgtgagtgcagccactttccaactctcacttgtctttcctcttatctcacccctcaccatctttccatttccactgcaaacagttggcctaccccccttatgtgtgatccacatgactgcctgtaaaaaaaacaaattaattaattaaaacaagatgtggaccccagggacaaaaaaaatacaggcaactctactgtcagaatactatataaaggaagtagaatacagtgacagtgctagtttgatatactagctagtagcaggtagtaattgcatggaggcattgttactcccttctttgtgaaaaaagaactagtaatttttaagctagaaattatatttttttatggagggaatatttatttgagatattttattcgttaatttttttcagacaaatttagtattaaaattttcagattaaattttgactatggatttgtcataaattgcattctttgtagccataaaaataatattggctgtgtttagatccaaacttccaacttttccatcacatcaacctgtcatacacacacagcttttcagtcacatcgtaccaatttcaacccaaacttctaactttggaaggaactaaacacagccattgtgtaataaaactataagagccaaattaataagagaaaaaaaaggcagctctactggcggaatactatatactggtatgatactgtgacagtgctagtttgatagtcctccgggctattaaatagccaatcttgctatttagaagtattaaacatagattaccgacgaaatcgattccataacctctaggctattttgccagacgagtatattaatccatgattagtggatgattactgtagcattattgtagcaaattatagattaatatacctcgttagattcgtctcgcaaaatagtgtaggggttatggaatgagttttgtcagtaatctatgtttaatactgctaaggccccctttgattcaaaggaaattcataggaattttaaaggatttaattcctataggaatttttcctatatagccctttgaatcaaaggaatgaatcctatggaatcctataaaattcctatggaatgcctcttcccatgcaaattttgaaggaaatttaacatgaggttctacctcatgttaagaatccttcgagtctttctctctcctcaaattcctgtgtttttcctgcggctcaatcaaacggtcattcctatgtttttcctgtgttttgcaatcctctgttttacacttgtattcctatcagaatcctatgtttttcccattcccccgttttttcattcctgtgattcaaagggggcctagatagcaagattttggagagctatttccggatccaaactggccaagctagtgacagtggcagatagtaattgcaagaaggcaggcagctattgcgtcagaagaaaaacagtgacagtgctagtttgatatactactactatatttcattcgctatttttttaagacaagtttaatttgaaaagtttcagattaaattttgagtatggattgtcataaattatattcttggtagctataaaaaatactgtaataaaatataagggacaaattaattaataagagaaaacaaactgttcgacccatcctatacatttccatcgctaaatctatgtagtaataaataatgtatctgctggaggactgggaaattaaagtggttgaaatagcttgtaaaatattactagcagtatcatgccacttggattttgaagactagaaagtcataacacgaaaattgatatagctaacacccaaatgtatataacaaaacaaatttgctctgtaatatggttatggaggaacggttaatttgtgaatctaactttgacatggttgttagggtttgcgagcaaattttcgtggggattagtatgcgtgtatttatataagtgcatgccaatgcactgtgttaaaaaaatccctttttttttctatacttcgaacaaaaatgttgtgtaaatggctcaatttttcctcttgaacaaaatagtcgagaaacataatttgttggaagtgccttacatgttaagctcctcttcataattcaaaaatttcacgaaaatttcaaaggctttaactaaatcctaaaaaaatcccctaaaatcactctgttcttaatagcacaaaaccctttttttccctttaattctcatgtaaattattattattctgaaacaaggcaaaatcatttccatataaagtattatacactctttaatttttgagaagcaagtattatacacttgctagtagtagttgctcctcctactgcctagtgtagtgtattaattcgagttgttggctttgcttcccctttctcgtggcgcgcagattcatcgcggtttcgcagtttcccccgccaacccattcccgctccccgccgcgccgcgcctcgccacgccacgccacaccgcgccacgccatgccgccgccgccgccggagtccggcgagccagccggggacgacgtcctgcagaaggcggagtgcctccggctgcttgacgcgctcccggccgccgcggcggcctccccggccttccgccgccactggccatccatctcggcgtcgctcgccgcgctctcggcgtcgctgtcccaccccgcgttcccgccctccgcgccgcgcctcctggcgcccctcgcctccgcgctctccgcgctcgtgtccgtcgccgggaacgacgccgcgagcagcctcgggcacctccacaccgtgtcgctgctgtcgtcgtcggctgccgagctgtcccagctcgccgccgacgcgcggctgctcgtgtcgccggggaatggtgggggtgagggggtggcggcgggggtggatgggctgatcccgcgactccgcctcgggtccgcggcttcccgcgcggcggcgctggacgcgctcgttgactccgtcgggtcgctgccgccgtcggcggcggcggtggcggtgtccgccgtggccgcgatgctcgactcgggggagatcctgccggcgtcgcgcgagaaggccgtgtccgtgctcgccgcgttcgcgtcctcggacgccacgtgccggctcctggcgcaggaggcgggggccgtggtgccccacctctgccgcgcgctggagtccggcggcgccggcgccgaacaggcgtgcgtggcgctgcgccctctcaccgcggactcgcgggacgccgcggcggccgtggcggcgcgcggcggggtgtcggcgctcctcggcgcgtgcgccgcgggcacccccccggcgcaggcctcggccgcgggcgtgctccgcaacctcgccgcgttcccggacctcctcccgacgttccgcgaggagggcgcgctcccgtcgctcatccagctcgtctccctcggcaccccgcgcgcgcaggagctcgccctgggctgcctccagaacctcacctccggcgacggcgacgagtgccagcgcctcaaggtcgaggcgttccaggacggcgcgctcggctgcgtcaaggacttcctcgagtcctgcgtcggcgacgagccgggcctcgccccggcgttcggcctcctccgcaacatggcatccttccgctacatcgccgagatagccgtctcggccagcttcgtcgaccacgtcctcgccgcgctgggcagcgacaaggccgccacgcgcacggaggccgccatggcgctcgccgagctctgcaacgtcaccagccacggcaagacgcgcagggacgtcggcgacgccatcccgcgcctcatctggatgctcgaggccaagcccgccgccgagagggacgccgcggcgagggcgctcgccgcgctcgtcgcggcgagcggctacaggaagctgttcaagaaggaggagcagggcatcgtcaatgtcgtccagctgctcgacccgagcaccgcccgcggtggcgtcgacgcgcggttcccggtgtccgtgctgctcgccgtctcgccgtcccggcggtgccggaagcagatggtggccgccggcgcgtgcggcttcctgcaggccctcctcgccgcggaggtcgacggtgccaagaagctcgccgactgcctcgccaggggcaagatgctcggcgtgttcccacggtcatgacacggctgccgccattgccaccgatcggtgaagaatttcagagcccttgtgaagatcaaatctttgagctgtatgtatgtgctttttaaccaacctgaatttttacatcctgcttttgctctctgtatcaaaaaatatgatatcaatgcttctgatgaaactttgtacaggctgcttgaacctttctgttccatagcttttagagtgctagatgatgcgtggtttttagtgtgatcaaataagaacatggaaaaagatcttgtaatttaatctttgatctgaagaaattgagcttcgtttgccgatgcgcattactgttgcttgtcaaattatcttgtgttgttcatttggcctgatggttttgtttttcttcagggtatatgcaattatgcatctaatgtcatttcataggtactataattgtattggttgaaatggatacaacaccgacaattgcatcattattcatgagaactagtggctaacagttttggttaacattttcttgtccgaagcaagtatggcattgttctcctcaattattaacttttgttctacattattgttctcctgaattatttcaccaaatgttctctttgattatgaactggttgctaatgagggtacaataggtctgagtggctcatttgctcataagtcataattcaatgtgtagaatagagatggttcctcttttaagatgagggatcagctttggtacattttggtacaagttgggcaaggcctacaataacttcgaacagagaaatgagtgtacgattctgcaatacccatccagtcgtgtctttttctttcctgactgtatgaccaccagtaaaatggttaactgtccactgttacttaagcttaatttttgttaaagtttatgtagtaatccttgttcttttgtagagtaattggtaattaggagatgttgatcctagcttcatttttaactggaggattactgatgggtttataagctgaagctagatccaaactccaaatttaagagttattttcagtaagatgttacctgatctagttgtttcactcgctaaggtccaacagatatgtttgctggtttcaattgcatgatttaattcacatttgttctgtcttcatagttcatcagtagaagtctgtaaaacaatatgtgcagagctagtgaaatgttgaaatgttaaaaaccaccctgtgttgttggtcaatggtaaactgcctatggactcaactcaaactcacatggggatggggtcaactggtgcagcaaatctaccactctggcacattaatgagcaagcttaaatgtgactacttgggggcatgctgggttaggtaaccttttttttcttctggaccagactgactcagattggagatgatgagcactacaccaaaggtttactagtaacatccatgcatatacactcacatacatccataaaggttatgtttagtttacactaaagtttagaagtttagttgaaattgatacgatgtgatagaaaaaatgtgtgtatgaaaggtttgatgtgatggaaagttggaagtttggaaaaaaaaactttggaactaaacagggccaaagaaacaaacaattcatatctacgaatctaattcatagctagtatttggtttattttgggatatattcatagccaggaattgatttatttcgaggcggaggaagtacacattgtgcaatcatgcaagaatcatcaatcatatcacactgtccatgatactggtagctatggcattctgttgagatgcaacattcttcttcttcagtccaagatgcatgcatggatgcacagccagccacatggccacaactcatggacacctggtgggtatagttggtgggcaatggtaggaggaggctcatgtcatgtgtattgctgtgatccaaaaatgctgaacagtgtcaggaaaatggttttcccagagagggggcatgccatgttctgatgctggttagttttttctggagtgagtgccctgaaccttcctctgatgataactgatccctctgatcgccactgttgtcgccttgtgatgaaccatcatgcatctctcatctcttcatgcacatcatcattatggcctcatcatccattacggctcgtttgctgattttttttttctgaacgggcaaaagccttttaccctgagcattgatatattagcaaggaaaaatagttttaccaattaattgcaaccagctgacgcatgtcatggaggattacatagagggggaatggcacactaggctaacggctagtgtcacagtagtcgttcgtctcttctttaatttggttttttttttctcttttcttggcataggtcggtctgactgattgcgtcgcgtaacaaatattctattcctctaatatattgacgtgcaatccttttgcgcgtttgagaaaaaaagcacactaggctacctaacgaagacaaccagactcaaaaacaacgagaaaaaaaggatagagaagagtctctgtgaatatggtaaggagagctcctaggggactaggtttcatcgtaacctaaaccttttcttcttacacgatgtgatcgaccaaatatcactctctttatacaaaaataatcacttatagtatacttatctactccctccgtttcacaatgtaagtcattctagcattttccacatttatattgatgttaataaatctagacatatatatctatctagattcattgacattaatataaatgtgggaaatattagaatgacttacattgggaaactggagtaagtagatttgtaaatacacataccataggcagttgctgtcgtagccgcagtgctagctagcctagccgaacgcaacctatatcttgcaacagatggagtaatatttaacttcaaccttcggtctccttgccaagttgagagtttcaggcatgaggtgattaatcagcaaaggcaggcttaacactggattgggagtcagtatcattagctcctaagcctgggacggtaatggtgcttaacactgattttttttttggcaattgcaaatttaccactactttaaatcgttatcgcaagattgctactaaaaaattataaaaataccactaaaactatcattcaaatgacatcgttataatattaaaaaaaccggtgacaaatttacaaatgcccctgcaccgacgcacacggagcattgcagttgcatttgcaggcagcagcactagctgagctgtcggcctgatcggcaacggccctgcgtgtgccttgagcggcggacggaccccggatcctctgcgcccaaggggacctccggacctgtaatgttaagggcatcgtgcgtcgcccgaaaattaattgtaaaccgtaacggtatactagcgataaaaatatgttgattacactgtttgactactcgtcttatccaaaaaaatttatgtaaatataaaaaagaaaagttatgattaagttactttggataataaagtaagtcacaaataaaataaataataattctaatattttttaataagacgaataattaaacagtacaagtaaaaggtcaaaatctcttatattatgtaacggagggagtattaggtatgaaaaattttaacttaaaagttagtatcgccgaaaaaattatttttacaactatctaaaaatcaaatttaaaattatgttttaaaattaaaatctttactttggcttattcttttttacaaccgataggaatagggaactatgagaagttttttttattttctttgaaaaggtatgattatataattaacacaatccccacggtaaaaatatacttcaaacaagcaattacaacgcttttgtcctaacaaaaataaataaaatatgtgctagagaaaacaaacaggcttcacttattggaatgacgaaacagtgaagtacggactgctgaatttattttcctcgagaaattcgatctgaattatttttccttgacaaatccacacatgtgacattttcgtgccgccaacatgttttccttttttttaattaaccgatagttttgctttaataaaattccagcacaaaagaatcttagaatattttcaaataaaatcttgactttccctatttcttagtgaaaggagaggaatcacagagagttttccggcaaaaggaattatggacaatactcttggacacgaaaattaatggagatgccaaaacttgagccataagaggagcaaaacatctctcagagtgaatatcttagtattttccatccctatgtacagtttattattatttttattattacctatttagctttttttttcatgctttgatgaaattgggacaaaccaatattggtttgttcatatttttttgccctatttcttgtataatcgagtataattaattggagccggactgttgttcaaattagcatttgtcaattgtcaatttgtcatgcttccaccagaattggactactcctatctgaattttgagaccactgtgtttcaaacttaccgacacaatgcttggctaaattgtgagacaagccacagtgaaatcaaactgttattatgtccatggtgaagggctcaacgcactaaatcactgtttagtgttattaacttcttcatgcacggccgtagaggtggatcagagacaattaaaaatttttccggctatttataacggccacagtgaatccaggacattgacagctttctggagaaagggctcttctgtttagtgttaaagatgctgctgctgcgtgctttgtttgacctcactaatctcgcttttccactatggaagtctttctagctactccctgcaactgtcctgtcctttgtgttttcctttttgcaaagttgaatcactgttgtagaaggctgaaaagaaaatttttaggtgtcacatcggatgcttgactgatatcagaaggggtttttagacagaaatgaaaaaactaatttcataacttgcctgaaaaccgcgagacgaatcttttgagcctaattaagccgtcattagcacatatgagttactatagcacttatggctaagttcaaaagattcgtctcgcgatttccatattaactgtgcaattaatttttgtttttatctatatttaatgcttcatgtatatgtgcaaagatttgatgtgatgtttttaggaaaaaaaattagaactaaaccagcccttagataatatagctaaacagtgcaagttcatggatggaactcgatcgtaagctccaataatgactcgatcgttcggaacgcacaaattttcaatgttttcattggatttagttcaattattgtattttaagaaaattctctattttacagctgatttacaggatttatgacagctagcttaaagcatactctctgcatgaaaaagatcctttttaatttttaggttttccaaaaaaaaaacatatttttatcagtggggtctactctatttcttaatatcactgtttcttttgggtacattttatgaaaccctacctattatggtctaagttgcacaaaaccacattaattttggtgcgtcacataaccttagatattatgatcttaaagtttcataaaaccataccgttaatcaaattgatatactactgtatcaaaattttaaagctatacttatatacttatatgaatataacatttctatgatgaacaaagagcttataattttgagatgtaattgtagaattccaaagtatgatgtaatttctatgatcaaagtatgatatcacataaccacactattgttcattttgactttgatctactttggtggttctttgaaattttatagccataatacctaaaatcatatgccacgtactgaaaaccccaaggttttgtgtatcttagattataatacatgtggatcggtgaaatttactcttttcttttcaatttttctatgcaaccattagactcccttcgcctcctcgttttaaaaaaaacatttggaggaaaagacgtcccttcaattttttttaaaaagaacaaattatgagcatatgattgaacatgggatattgggattactacacacctcttgtcactgcactatcaattatatctttcctccttgttttttccccttagtttctctattcagtaatgaagggtatgtttgtctcttggctctttgcatgatatgcatttgactttataaaacatctttcttggctccttgcatgatatgcatttgactttataaaacatctttgtgggacggaaggagtatgcaatagtaattaatatctgacccacaaaactacctgctgtgctagtagacaaatttgttgatgtggaaggaaaagagagggtgaggggagaaaaatatatattaacctttttgacttgtcatcaatcttcgacaccagctacatacggtgaattttgttgtatacttgtatgtgattagcgaagatgaaaggtaaataaataataataataatttgatgtattaatttttagagattggctccccgcaataaaaaaaaaagagattggcactatctcaactatatatactactttaattaacagactcaactattttaattatccttatgggtaattttaaaggaattaagagcttaataatatgtcctcacaaaataatagcttaataaatagtattatatattgtgtagtactatgtaattgggaaagacaactctagtagtgctagatggtctagctcgtggtgggtgaatcttagcccaagttcctcttgttcgagcgtggactgaaattgggcttcgatagcttgggctttaggacgaatatttaacttcttccctgaagcaatagctacatgatttgtgcacaatttccacacagtctataatataaaaatgcaaatttggaatagaagtagaactttccaaaaaaatggacttaatttcttttcgaaaataaacaagccactgcagatgttacggcacaattagactcttatgtagtgcttaaatagttggaatccatgcatttttctagtttgacacaactcacaaccttctcagatgtttt

SEQ ID NO: 20567 - DNA, 684 bp, Oryza sativa
aatggatgcaaaggtgaagttgtagaaacttgggtaaggcaagtacggaggttggcgcatgatatggaagatgttgtggatgagtttatgtatgttattggcaaaaacaaagagagagagtcacgagcttatgtgaagaaaattatcaagaaacctaaacctttattttcacttgatgaaattgctactaaagcagataggataaacagacagcttatggagctttctaaaagactaggacgttggacccaaccgatattgagtgggggtagtattcctgcaacaaaatatgacactgaacaacaacagttgtatctacctggacatgattattcaattactgatgctgagcttgtaggaattgataaaaatagacaaaccttgattgaatcattgtgtttggaagattgttctcttcggatcattgctgtatggggcatgggtggccttgggaaaagcactcttgtcaacaatgtctacaaaaaagaagcaacagtatccaatttcaattaccgtgcatggctttctatctctcagtcatgtagagtacttgatatttggcgaaacatgctgaaagagctctgtggaaaagaaagcagagagtttgatgctgaaaatatgagcagtacagaactaaacctggaattaactaaaattctggatcaaaagcggtacttgatcata

SEQ ID NO: 20568 - DNA, 2863 bp, Oryza sativa
cagctgggatagatttcctaatttggaaacaaagtctctagttgcacgaacttcacataaagattgcaattccttcaagttccacaagccctcaaatggctccaaagattcccaattattcagacttttgtatgtagcatcaactaatttccaaacaagtaaatgacgcaattttttcagatttgaaaaccctctcggaaaattcagcaattgtgtacgttcaagactcaatgtttgtaaattgagaagctttgtaatagattttgggaattctttcacattggtatcattgaggcataaataccgaaggttaaatagctccccaactgaatatggaatggtctcgataggcaagccggataattctaacacagcaaggtacttggattctgagaaaatgaaataagaagctgaagataatgccatgctagtgtcaaatgctaggaaggtacgtagcctggatggatctacagttgatcgaatttcactgttgcattggagcacagagacgcggcgagagtctgatcccacttgtaccaccccatgagtgtcatcataaactgtagagaaactttctttctttgattggaaaatggctagttctcgcaaaatatcatgcattcgaagacactgaatcctattaaaactattccttgctacgacttgaatcatgcttcgtcggacaagctctgttaggtaaccttcagcaacatcttctaagctgcatgttcctttctgttcaataaatccttcagctatccacaatctaattaatctctttctctggataatgtagtcttctgggaacatagcacagtataaaaagcaattcttcaaatagtttggcaagtgtttgtagcttagatttagaattttctccacccggtttaagttttcattattgtgcacctctgaaataagttggttgtagaaaagcctccattcttttttattccttggtttgagggacagtaaactccctattgtaacaagagctaaaggcaaaccaccacatttgttcactatgtccataccacactgatgtagttctggagggcacatatgattttcagttttggggaatgccttcctgcagaatagaagccatgcatcatggttatttagaggctctaaacggatcttacaaccatcctcagctattgaagctacttcctcaattcttgttgtaattattactctgcttcctaggccattatcaacaagaacctcccgaatctttaaaagatctgcagccaaccagacatcatctagtatgatcaagtaccgcttctgacgcaaaatttttgccagttccagtcttagttctctattgttcatattttcagcatcaacccctcggttgtcttctccacaaagttcttttagcatgttttgccaaatatcatgcattttagatgattgagagatacatagccatgcatggcaattaaaattggatactattgcttcatttttgtagatatcattgacaagagtgcttttcccaaggccacccataccccagacagcaatgatccgaagagaacaatcttccaaacgcaatgattcaatcaaggtttgcctatttttatcaatccctacaagctcattgtcattgattgaataatcatatccaggcaaatacaactgttgctcgctattataatttgttggaggaacataaatcccactcgataatggtcgggtccaacgatctagtcttttggaaagctccacaagctctgtgtttatcatatctgctttagtggcgatttcatcaagtgaaaataaaggtttaggtttcttgataattttcttcacacaagcccatgatttcttgtgtctgtttttgccaacaacatacataaattcatccacaacatcttccatatcatgtgccaacctccgaacttgccttatccaagtttctacaacttcacctttgtacccattcatgccaagttctttaagaaatgcattgataatttcaagttccttttttatttgtctcatgttaactggaagtgctgttactagctcaactttctttaactcggtcttttttgcaaagaggggtatagctaactttagtgtatctcctgccacagctattcctatcttttttatgacaaaaagaacggcaatttcagccatttctattagtgcagttacttcaatatttcagtgaaatgcagttgcaatgatgaacaatcagtcctaagtaccaattccacccttgtacatcatatctacagggaaaaaacttattcatcaaacaggaaattctaactgccgaacaagttgcaatggttaaagcagcaattatagaagtgcaatctgctaaaaagattgttgctgaataccttcagtattgctgaaaattgttgaaattatttttttcttgaagtacacccgcttgatggagaaaaaggagagatgaataataacacaggaggacacgtgtgtgtatagccgtgctgttcctgtatatgtcacaacaatttggcaggggagggaaatggaagaatttgtcagttaaagatataagtactgggaaacaattagattgttttcaaactgagaaaataatgcaaaaaaatatattgtgcttgagtaacacattcattttccatgttagctatatcacgcttacagtgtaaattactaaaaagcactactctgaaaccgtaaaaggaagaaaaggagaagagagcattacaactttatacatttgatcaaattttcttcatcatcatgctgatgtgaataatcttccctgttgagcaagaaggcagcatcatcaaaattgccaagtgacagaatggcaaagctgaaggaatgcagaagtaaagaagcagcagtg

SEQ ID NO: 20569 - DNA, 5617 bp, Oryza sativa
ataattataaactcaaatgttttggatggaaatttcactcattgtagctcaaagtatgttcatgggaatttcactccactacacagtcagtgttgtggtgtcacagtcaggttgggctgtagctagtaggcccaatcagtaagagaggatgttaggtaaaatgtgtggcatctctactatacttatcgaactggaaatacacaaataacccattcgtgggtccagtatttttttccgtttgcttcctgtcagagctccacggttgtctttcattagcaaatttaataattaagatgtaccaaaagtatgcagaattgcctaacagctagttgatggtttcttcagaacaaattgcagctgtctgaacctttgaattaagaagttgaaaataactttggtagatttacgcagttgatgatattatcatctagacttctctcatgatgcaatgccataaaagcaaatcacagcaggctgaaccataaatcagttgagaaaccaaaccctgtattggtataagtaagcatacaactgaaaatttcaattttaaccaaaaatgagagtaataaagcaatgaagtatatcctgaatgagtctaattttttttttgtcggtaattatgttttggtgctttcctttctaaatcgacatagaggtagcatgattctcagctctagtttattcagactctgttatacgcaatgttacgcggtaggaacatttcgctctaccacagatttcttttaggttgattgttattgcttttgctggatcttctaccttccatcctccatcttcatcggggcatttaactttttgccaaagtcagtacccctaattgtccaaatatctctccatcttctactgaaatgaactctgcttccccatgaatcctatcatgctggaacatcaatcaatcaattactagcaagcaaagcataacagcaaacaatgaggaatcgattggaggcttgaagtcgaaatgtacctccgtggaacggggcggcgtaatggcgaaggccgcgggtggaggagggaggggcttccggcgagggcacccgcgccgccgatggcgcctgcgcctgtacagtccaccctgcctcgcgcatgccgcgtacggccgtgtcagcgagcagagcgcgccggcggcgtgaaggtggccggccggtggcggcggcggcggttgttgcctgctgctgcagcctcggcgaaagcctgggtggtcgccggtcatcctccggctagccgcggaaggggtcgaggtgggaacacggccgcagagggagacggcgacggcgacggcgagctagcaaatgtgcagagaagcacctgcgaaattacacaaacttctaaaggtccttactaggggccgtttgagttcacgccattagcgcaagactaaggccctgtttgtttcagcttatgattattataatctagattattaagccagattataataagctgtattataataagttgacatataataagctatgagttgtttgtttgtctggattattggaggtatggattattgggtttgaaaggctaaagtctataatgccctcagctatatgttcggttgatggcataggtgggtaatttttcttaagtatgtagggatagtgggtctttagctactcaataatctgaaaaaagctcctctagagcagcttattagattataataatctggcttatagattataataatcttctataataatctacttgtttgtttcagcttactactaataagctagattataataatcctaaactgaatcaaacagggcctaaatgaattttaattattccaaacttaatagggttgtgtcatataggtccctaaactctcgaaatgcatatctagatcccagtacttgttaaagtgtatcatctaggtcccaaatcgacacatcccctctaggatctacgtggcgctgatgtggcatgtcacatggacgttacgtgtccttttcatctttttcttcttttctttttctttttcttttttgttttcttctcattctactttttttcctttcttctgctcgggtcacagagaaaggagaagaaagggaaaaaaagagaagaaaaaagaaaaataaaaaattttaaatgagtcccatttgtcaatcaaaatgataccatgtcatgtccgtgtggcaatgccacatcaacgccacgtagaatactgaagaggttgtggcgatttaggacctaaatgacacactatgacaagttctgggacttggatatgcattttgagagtttagggacctagatgatatacccctacaagtttaagggccgcccgtacactttactgatagatttgtctgatagcagtttttatataaaaattttatcgtacgaaacgcaccgtttagtagtgtgaaaaacgtgctaataaacacccagataaaatctgcatcttaatcagaaaagaatgttgagtggtatgacaaacaaaaatcagttttgaaatagtagattacagcaagtttatttcaaattttaattattgtttttaaaataaaattccaaatatatacagcaaaatgatcatgattttttctataatatagttgtgtttattggtgctacatgaggtgaagtgtaagtaaagagtagcacaattttaacgagatgaaaaggtaagtgaaggtttctaacaatgtgtcatgtatttataaacttatagtgagatagagtaagaactttcaatgaagcttctagccaattcctcagttccaaatgctaccatggatgaaaataaaaacccgcatagtagtggtttttcatctcttgggtttccttggaaattccaccataatgtgcatgctctaaggatggagtagagatgagatgagccaatggttaataagaaaaaaacactgtgagttgaatcaactgtattttccaaccaattgatcttgcgtaattaaatttttgaagaggtaaatagctgcacttgcttgtcaattgtgtatttatgtgcaattgacataaatatttgacattttgggcaagatttaattaaaactttgatatttgctatttatcgaatgcttaattaaaaaggcatatattccatggaaacaactctctcgtaatatcatggaattattagattttttttttaaaaaatgtcctaatataaaaatgaaagatcaaaatttcacaggtttgactttttttaaaatatttataatcggaggtcacctaaagcacaccaacaagatcaaaggtccagaagaccaacacagaaaatactgagtggacaaggtatatctgtccactgtcttaaagtaaagactgagtgcattattcatcaacattaacctgataattactccgatcagtgttgccaattataaagtcatccgcatacacacatgctaggtcaaatagaccacaattgaccagctagacagctagttaagagtaaccactgacaaaacaagtgttaacatcaaattggtgatactactacaaagacactcaacacaaagagaaaacttgaccacagatggagtaaaagaggagatatgatgatctgataattaattacacacgctctgtatagtcttacaaaaatatctcgatccgcgttgaacagacatacagatttctttcaccaatcaatatgtgatcgatctgttgttatttaacttcttaattaagtaggtctgcaattgcctatcaatttggtgctaatttctgtatcagacatgcactaccacaagaagcactcgaaagggcagttagtcatagagtgagaagactaactgaattttactgattgcattgtgcagtgtcaacgatcgatcggctaaatttattaaacaatgccaaataaatatttacacacttgaagtaagtaagtagagtagcagttgcgagttgctcagcaacttgtagcattgaccagtaacctcaatgaaagatgcatggtatcagataccacaagaccagcttaattagaggcttggagctagtaaacactaacaatgtaacataaaaacacgtgttagcatcagcctaacacctgcccatttcgtcccttttttttttttttgttattgtgttgcgtttcctcctagtaaacagtgtattctacttagtaatttacttggcttgaattttttttctgttcttttgagtcaaatgacttggtgtgtgaccgtgtgaatcaacaggaccaagcagggttcgtctttccaattgaatggtagataccgaccctatcagtatgacattttctgccaaatttcaacaaaatttattattccaaagttgggctctcgaaaaccattttaaatttcactcacagtatacttctgtcctacattgaaacatcgaaatttcgtcgtttttaatccgctttcatcgaaaacataaatctgtgggaccaagagagtcggctagtaactgacgaccagacgagttgcgattgcgagcagccttccggcccacacaatagtccacaccggccataaacgcgagcccactaaaagactcggcccattactatactagcccaagcaaaagactcggcccatggatagcccaagtaaccaacgcgtatgcttggaaggcccatcaaaatcggcccagcaggcgagcgtgacgtggaccggtcgtttcgcgcgcgaaacgtggcgcctcacatgctcgcggtcgccgccgcgcgccacgtcgcgccttcaccaacacgtagctcgggacacggcggcgcgcgccgccgctgcacgcgtccacaaaaaccccacctcgccggcggccgcacatgaccaccaccaccgcagcaacgctcgtcgacggccatggacgacgacggcgagacgccgatgccgtcgctcgagctccacaagctccccaccctcgccggcgccgccatcccgaacccgatcgcgcgccacccgctgtaccacccgtcgccgagcttcttcatctcccccaccgacgtcgtcctccgcgacatcctcttcgacgcctcgccggcgtcggccgccggtgagcggcggcggcggcatgtcgcggcgtaccaccgcgcgggccctcgccgcgaggtcgcgttcgacccagcgacggtgcgcgcggccatcttcacctgcggcgggctctgccccgggacgaacaccgtcgtgcgagagctcgtcgtcgggctgtccgagctctacggcgtgcgcggcggcgtgttcggcgtgcggaacgggtaccgcggcttctactccgacgaggtcgtcccgctcgacccggcggcggtggagcactggcacaaggccggcggggcggcgctcggcacgtcgcgcggcgggttcgacctcgccaggatcgtggacgccatcgagcggcacgggttcaaccaggtgtacgccgtcggcggcgacggcacgatgcgcggcgcggcgaggatccaccgcgaggtccggcggcgggggcggctcgccgtggcggtggcggggatcccgaagacggtggacaacgacgtcggcgtcgtcgaccggtcgttcgggttccacacggcggtggaggcggcgcagcaggcgatcgccgccgggcacgtggaggccgagagcgcggcgaacggcgtcggggctgcagg

SEQ ID NO: 20570 - DNA, 1276 bp, Oryza sativa
atccgaaccagttgcagcgagctcactcgaactctgcactggcctcacaagccaacagaatcatcatcagctgctgccttctccagctgcgaggcagcaggatttggactctcttctctttttagagaagcataatttggacttgtgttttggtcctatcaacacaccactctgaaatatcgtatgtgatacacatgcttaagcaaagtagagtgatcactatgtctgaaatctgaatgttattgtgacctatgagcaggttcaggtggattggatagttgttttttttccaacttctctgaacaaaagggatggtaaaatctgaaaattgtaactggaaagattatgcagaagtgagattaccagtgtctagattgccaatgatgacgccttctccaaatctcgccttggcccagatggagttggccctaatccggccatccttctccatcccaagaaactcccatgaacgggtggtgtgcaacctatgccctctgtttgggaaaaccgagatgacacttggatgctctgcgatagagaaccagacgaatcaccaaaccaagaaaaaatcgtacaaaaatcacacaagaaataaagagaaagaattacaagactattagactagtacttgatatctccattgcttcctcctcctccagagtagcagcgaagccattgatgtacttggtgtaggagtagaagatcgcatctctcgccttctccttgctgcattcaaacacaaccagatcgtaagattcacttgcatttgcagcagatttcatattcagattaaacagcaggataggtggtcctttaccttcccaggaaagagcccaagaactcgtggtgggagttcttggcgcgttcttggctggaggccaaggcggctcctccccttccatgcgagtggccgccgaggtagacaacaaacgactgcaaagaaagcaagttttcaccaccaaatacaaagagaaaaacccaatccagcaacagaaacgatcaagaaaccacttgccttcttctcagcataggctggtctctgcaggagcacaaggctaccgatcagtagagccagagcaagaagaggagcagggggatgattcttcagagaggaacacatgttacacacagagtctactcagattgttctatggattagtggtcaaatgctgggggggggggggatttggagtggatggaatgggtgatggattcttcaggagttcagagaaggtgaatttctgaatgtgcttgggcactgttggtattttatagg

SEQ ID NO: 20571 - DNA, 8280 bp, Oryza sativa
cctttcatttgataataaaaaaaagttttatagcgttagcaatgtgtgttgtaataagacataattttttagcagaataatcaaaactgcatttaaaaaagtatgcataacttttttttcaaaaaaagacaaaagattgggaaaaaaagtaagtagaattaggttcaagataaaagaaagttactagggcaaatatcacaaatgtatgatgtcagcactttagcgtttcctattaaaatgtgataaatgaactgctctgccttgcaaggttgagataattagagattacaagaaaaaagaaagagctttctatcatgggagaaaaagaagaaatagtggtaggtcgactattataaatcatgaaatcttatggagtaaaaacattcagagactagctcatttatatagatgtaaaacaaaatgtaaaatggataaaaagaacagaatgtgaaatctctgtagagtgtagtagacttttgtcccccttgccttttagctctggatctctcattctctctctcactctccctccctaccggccaatccatccagtccacgcagtgaatcatgtgatgagagatcagatgaccagagctcatcctcacctcaccggccggtcagtcacaggagcatttctttctctctttctttctttctttattaatttctttcgctgttgctgttcttggcgccacacagattgctgccatgattccgcagagattagagcccaaaatccgcccccaccctggaaagatttcccctctctttgtcgtcccctttcccatgattacatataatccccacacgatgaaccctacctccctctcccctcggagatcgtgctctctgaattttactgtggcatcacactatgtgccaaattaacctgcttgtcccatgtagtaggagtatgtgtatcccagtgtgcactgtgcagtgagctgtttgtttgcttgcttgcttgcagcttgtggattcattcacattcagatatcgacaagcagcaagcggctagaacagcacagtgcagtgtgtgtgtgtgtgtgttttatctgaagaaaaggtcaaaaaatgtgcgagttttggatggatggatggatgggtctccatgaagccatgggccatggctgtcttgctcaaggcagcagcatggtgcaatgcagtgcagcacagtggtacagtcaaaacctgaagaaatgcattcagggagagatgagatgggatgagagatcagacagactggttgtcgtcgacctgtgcatggaccattgctccctcccttatcccaaatctctgtttgctttcgtcaggattctcttggtgctttgaccacaccattagcttaagtgcttggcaattactccattcattctccaaatagttgacacagttgactgcggtcatctcacgttaaccataaattaaataattagaagaggcactaatattctggagcccatcaccttgtggagctagccaggagactcctgggtgtttctcataatacaaaacattttcaagtatttataacttttgtgaaaaaaaagaagacaagcggtcaaagtttaaacttaatagtatcacggtcaattattcagtaacagtgtagaaatttacaagtgttaatagtatcacggtcaattattcagtaacagagtgtagaaatttacaagtattaatagtatcacggtcaattattcagtaacagagtgttgaaagttagtacaactttggtgatgaactgttccttctgatcgagatgcagaatggagagttcagtgtttcacagttcagaagttgatcagttgatgaggtgaatgaaatttgtacggatttgatgcaggaagctgatcggtgcgaggtacttcaacaaggggtacctgtcgacggtcgggcaggcggcgaacccggcgagcaccagggacaccgacggccacggcacgcacacgctgtcgacggcggcgggccggttcgtccccggcgccaacctgttcgggtacggcaacggcacggcgaagggcggcgcccctggggcgcacgtcgcggcgtacaaggtgtgctggcgccccgtgaacggcagcgagtgcttcgacgccgacatcatcgcggcgttcgacgcggccatccacgacggcgtggacgtgctctccgtgtcgctcggcggcgcccccgcggggtacctccgcgacggcgtcgccatcgggtcgttccacgcggtcaggcgcggcgtcaccgtggtgtgctccgccgggaactccggccccggcgccggcaccgtgtcgaacaccgcgccgtggctcgtcaccgtcggcgccagcaccatggaccgcgagttcccggcctacctcgtcctcggcaacaacaagaagatcaaagtaaatcgaatcatctctcatcctaccaatcttttttcagtcctgattacatcagaatctcaccgtgtcgcaggggcagagtctctcgccggtgcggctcgccggcggcaagaactacccgctgatcagctccgagcaagccagggcggcgaacgcgacggcgtcacaggcgtaaagacgagcacgaaccaatcctcgagctgaagctgccatggatgatgccatctcatcatctaaatgctgtgtgttcgatgtgtgtgcaggaggctgtgcatggaggggtcgctggagagggggaaggtggaggggaggatcgtggtgtgcatgcgcgggaagaacgcgcgggtggagaagggcgaggcggtgcggcgcgccggcggggcagggctcgtgctggcgaacgacgaggccaccgggaacgagatgatcgccgacgcgcacgtgctcccggccacgcacgtcacctactccgacggcgttgcgctgctcgcctacctcaattccaccaggtgtgtgctcctatttgaattttttattttgaattatactcctatttgaatttaagtcttggtatttttggaaatagtttgacgcagctaccaactggcctattagctcagctggttagagcgtcgtgctaataacgcgaaggtcgcaggttcgagacctgcatgggccaattctttttttttatttttttttcaatatttttgggtacatagtaattttttcttacattcttttgttattatctaaaaaaattcttttgtacattaatttttttagaatatcttaatgttttgccaatctttattagcacagtattttattttttccgtcccaataacgcagatcgccgtcgggcttcatcaccgtgccggacaccgcgctggacacgaagccggcgcctttcatggcggccttctcctcccagggccccaacaccgtcaccactcagatcctcaaggtccaaacctttctcccaaattaatttcgcaacacactgtcactcactcactctcactgtgtccatcgtgtcgagatcgccggcgagcttgacctgtgtgtgtgtttggtgtagccggacatcaccgcgccgggggtgagcatcctggcggcgttcaccggccaggccggaccgacggggctcgccttcgacagccgccgcgtcctcttcaacgccgagtccggcacatccatgtcgtgcccccacgtcgccggcgtcgccggcctcctcaaggccctccaccccgactggagccccgccgccatcaagtccgccatcatgaccaccggtaagcgcccgttgcagaggccagagacgtaaaccatttccattatggccgaagacataaaccatttctattatctatttctgcattgtagaggccgaagatgtaaaccatttcttccgtggagtaatttataaggtgtttgtttggttgcagcgagggtgaaggacaacatgaggaggccgatgagcaactcgtcgttcctccgggcgacgccgttcagctacggcgcagggcacgtccagccggggcgcgccgccgacccgggcctcgtctacgacatgaacgacacggactacctcggcttcctctgcgcgctgggctacaactcgtcggtgatcgccacgttcatggcctccggctccggcgcccagccgccgtacgcctgcccgccggcgcggcggccggaggacctcaactacccgtcgttcgcgctgccgcacctgtcgccgtccggcgccgcgcgcaccgtgacgaggagggtgaggaacgtcggcgccgcgccggcggcgtacgtggcgagcgtcgccgagccccgcggcgtgtcggtggccgtgcggccgagccggctggagttcacggcggccggggaggagctggagttcgccgtcacgttccgggccaagaaagggtcgttcctggccggggagtacgagttcgggcggctggtctggtcggacgccgccgccggcgggaggcaccgcgtcaggagcccgttggtggtgagggtcgtggacaagaaggggaagaatggcttgcccatctcttgatgagttcttgccatgatttttgtaaaatctttttagataagttcttagtttgcgtgtgtttttttttttgggtgggatggtttagcctgaccaaagaaggtttggctagtttggtgaacagacttagaaatgataaactgaaacttacaaatcgcccttctatcacccacatacatgtggattaaaacttttttttagaatattttgctgatagagttagaatagcaattcatgtcatcgaaaacggtgacattaaattggttattcatagtatcgatgacattttttcgcgaagtctaggtggcatttccttccaatcggggtgtaggatttatcagcggtcttaagtgtgtggggttgtttggtttgtaccttagcattggtggtgcgtaacatgtagctaagggtggacaaaaaactcatggctcggataagctcatagtgagcttggttcggattgactcgaacttgtagccttaatgagttgagccacactaggctttcaactcacgaactactcatttaacccgttagcacaagagatcatcatatcttcgtgtacttggttcttcttaactaatatttagtcacttaattacatccaatctatttgtattcaatgacttatttagtagttagtgtttattgttatgtttatatatgataaaatagtaaacttaaaattattagggtttaataagctcactagccgagctagatttttaactcgttaaggttaatgagccgagctgagctagcttgttaagataacgagtttagacgagtcgagctgacttgttatcctctcgattcatggctagttaagtcttttgtgctgcgtaatctgcaattaattacctcatggagggtttgcagaattgcagacggaggagtagaaaagatcgccatttcttccgtgcttttttggccggttaattccacaaacacttgtggggggcattcatggcaacgtcgccgttgcaaagccaaacggacgtgcaaggcaaccaaacccaaacttttcggtggatttcccaccaatccatcggttgtactccaactgctgcttgaccattcgatcgcagaatcgcagcagcagcagcagcagctgtagtaggctagtagcatctgtagacatcagtgcacagcacttaacccagatggattcgcgtaaacgtcactgaatcccaatccggtggggaaagcgcctgttgactaactcgtgatggcgtagttaggagtattatctggttggttaattggtttggttcgtgtgccaagccgaacccacccacatgctccggttgccgtcgccggaagcgggaggaattcggatgaacggacaggcgagcgaccaactccggcgaggcctggccggtcatgtgcgccgcctcgcgattcagcaacgacgagattatgatacaagattatttgcgagtaatcaatcaagatgccccggtttgtcccggagcgcaggcaggcacgccaaccaatcacacatggtggttttttttccccaaagaaatcaaaaaagggacaggaatgggaggaacaagagaccaaccattaatcaatcaatccatggattgcaaccaaaatgcaggtggaaataaaataaaatcaaatccggcgaattcttctttacaaacgattagtactactactactcccggtctcccctactatcccccatggatagatctcgggagggagagaagagaagaggaggaggggctagcagctagtacggcggcggcggcgcgaagaattggtgggcgcggagggagccggcggcggtggaggaggcgtcgtggatgctgctggtgagcttgtggaagccgcgggtgtagacgccgaagccgaagccgatgccgacggcgaccagcaccagcacgatgagcgtgcagatgcagcacgccttgctcgggcagcagcacatctcgccggcggcggagcacgagaaaggcgatgcgcttttgcgtgtttttttttctctttttggtgcgggagcttttgccgggtgggcgtgcgtgcccggggacgcgccgcaccgcgcggctataaagggtggtggctgggttgggggatcgccgagtcgggtgcggacgccggtgtgttgggttgggttgggtggcggtttccgtctcggtcccgtcccgtaggggcgacgcgacccagacgctttggctggcggtggcggcgcttgccttccgttccctgcgatgagaaaaatactactccctcagcttgtgtcgtttaccttttttaagtatgtttaaccggtcatttgtttatttaaaaaatttaaataattattaattctgtttctatcatttaatttattgttaaatattcttttatgtacacatgtagttttacatatttcacaaaaaattttgaataaggtagacgttcaaacatgtttgaaaaattcaacagcttcaaatatttagaaacggagggagtaataatattttatggacgtaacatggtctgcagcctactcgggtccggggaggaaacggctatggcaatgtgaagcagaggcaaggtcgcaaggacgtgattggttgtcagatgtgggccaccaagacgtgattggttgtcaggtgtgggccaccggttgtagatgggttggagcgggacggcgacctaacgtatggccgtattggtcgtccttcttgaaagttgggctggaagtggatcgtgagttaacgggagtgaagcgattggcctggaacagaaaaggaataacgcaaaacctaaactgcatcccttatttcttgctcgtgtttgaatagtcatccataaaaccggatctaacgcctcctccatcttctaaaactggtgcaaggttttctgctgatatgaaaaaaaagtgggacccatgtgtcaccaacctctttctcctcccctcttctctctccctcccccttctggccatggcggctactacacgagcgtactcagcatgacggctccttgcaagacagcaacaagctcggcgagaggacgaagagccatcccacctccctccctacgcggctacgctgcacccgtcagcctcctcccccaccatgttgctactccgcgctcctcctcccgtaacgacaacctccatgccatcaccaccttcgagctcttccattgtcgtccctggtgagcctctctgagctcacactgtcgatggcctccatgtcgtgggggtcgaggtgtcgctgcctcgtcaagctctgcctccgcctcctcaagctgtcccttccccaagcgttgccgcctcctcgagcttccccctccccaagtgccaccgccgcttccccctaactagtggtaccactgcttctccacaacaagaatcgcctcctttgtcgcggtgaaaagaacaagatagagtgaattctcttgggggagatatagggggtggaagaaggagaaggggttggctcctccttcacaacctagcccagccatcgccaccactacctggttcgttgcccagatattactcggggcggcatgatgcggtcggtgactggcagccagatgtagagctcagcagtagtgaaacctcgttgagtcccctaatttcgaggatacgagcgggacactatggctcacactgttgccgccgaggtccatcgactcctctgtccaacgagcaccaatagtaatgatgccagtgagcgtgggcgcgaacaaaggagataggaatagaggcgaagaggacaatgcaccgtcgcagaggggctcgcaggagacgacatggtggacttgaggtgagctcggaggggcttgctgaccacccccgtcatgcctggcttggttggggaaaatagaaaa

SEQ ID NO: 20572 - DNA, 1740 bp, Oryza sativa
ggtttttaaagttaaaggatgtgatatactcgttttatggttgagagatgcgatatacttgttttacggttgagagatacgtttgacgaaaacaatagttaagggaggccaaacatagacttattaaaaaaaaaacaatggaccgaatattcgttctcttggaccgtgcgagatgaacagagcactacaccacgtatcgccgttcgatgtttgcgtcctccgtggtccggtgcagtgcttggacgattcaccgagcccccgggccagcgacaaaaatcctcacgatgcttagctactcgtacagctagcgcaggagaaactgaaaccgctcacttccctgacagcatcgcagcaaaatctcctctgtaccagctaaaatttggtttcgacagaagattcgagagccttacgctcttacggccgcacgcccaagtgcacgtttccttgatcccttgctaacattcaggcattcagcatgaagccatgaacttcggagcatataaccagatatacacaggcctctgttctctctctttctgaattctgtcagttgctcacgcacacctgacggcgcctgagtcccgacggccaccatatcctcgtacgtcctcctcgagagatatatagcagcgatcgatcgatcttctcttctcgtcttgatcatcaagtaggtaggtatccatgcatgttacgatccgtgcatgcaagaaaggtttcttcggttctttgttcctgaattattccactactgtttgcatttgcatgcctgtccatccaaaagaattgtgaaatctgtggttcttgaggtgatcagatcaagagttcggaggctgaatcgaatcaatgttaatccgtgggcgtttgcatgcgtttctgtgtagagtgcatggatcgtcggcggcgggggcagccggagcgcaaggcggcggcggcgacgacgaagaagcgcgggagggacgaggaggtggcggcggcggcgccgccgccgccgtgtggcgcggtggatttcccgttcgaggagggggacgaggaggcggcggcggctgacgtcgtcggggatcaggcaccgggggtgttccggttcccgtggcagagctgccgcggcgggctcggggtggtcgccggcggcggcggcggaggaggagggtgggagatgcgggacgtgttcttccgctccctcgtggacggcggcgcggcggccatcggggtgccgggcgaccgcctcgtctccccgccgccgccggccgagctgcggcgcgcgctcttcgacgacgtgggcgcgtggctcgccgccgccggcgacggcgaggtggaccccgtctggcgctcggcgctgctgatcgagggcgagcctcccgcgccggcgaccgtgtgacgacgacgacgtggacggaggtgggccccacctggcatacactgagtagcagcgtgatggtgacgtggcgtctgggcgccgccacgtggggactcgagtgctgacgattacgatggaggatatctacaaagcgaacgtcactctggtctctcttgacagagttacttccccttaaaaaaaagagtaaaatacatgatgggtcattaaacttgtttaagtgtgtcatataggtcactctacttttaaaatacatatttgggtcactaatatgaggtaagtgagtcacttacccatctaactatccacgcgagcatactttgtacacatggcatgccatgtaggattgaaaaaattacatttggata

SEQ ID NO: 20573 - DNA, 846 bp, Oryza sativa
tggttacttcctgggaggggattggctaatgggctaagaagggtgaaaattgacgtgcacacaaatagtatggctactttggcacctcgattcaggaccctgaggttgtatgttcataataatgttatcaccgaatttgctgagatggattcactcggaaaacatgagttaaatgcaaatatcaactttaaaaaggctcacatttcagaggactaccaagttgacaatataagtgataatgatgatgagggtgctgagtttactaacagtgattatgaaatagataaaggtgatgatgatttgtttgagaagtgggtggacaaggatgtcgttgataagctagtttcaccaaagggcaaacaattgtcaagtgctggtgaggaagatgaaaaatgccatctatctagtgaggaaggtttggatccttgtgatacttctagtcatgatgaagaggcgcaactaaaattcaagagtttcatgcctaaggacatgacaaatccacagttctttgttggcatggtattcccaacagtggaagcactaagggatgctataaatgatataaatgaacacagtgtcaagaacagagtggctatcaagatgccttataatgacaaagatagaataagggctcattgtgatgaaacctgcccatcgaagttaaatgcttcacatgatacccgatcaaaatgtttcatgatcaagacttatatcggcgaacacagatgcaacaagaagtgggagctaaagacattcactgccaactatattgctaacaagtatgtggaaacttttagggcagatgataagatgactataaggaattttgcaagaacagtgcaaaaa

SEQ ID NO: 20574 - DNA, 5512 bp, Oryza sativa
aagaaccaatttttattttgttttgctcaagccaagatcagatcagagatcatcagactgatcagtgctatacttagtgcacacaccaacactgcaacaaccaaatctgttctttgtacaaaaaaaaatacaaataaataatgtttttttaaaaaaaattgcagtagccattagccattagcagcttgactagtggtcatttggatccagatctcctaaacttttcctgtataaacaaatcatggggtctccccctctacaatcccaaggctttgcttagttagcagcagcagacgccaccgccgccacatcaccaacacatccaccgcattgccaccctcgcctcgccgtcgccgtccacctcgccgtggcgcgcgccgccaatgccgccgccgccgcccgtcgcagcagcagcagcagcagcgaggcacgcgcttctgctcgcgtccgtcgccgtcgccgtcgcgctgctgctggtgtcgccgtgccacggcgtgagcgagcaggggcaggcgctgctccgatggaaggcgtcgctgcggccgtcgggcggcgcgctggactcgtggcgggcgtcggacgcgacgccgtgccggtggctcggcgtgtcgtgcgacgcgcgcacgggcgacgtcgtgggggtcaccgtcacgtcggtcgacctgcagggcccgctcccggcggcgagcctgctgccgctggcgagatcgctgaggacgctggtgctctcgggcaccaacctcaccggcgagatcccaccggagctcggcgaatacggcgagctcgccacgcttgacgtcagcaagaaccagctcaccggcgcgatcccgcccgagctctgccggctgtccaagctcgagtcgctgtccctcaactccaactcgctccgcggcgccatccccgacgacatcggcaacctcaccgcgctcgcctacctgacgctctacgacaacgagctgagcggcgcgatcccggcgagcatcggcaacctgaagcggctgcaggtgctccgcgccggcgggaaccaggggctgaagggcccgctcccgccggagatcggcggctgcgccaacctcaccatgctcggcctcgccagaccggcatgtccggcagcttgccggacacgatcgggcagctcagccgcatccagaccatcgccatctacaccaccctcctctcaggccgcatcccggcctccatcggcaactgcaccgagctcaccagcctctacctctaccagaactccctctccggccccatcccgccgcagctcggccgcctcgccaagctccagacgctgctcctatggcagaaccagctcgtcggcgccatcccaccggagctcggccggtgcaggcagctcaccctcatcgacctctcgctcaactccctcaccggcagcatcccggccaccctcggcgacctccccaatctccagcagctccagctcagcacgaaccagctcaccggcgccatcccgccggagctctccaactgcacgtcgctcaccgacgtcgaggtcgacaacaaccagctcaccggcgcgatcgccgtcgacttcccgcggctgcgcaacctcaccttgttctacgcgtggaggaatcgtctcaccggcggcgttccggcgagcctcgccgagtgcccgagcctccaggccgtcgacctctcgtacaacaacctcaccggcgtgatcccgaagcagctgttcgccctgcagaacttgacgaagctgctgctgatcagcaacgagctgtccgggcccatcccgccggagatcggcggctgcggcaacctctaccgtctccggctcagcgtcaaccgcctctccggcacgatcccggcggagatcggcggcctgaagagcctcaacttcctcgacatcagcgacaaccacctcgtcggcgccgtgccatcggcgatctccgggtgcagcagcctcgagttccttgacctccactccaatgctctctccggctcgctgccggagacgctgccgcgtagcctccagctcatcgacgtctccgacaaccagctcgccggcgcgttgagctccagcatcgggttgatgccggagttgacgaagctttacttggggaagaaccggctcgccggcgggataccgccggagatcggttcttgccagaagctccagttgcttgacctcggcgacaatgcgttctccggcgtcatcccgccggagatcgggacgctcccgtcgttggagatttcgcttaacctcagctgcaaccggctctccggcgagataccgtcgcagttcgccggacttgaaaagctcggcagcctcgacctgtcgcacaacgagctctctggtggcctcgactcgctggcggcgctgcagaatctcgtcacgctgaacatctcctacaatgccttctccggcgagctcccggacaccccgttcttccagaggcttcccctcagcgacctcgccggcaaccgccacctcatcgtcggggacggctccgacgagtcctcccggcgcggggccatctcgtcgctgaaggtggccatgtccatcctcgccgcggtcagcgcggcgctcctggtcgccgccacgtacctgctcgcccgcatgcgccgtggcggcggcgccggtggcggcggcagggtcgtccacggcgagggcgcgtgggaggtgacgctgtaccagaagctcgacatctccatggacgacgtgctgcgcgggctgacgtcggcgaacgtgatcgggaccgggagctccggtgtggtgtacaaggtggacacccccaacggctacaccttcgccgtcaagaagatgtggtcgacggacgagacgaccaccgccgcgttccggagcgagatcgccgcgctgggctccatccgccaccgcaacatcgtgcgcctcctcggctgggcggcgaacggcggcgccaggctgctgttctacggctacctccccaacggcaacctgagcggcctcctccacggcggcggcgccgccgccggcaagggcggcgcgcccgcctccgactccgagtggggcgcgcgctacgacgtcgcgctcggcgtcgcccacgccgtggcgtacctccaccacgactgcgtcccggccatcctccacggcgacatcaaggccatgaacgtgctcctcggcgccgcctacgagccgtacctcgccgacttcggcctcgcccgcgtcctctccaagctcgactccgccatgccggcgccgccgcgcatcgccggatcgtacggctacatggcaccaggtggggtccaaatcacaccaaaaattctcgttacatttcccgcgctttttcacaaatccatcattatttcgatgtattttgctgaattttttgtctgaatttctttttctttttttcagagtacgcgtcgatgcagcggatcacggagaagagcgacgtgtacagcttcggcgtggtgatgctggagatgctgacggggcggcacccgctggaccccacgctgccaggcggggcccacctggtgcagtgggtgcgggaccacctgcaggcgaagcgcgacgcggcggagctcctcgacgcgcggctcaggggcgccgccggcgccggcgccggcgccgacgccgacgtgcacgagatgcggcaggcgatgtccgtggccgcgctctgcgtggcgcgccgcgccgacgaccgccccgccatgaaggacgtcgtcgcgctgctcaaggagatccggcgccccgcgccgtccgccgccggcgacgacgccaagccaccgcagcccacgcagccgccgtcattgcccaccaccgtcaccgcgacgccggcatcgccggtgtcgagctgctccttcgccgccgtcaccgactactccgtctgaaatttttgaaaagcttagtaaaaactagcgagcagtaattagttaattaccctcccataatctgttgattagccaagaaatcatcagcagcagcaactctgtacttaggtgtaatttttccccactgtacattaatccaagaaatgccattagcagcagtaaaataactctgggcattctgattgctgaagattacatctcgaatttgtggatgaggcggcgtcgttgtcggatcacgaacagaaaaaaaatgaacaaacaaagcgatcgatgatctgtatacccaatcagttgatggtttgtgatgatgcagattgatgggggctgagccaggtgacatgctcctgatcatgcgtgtgtctcattgtgtgcgtctcgttctcggagacaggtcacacgtccatctcacgccgacgaggtgaggtgatcattgattggatcttttgttgtccaaccgagttgccattctgcatgctctactattgaagctaaactcttttttcgcaagcgcgcaaaaagtttgcacgtcaatatattagaataaaacatagttttatgggcaaaattcagatttcacaagttcagtttacacgcaaaataaaattttaaaagaaggcattgcagtatatgaaatagtgtcatggtaattcgatcgaaagaaaatacatagtagggaatgtgatgagcaattgagcataactaactacaactagttaggtttacttccatttgttacatattgaaaaggatatgagggttcagctgagtgctaaagcactttttttgaaagactttgctggacagaagcaaatgctggtcgttaagcagatttatttttcagataatgtgttaagcagacttgacgaacaaattgcattgtgcaagataaataaatcctaaataacaaatttcggtcagcacagcagtctttaaaattctaggaaaacatggcagtatatgcagcaaaagatcgtgaaagcaaactggagtagctccaaaccaagaatacgtaggcccaccagttgtggcccacgtacgtggcaatcccttcaggcccacctattatgggcctcgccgcaaatccccgtccagcccataaataatgggcctcatgtttagccccgatttccgatatggcccaacttgtgccggcccagtgatggtgccgtgagcctcctgccaagtggaccccatgcggcagaggctcgccctgaatttatcacgttttgatcattttagaaaattttattacctaaaaaagtttattcagaatacgatcttttcgagacgctagtgtcatgcctggttttgctggcgaaaattttgagttcgattgtaacatcgcatatacaaacacatatttaaaatattaaacgtagtataaaaataaaataaattacatatttcgtcagaaaagtgcaagacaaatttattaagcctaattaatctatcattagcaaatgtttactatatcaccacattgataaataatggcacaattaggcataaaaattcatcttgtaattttctgtcgaactgtgtagttggtttttttccacatttaatatttcatacatatgtccaacattcgatgtgaaaggtgaaaaatttttattttagaaactaaaccgggtctcattggcgccgtgatctaatataatgg

SEQ ID NO: 20575 - DNA, 1465 bp, Oryza sativa
taagcctatccgtgacaatgtggatcacatgatctgctggtttctgcatttaaataaagtggtatgcatctcgttaaatataacaaaaaatgggtagaagaactattagttcatagagattaatgtcaaaggtcaaatgatgtaccttagcatgaataatagtggagtttacaaccactgcagcagccaacacattatctgagaacaacgcatagtgatagagttttggatcttccaacttttctatatgtgggaattttttattgttggagttggtgtagtagtactcatttgtaagccgcagcggaaggcaatgaagtccttttggtaaagattttgctgctacttgtgctagatagttggtttcctttttatgagattggagtcgctcctctgttgagtgaagggttgcacggagcctgttcagagcacccgagcaactatcaagaattctctttccctttcccaatgtttgctccattgctcttattttgctaagtacactgcataataataaaaaagggtgagatgtccaatttcaacaaaaggtacggcaaaagcaataatgcaccatgatgacacacacacacacagagagagagagagagagagagtacttctgaggaagctggccaccactggttgcatcacctaggactctttggatatccctcatccgtgcacgaagctcccttgcaaaaccatgattgcctctagaagctacaaggctcagatatgtcgttgctctcgtcaactggtccttgattgtgcggatggtagcgtctggggaagtagtggaatgaccagcactaacacttgttgggagagcagaattactgttagttgttggtgtgtaagactctttgggaatagcttttgtaacttgttcagacaatctaccagtgctcctttcctggacaattgaacaattaacagttagttcatagcataacctgaaagacaatcactgacggttgagtggttgacggaacacatatactatgactgtggataactgagtacacaagttacagtatgttaacaccactaaacaatatgtttattccaaataagcagtccagctttcagaaaagggtgacaaaatggaaaatcacaaaaagaatgggcatctaaatgcatttttactcaagtgtatagagttgtaatatacatgcaactatgcaagaaaggtgaacaacagaatattaaattcattaaagaaaataaaaaccattgaaaaatctgcaccacctcggcagcactcacttacttgattcctaaaatgagcatgattttaggtgctagtaaatatgtatagctgcgaggtgttgatggtacaaggtgtctaaagtcttactttctagttagtagtccctacccatgattcttaaaaggaaactttatcacccttgccaagtatgcaatcggtcatctgtaatcaattttaccttttctagggatgaat

SEQ ID NO: 20576 - DNA, 5260 bp, Oryza sativa
  unsure (1)..(5260): unsure at all n locations
taaatccgcactactggatagtacaaaaaatgcaaaatgataaacagcggaaggcacccccacctttggtgagggagacgtcggaggcagccaccaccagattgtactcgccatcccgatccagcacgccgctcgccactgcaaaagagaaggaaaaacaaaaacaccacccgtcaagcacggatctccccacattgtcggcgaagagagagaggggggggaggcattcgtccgttcgtaccggtggagtccgggagggtggagacggagacgggggagccgccgtagaggacgaggggcgcgagcaccgacgagaggaggagcagcagcaccacgcccctgcagcgccggccccgcgccaccgccaccatgggctccccaattcccgccgcctccctgcacttcggagagcacgcgcgcctcgccgccgccgccgccgccgcgccgagcgatgcgggaggaggaggagatggcggtcgcgttttgcggtgggcgcaggcgcagcgaaagccgaggcggccgcttattttttgggaggaggcgagatgtgttgtgtgtgtgtgggttttgggcgtcggcacgcgcggcgcgggggggcccggatgcgaaatctcggggcgcgcgtggcgtgggtgacggcgtgagcgtgagcgtgagcgaccgacccatatgcgtgtgtacgactttaaatttgcttgctccaccctggattcccatgatatcgtggagtagaagtaaaaatatttttctccatccaatttgggcagatagtgtgtgagctggagtagtagatctatttgctgtccctaagctgataactgtcccaaattgctttaaaattggtgcaggtctctatatttaaggctgtgttctttgattagggttccaacccctctccctcatgtttcgcgtgcacgcttttcaaattgttaaacggtgtattttttgcaaaaaagcttcaatacaaaagttgtttaaaaaatcttattgatctatttttttaaagaaaatagctaatacttaattaatcacggactaatagaccatctcgttttccgtgcacaagacatgggttcccaactcatagaaaagaacacactctaagagcacccgcaatggtaaagtaaggtgctatctataaaacatgtacatctcagcaatagactcgattaatagtaaaccaccttaatagtatgtctacattggtatctataattctctcatgcattgcctcgtttttctctatagactatctctaagttagtagatagctttgctctctctcttcatttaataccttccaagtaggaaaatatgctgacatggatctcttgtagagagcctatagataaccattgtgggtgccctaagcactgaatgcagtgtgaattattagcgtatgactagttaactattagcttaaaataactaaaaaataaattaatatgatttttaatgtaaattcttactatatgaaaatataaaacaaaacattatagtttagtagttcaggaagcacacgtgtgaaaaacgagagtataagttgagaactttctcatcaaacatgcccttgatctttttatctctcctatttttttttgtcccgtctcacaccattgtgataccgctccaccgtcttcctcatcatcatcgtcgccgtcctccaacaccatcaccgttaccaatattatcatctccaacctccttcccttgtctcacccctccctcccccacctcgatccatcatcgtcgctctccacctcttaatcacatggcctttgttttccaccgctgatctcacccattatcggtcttccaccaccgccgtcatttgtctaaagccttccttctatgtacattgtagtttggttatcactagtgccaaggctcgccaaggaagctcccatcgccggttagtccgccatatcctccatgtattctttgtttggacctctcccgattaaagtgtgtgtttgtgtttaagggtccgtgatccatttcccaaaaaaacaggatagctatttagtacataataattaattaggtataactaaaacgatttaaaaaatggataaacatgattttctaaagtaactatcatatattattttatagagacacacagtgtttaaccgtttggaaagcccgtgcgtgaaaacactagactataagataggaacgggtattctgaacgcagcctaataaaactaacactaggagcttttctaaagcattgataggcgcctacaaatcgggcgtccgattttttttttttttgctacaagtggatcgaacatgtttcactaaatagatcgaaaatatttcagtcttttaaaaagctgaaacacaaccaaatcacctcatgaaatattttgctacaatgtatgaaacaacggttccaaaaaaaaccgagcgttgtttcaccctatataaaaataatattttagcaaatagcgaaagaatgtttcaattcactggaacatttgatccatacacagtgaaacattatgagtacactaggtgaaacatttttggcggaacaaaaaaatgaaacggatttcttaatagagggtttctataatatatgggtgatttgttgcaaacgaatatttcaattcactgcaacatttcatccatacatagtaaaacatcatgcgtacactagctgaaacatgttggtgtaacaaaaaatgaaacggattttcttaatatggcgtttccataatatgtgagtgatttgttgcaacggcgtgtgtggtggagacacgtggcgggggtggtgcggcgtggggacggcacgtgggcggcgggcgcgcgcagcgcccgatttttctagcgcgcgtcgggcacccaatccctggcgtttttcttgatttccatgatcaggggtggatctatacagtagtatgagcggtgtcaagcgacaccgacgactttgggcaaaacctatagcgaaactgcttatccacatattataacactatggtctaagcataattaacatactatgacaccgatagacacgttatgataccaactaatcgattttttagatctgatgatgaataccgaaaatgctcacactcggacgaccgcgcgggatggagaaaaatcggacgctgttgttgacgaaaaaatcgaacacaccggcctgggagatctgcttagctccagtgtaggtccaaatcttggtgaggtgcaggcgtgccagtcagtttgatcctgcaactgacaagatatgcaaatagtagatcaaaacagccgatcggctaacaagccaatggagtggttccagccgatagccgataatagccgatgccgataccagccgatagcgatagggtttaagcaatcggctatatatccaatgtagataatgatataaaggcgatcggctgatgatgatagaatatagcaataatataatccagtataaaccaatcagctagcaatgatatgataaataagcatcgatccgaagtttaaagcacacatcggctggaggtccgatgtcatgaaatccacaaaattagattaaacagtgaaacctttgttgtcatcggctaaatccaacttatatgtatatgcaatcctcatgagccgatgcaacgtccagataacttaccggctgaaaccccgatgaaacccttattggcaatcaataagcaggctagagattatggttctaagcacgacttagtagatcaaacttaactgatgtagcactaagtatgaaaagaaacataatatctagacaatcaagccgatgactgatttttaggatggtagatgcctatgctaatctaatctagcaaggcgatttagccgataccggcagaaaccctaaagcgagagacagccgatagagctaaattgatatgctaagactggattatcagagacatatgataaataggtaggcaaatatatcatccaaaccagagcaatccaagaggtcgaatgtactgatgcaaccttgaacgacgccgatgtagacgatacaattgcctaggccgacggaacattggacttatcccttcgccggagatcgaagacgatgcagccccgcgtcgggtgccaagttccgccggaatgtaaaaaataaaagtagaagtaaaaagggtggcgatgcgctgaattgtattgttgatcgatagattgatagattacaatgaccccgggtgtacatatttatacccatagagagatactagtcctcgtcggacaagaaagaaactaaaaaggaaaagataaagtccttatcggacactaaacacactttcctaaagataaaaggaaactaacaaattatgcctaattaatagataactgtcatgttgcatccttcttgaactcgaactcttctagataagcttcctttgattgatccgactccactaagaacacgacatcgtggcgacttagactcccatcggctgattctagaactttgaagccgatactgactctaaaccgatggtaactttgggcttaccaaatttcactgttaacagctgtctgccactgcagatnnaaataatcttttcttttcttatttcttcaaaagattttttatcgtaaactatttatctaatctacgatctgattgcacccctaaattcgttacaattaaatctttacaacaagaccacacattattatatttcgacaaaaaatattttaatttttttattgattttttttaatgttgcatgtggtctcttttgatgtttcaaccaatagttttacaatgtttcagctagtgtacttatgatgtttcactgtgtacggatcaaatgttgcagtggaacgcgccgttgcaataaatcacacacatattttggaaaccctctgttaagggaatttggtttattttttgttccacaaaaaatgtttcacctagtgcactcacaatgttccactacgtatagatctaatattgcagtgaactgaaatatttcattgcaacaaaaaacccacatattttggaaacctcctattaagaaaattcgtttcattttttgtttcacaaaaaaatgttccacctagtatacttataatgtttcactatgtatagatccaatgttgcagtgaactgaaacattcttccactatttattgaaacattgtttttatataaggtgaaacaacaccagatttaaacgagtgaaacattttcgatctacttagtgaaacaattccgatatacctggtaaaacatcgtgcaatatttaaaaataattcaataataagctaattt

SEQ ID NO: 20577 - DNA, 566 bp, Oryza sativa
tcaaatgctatgaaggtgtgaagcctggatggatctatgcttgatctaatatcattgttgcatcgaagcaccgagacacgacgagagtctaatcccacttgtgccactccatgagtgtcatcataaattgtacagaaactttctttcttcaattggaaaatggctaattcacgcacaatgtcatgcattcgaagacactgaaccctatcaaaactgttacatgctacaacttgaagcatgcttcgttggacaagctctgctaggtaaccttcagcgacatcttctaagctgcatgctcctttttgttctataaatccttcactgatccacagtctaattaatctctttctgtgaatcagataatcttctgggaacatagcacaatataagaaacaatacttcagatggtttggcaggtgcttgtagcttagatttagaattttctccacccggtttaagttctcattattgtgtacctctgaaataagttgattgtagaaaagcctccaatctttattattctttgatttgaggacaataaactccctattgccacaagagctaaa

SEQ ID NO: 20578 - DNA, 1802 bp, Oryza sativa
cactcaaaatgaacccttttttttaatataacaccttgatcttaacagggtaaaatgcaccagatctatttaccaaattatcctagaatctacaaaaattggcacatggattcatgcatgcacccccattgtttgttccatttatggattcccatatccaaggcgagaagaaccctaccaaaatgctaattgcgcccataaaatctgcaccattattgacgagaagcagagaggaagaacagagagggtcgaaccaatgtgtccagcgaggtggcgacgaggttgtcgccggagccgaacgcggtggcgagcgccagcgagaaggagaagtccccgtccccgacggtgagtatgctctggagggaggagtagtgcttcagccacttcaccccctcgtcgtcctcctcccgctccgccgcggcgatcgcgttaaccccctccgccacggccgccgcctcgtcggccaccggaatcgcttgaagcgcctcgcccttgacatccgcagccgcggccaccgtgttcccccccgctgctggtgcatgcgccgcctcgttctcgcccgctaccgccgccgccgccaccgtgtccccctccgccgctgcatgcgccgcccccttcgcggcgaccaccatgtccccctccgctgcaggcgcctcccccttcgccgcggccaccgtgtccccctccgctgcaggcgccgccgcattctcgtccaccatcgcggcgaccgtgcccccctccgctgcatgcgccggcacctcctcctccccgcaccaattcgcccccggcgccgccgcattcgcctccctcccgtcgccgtcggccacgatcgcccgcaccaccacctccacctccacctccacctcctccagcggcggcttctcctcaccctctgtcaccaccgccgcagccgccgctggcgagagcagcgcgaccgccgccatgcgcgcgtgcgtgtgacacgatcggcgtagtggagtggagttggagtgggctcgagtacaaacagtttccgcgcgtgaggatgaggaggaggaggaggacgcggcggcggaggcgaaaggatgcttttgacctcccggaggaaaaaactcgcgggattcccgaggaaggggtgggtcccacatgcagtgacacgagggcatgcactagtggtagtatgagcatctacgtttatactgtgcttttattaaaaaaatatattttatttataaattattatttgtttgtaaatatgacgtaatttacagataaatagcaatttataaataaaacttatatttaaaaaaaacacagcacaaacgcaagcgctcacaacatgtgcacacttacaccctatagatgtctcgttgtcgatgagtacgtcgtctatcactgaaagaataattagccgtaaatacgagcacactcataccctgtccttatggccgtcgcctgccactaaaaaaataattagccgtaaatacgagcaccctcacaccctgtctttatgggcatcttgttgttgacgggtacgtcgcctataactgaaagaataattaaccgtaaatgcaagcactcatgatctaggattttaaccgggggtaggctgattccaccacaagaaacctaatcagttgatctacgctcacttcgctccaaatttaaaagcaaaaaagcaaaatcagttgggtggactggattttatatacatgttcttagcgatctatgagcaaagactaaaaaataaacttcgatgaaaaaacctcaaaatcaactctaaatttaaggttaaaaatttaaattttagctgataagtataa

SEQ ID NO: 20579 - DNA, 1462 bp, Oryza sativa
cttgtcaatgctcaatcatctgaggttttatctccctgaaatcttcccgaagcttagcaaggtgttattcctggatgatgacactgtagtacagcaggacttaagtgcgatttggtccattgatctaaaaggcaaggttaatggtgctgttgagacctgtggagagacctttcataggtttgataagtacctcaacttctcaaatcctcttattgccagcaattttgacccgcgtgcctgcggttgggcgtatggcatgaatgtgttcgatctatctgagtggagaagacaaaagattactgacgtctaccacaattggcaaagactggtgagtacttatgagcttacaatcatatttatttgtaaaaatatttggagatggtctctctgccatcctactgctcctcctgcacttgaacaccagtagatgtaaaatattaagcctcaaccagcagagaccatcttgtcaatctcgttgtttgaagaaaagctgtagtgggtccgttcagctagtgtaatgaaaacttgcacttctaaccctggctggaattgaattgaaagcacctgatctaatgttccatacttccaactaggaattgagcatgttatattgttatgcttagaaaagctgctacagttaaaccgatgaacaacctcaaattctcaaccgaaaatatgatttaccattctgtagtgctggtttttttttctcgaacgtgcaggagagatgtagtgttggtttgtcctattgttctgctgtttatttcacttattgatatctgatttctgcagaacgaaaataggatattgtggaagctaggtactcttcctgctggtctcgtaacattttggaaccgtaccttccctcttcatcactcctggcatcagttgggacttgggtacaacccaaacatcaatgagaaggatatccggagggcatctgtcatacactacaatggtaatctgaaaccctggcttgagattggattgtccagatatcgcaaatactggtcaaaatacgtcgatttcgatcaagtcttcctacgggactgcaatataaatccctgaatgacagagtgttgtattatccaattattttcttttcacctggtagattaattctttacgctctaggttttatttaagctgtctagagcgatattcttttatctgggctcttctctcttgtaaaggttccagcaagttagtggtaggctttagatcagagacatgttcaatcacagatcacgaaagctgcatcacattttgtagtcactaatgttaatatagtaaattatttgattgtattattcctatggaagagtatttaggagtacctttattaatcttatgtggctccagtatttcaggtatactacttggtcatttgttcacttgaaagccatttattaatctgaacaaaaccaatatttgctgactcgaacacgaatgcatatacatg
